United States Patent Application Publication US 2006/0134663 A1 - sequence listing, part 114

SEQ ID NO: 354004 - DNA, 3809 bp, Homo Sapiens
  misc_feature (102)..(121): n is a, c, g, or t
  misc_feature (265)..(265): n is a, c, g, or t
  misc_feature (545)..(545): n is a, c, g, or t
  misc_feature (571)..(571): n is a, c, g, or t
  misc_feature (633)..(642): n is a, c, g, or t
  misc_feature (2674)..(2716): n is a, c, g, or t
ggatgttaggctttgtctttcttttgtgggttctcatgggatagtcatcacatccctcccaaggggaagtagcaggctggactttgtcaacaagatgtgcannnnnnnnnnnnnnnnnnnnaaaaggctgtttatctgagtgactcccaaggaaaactagagtgctttgagatgttccccaccttggagcctgatgccggggaggaacactgtgctgtcttgccccaggtgtcatggcaccactgactgaggcagcccctggctngtaccagggccaggtgtggggaggacccaggcttctcatctcttttggcggaacttctggttttgctaatggagctcagagttacatgggatattgcaaaaagggaggtctgggagttctctttctcttgtgatgcccaggctggcagccttccctgtaagacacagaaggatattagtccccaagccattgtggcgtgtcctttcttacagcccacggctgtgtctccctccctcctcatggcccgtggctccctccttcacatacatcagtgtaaatnttgcacacacagtcacttgtattgancttccttttgtgaagctaaaaaactgtttgcaacatggttcttatccatgcccatatttcannnnnnnnnnaaaggaaacccagatttttccatactgaattagcttgaggtggagggcacatgggaaagtcttgccacttaggagaatctaagagaagctaacctgcgagccccgcgtatgtggaacctgtgccattcttgcttgaaattacagagcggaagtttatgtaacttttcttaggatgggaactgcagtgccctctgagaagccactagaagtcgcagccctttacctgctcagaatgcacatgcacacacgtttatggccctgtttatggggaaccgtctgaacccacctcggaacgctctaagggcctcgaggggctgggttaagaatgcttggtcgggagcaagtctgtagtgatttgaaatggccctaccctcggtctcctcgctggtttcaggcaccatgaagtttggtgtggttttctgagacgccttagatatggcagaggatgagattatctcatggtctaggaaagaattggcattagtgtcagaagcccctgctctcgtcctgactcttggccccattggccccccagtgagctctttgacacagagtgaggcagttccctgtgtaggcctttgtcccttcctcgataaaatgagggagatgatttggaaaatcttttctgattctgaaattcaatttcatgctgtttcaactaagtctttggcaactaacagtagctgcccatgagttagaggaaatgaactgatttgtgaatatgcctactgttcatagatgatgccacagagaaagacctttctgatctggtgtcagagatggagatgatgaagatgattgggaaacacaagaatatcataaatcttcttggagcctgcacacaggatgggcctctctatgtcatagttgagtatgcctctaaaggcaacctccgagaatacctccgagcccggaggccacccgggatggagtactcctatgacattaaccgtgttcctgaggagcagatgaccttcaaggacttggtgtcatgcacctaccagctggccagaggcatggagtacttggcttcccaaaaatgtattcatcgagatttagcagccagaaatgttttggtaacagaaaacaatgtgatgaaaatagcagactttggactcgccagagatgatcaacaatatagactattacaaaaagaccaccaatgggcggcttccagtcaagtggatggctccagaagccctgtttgatagagtatacactcatcagagtgatgtctggtccttcggggtgttaatgtgggagatcttcactttagggggctcgccctacccagggattcccgtggaggaactttttaagctgctgaaggaaggacacagaatggataagccagccaactgcaccaacgaactgtacatgatgatgagggactgttggcatgcagtgccctcccagagaccaacgttcaagcagttggtagaagacttggatcgaattctcactctcacaaccaatgaggaatacttggacctcagccaacctctcgaacagtattcacctagttaccctgacacaagaagttcttgttcttcaggagatgattctgttttttctccagaccccatgccttacgaaccatgccttcctcagtatccacacataaacggcagtgttaaaacatgaatgactgtgtctgcctgtccccaaacaggacagcactgggaacctagctacactgagcagggagaccatgcctcccagagcttgatgactccactagtatatatggatcagaggagtaaataattggaaaagtaatcagcatatgtgtaaagatttatacagttgaaaacttgtaatcttccccaggaggagaagaaggtttctggagcagtggactgccacaagccaccatgtaacccctctcacctgccgtgcgtattggctgtggaccagtaggactcaaggtggacgtgcgttctgccttccttgttaattttgtaataattggagaagatttatgtcagcacacacttacagagcacaaatgcagtatataggtgctggatgnnnnnnnnnnnnnnnnnnnnnnnnnnnnnnnnnnnnnnnnnnnttacaaggagttattttttgtattgattttaaatggatgtcccaatgcacctagaaaattggtctctctttttttaatagctatttgctaaatgctgttcttacacataatttcttaattttcaccgagcagaggtggaaaaatacttttgctttcagggaaaatggtataacgttaatttattaataaattggtaatatacaaaacaattaatcatttatagttttttttgtaatttaagtggcatttctatgcaggcagcacagcagactagttaatctattgcttggacttaactagttatcagatcctttgaaaagagaatatttacaatatatgactaatttggggaaaatgaagttttgatttatttgtgtttaaatgctgctgtcagacgattgttcttagacctcctaaatgccccatattaaaagaactcattcataggaaggtgtttcattttggtgtgcaaccctgtcattacgtcaacgcaacgtctaactggacttcccaagataaatggtaccagcgtcctcttaaaagatgccttaatccattccttgaggacagaccttagttgaaatgatagcagaatgtgcttctctctggcagctggccttctgcttctgagttgcacattaatcagattagcctgtattctcttcagtgaattttgataatggcttccagactctttggcgttggagacgcctgttaggatcttcaagtcccatcatagaaaattgaaacacagagttgttctgctgatagttttggggatacgtccatctttttaagggattgctttcatctaattctggcaggacctcaccaaaagatccagcctcatacctacatcagacaaaatatcgccgttgttccttctgtactaaagtattgtgttttgctttggaaacacccactcactttgcaatagccgtgcaagatgaatgcagattacactgatcttatgtgttacaaaattggagaaagtatttaataaaacctgttaatttttatactgacaataaaaatgtttctacagatattaatgttaacaagacaaaataaatgtcacgcaacttattttttt

SEQ ID NO: 354005 - DNA, 412 bp, Homo Sapiens
  misc_feature (16)..(16): n is a, c, g, or t
taccccctctcacctnccgtgcgtattggctgtggaccagtaggactcaaggtggacgtgcgttctgccttccttgttaattttgtaataattggagaagatttatgtcagcacacacttacagagcacaaatgcagtatataggtgctggatgtatgtaaatatattcaaattatgtataaatatatattatatatttacaaggagttattttttgtattgattttaaatggatgtcccaatgcacctagaaaattggtctctctttttttaatagctatttgctaaatgctgttcttacacataatttcttaattttcaccgagcagaggtggaaaaatacttttgctttcagggaaaatggtataacgttaatttattaataaattggtaatatacggcagcacagcat

SEQ ID NO: 354006 - DNA, 1803 bp, Homo Sapiens
gggggggcgggcccgtacgccgattccatatgggcgccggcgcggagcgccgcggggcagcgcggggtcgccatggctgagctgcagcagctccgggtgcaggaggcggtggagtccatggtgaagagtctggaaagagagaacatccggaagatgcagggtctcatgttccggtgcagcgccagctgttgtgaggacagccaggcctccatgaagcaggtgcaccagtgcatcgagcgctgccatgtgcctctggctcaagcccaggctttggtcaccagtgagctggagaagttccaggaccgcctggcccggtgcaccatgcattgcaatgacaaagccaaagattcaatagatgctgggagtaaggagcttcaggtgaagcagcagctggacagttgtgtgaccaagtgtgtggatgaccacatgcacctcatcccaactatgaccaagaagatgaaggaggctctcttatcaattggaaaataaaagtatttgccagtggccatcagggctgagggcaagaatatattttttataaggaattgggaattttagtcttttaagcaaagtttacgaatgaagaaatgaaggatggccacaagcgtaaggcatatgtcacttgcctctggacactggttattttatgtttcagtccctaaaaaatgaaattggaaaaaagtggtgctaaatcgagtcagagatattacaggagagttttagagcttattatttcctgtggccagtgcttgtcctggcagtaaggctctcccctgtaacaagccagagccctccaaggtaccagactcttcttactacacaggtactaacaggctggcaggttagagttggtggagtctgaggagagatattttctctttgttgccaacatcctgtttaccaaaagtgtcaccccaccatcttccataagctgtgaaacaaaatcaatgaggtcactaacttagaagggaaagaaagttttctgggtctttgttttcttgatttggggtaatttatacaagggcatacaagttgattttaagatgtggaactgggaggtagactagtttggataagaactttgaaatgttccttgtggatccccatttctggtcatcaagatgtggatgtacatttcttaaaattattacatgctgcatctttcagcctggagactgtgcagaaacatgagaggtgatgacacactaattatgggaagcagaattactggctgatggcccctgaggctgtgtgtaacaaaatgacaggacaatcttgcagtaacactttccccttgaagagaagggggttttgattgtgatatatactagtatctaggaatgaacagtaaaagaggagcagttggctacttgattacaacagagtaaatgaagtactggatttgggaaaacctggttttattagaacatatggaatgaaagcctacacctagcattgcctacttagccccctgaattaacagagcccaattgagacaaacccctggcaacaggaaattcaagggagaaaaagtaagcaacttgggctaggatgagctgactcccttagagcaaaggagagacagcccccattaccaaataccatttttgcctggggcttgtgcagctggcagtgttcctgccccagcatggcaccttattgttttgatagcaacttcgttgaattttcaccaacttattacttgaaattataatatagcctgtccgtttgctgtttccaggctgtgatatattttcctagtggtttgactttaaaaataaataaggtttaattttctccccg

SEQ ID NO: 354007 - DNA, 605 bp, Homo Sapiens
agcagagctacagtaccttaaagaatgggctgtggagcagctgtttgccacccccctttataggtcttcatattcaaactgcctttgcaaagcttccttaagacctttcaccaaagcagcaagagcactacctgtaaaactcaaagctcttgcttccccatcattttctccaagcagcctatttatgttaattgattgcccaaattcagttgtaagcagcttcctcaatttctgaagggcccacattctgtgactggtggctaggccactcagctgtgcacaatctgccagcaaggccacaaggcgagggacgatacttctgttagaggcaaggttgagtcggaagtctaacagacacgtcaccaagtccatggatggacaggagaggacgcagcggtcagagaggagttctttagggccagcagctggcatgatgggatagacggtgaagcgccagccccagccaggcctccatgaagcaggtgcaccagtgcatcgagcgctgccatgtgcctctggctcaagcccaggctttggtcaccagtgagctggagaagttccaggaccgccaggcccggtgcaccatgcatgcacgacagccaaac

SEQ ID NO: 354008 - DNA, 835 bp, Homo Sapiens
aatgtagattctttattgattccaccaatgtattagtagatatgataataataaatggtatttttacattctcttaaccaaaaatataacaaatatttacactcagtaaaaatacaaaaagcatacagaggcactgtctttctaaaagacataagtttaagaggtatcaaaaaataggagacaaacattgcttgttacaggataccttacaatcaatgaattgtgcagtagaattgctatctgattattacagatgtgcagttttgtttctgtcttttgctgattagcttacatgtctcaattttaaaagatcaagttcaactgcattctgtgtatcaaaaacaaagaagcattaaaaatgcacaacaaaagtcaaagatgaaccaggattcaagtttaaatttgaacatgtactgtgacacttttgacacttttctgaagatttatcccgtttttctagcctttaaggtaatgctgaaggaatacatatactttaatatcaccttttttagaaacttaaaattgaatcaaaataatcagttttaaggaagctttttctcctccttccttttttgtagaggaaagaacacttgataaaaattagatttgttcttaaaaacacccatgattaccatcacattttcagcctgggagagattctcaaggaggtgatatagatcgcaatgatgtgatttatcaccctcaagaaaattcactaaaggctttttctccccaaagatcatattgaaagtaatcatttggagtaaattagaattattaactttaataagcttttatggaatcatgtactggatttactaattctcaaaatctt

SEQ ID NO: 354009 - DNA, 646 bp, Homo Sapiens
gagctgttcttggagttcatctctggagaggttatacattattagaagtttgattattattatagtttgatcaatttatttgtcttagagatccaatttttactaattccctagttttttatttcagcatctgaatgtctttctccctagcacagtgcatacaatcagggccttgggtatttccagtgataactttccttggagaggatctaagaaaagcccagatttcggtagccatctccctccaaatatgtctctttctgctttcttagtgcccattatttccccttctcctttcttctgtcactgccatctccttcttggtcttcccattgttctttaactggctgtaatgtggaattgatatttacattttgatacggtttttttcttggcctgtgtacgggattgcctcatttcctgctctgaattttaaaattagatattaaagctgtcatatggtttcctcacaaaagtcaacaaagtccaaacaaaaatagtttgccgttttactttcatccattgaaaaaggaaattgtgcctcttgcagcctaggcaaaggacatttagtactatcgattctttccaccctcacgatgacttgcggttctctctgtagaaaagggatggcctaagaaatacaact

SEQ ID NO: 354010 - DNA, 815 bp, Homo Sapiens
cgagaagcgctttgcctgtcccgagtgcggcaagcgcttcatgcgcagcgaccacctcgcgaagcacgtcaagactcaccagaataagaagctcaaagtcgctgaggccggggttaagcgggaggacgcgcgggacctgtgagccctcccggaggtggacccccttcccagcacctctgcgagagatccggggacctgtgggcagctggcggaggggagactcagcagacggaccctctccgttgcctgcctcccaaaatggagccaggcttccaacttccgctgccttcggacatgggacccagttcccaggagcggggaggtagggttggggctggggcatttggattgtaattgggagctctgccgtacgccagggcggttccaaactctaaaccgttcccaccgtcagggagacctacagtttcgggggaccaccctgggctggccttgtatataggaaatgctgctgaactgaatagaaaggaacttgggagatttgaaacagtgctcgggttttcgctaggaccggtttgggctttgtacaggttatttaatagctttgttaaagataattataataattataacattaataaaaatgttgcttttgtcttcagctccatgcagagctacagcatgatatgtctctgtaaagtgatcagcagttgcagcgtgaaaataaatactttaactcaggggtcactacaggaagaccccgttgagccggtctcatttgatcttttcttcttctgggtggctgtactaagcggtcgggtttccccgggaatttgatggttcctatagtctgcctg

SEQ ID NO: 354011 - DNA, 308 bp, Homo Sapiens
catcatcatcatcatcatgctaatactaatcactatagggtgtgttattgggcatctgtaccatcctgttgtctgctgtatgcgttctattgatgggacatcttcctggactcttgacagccaccgctttcacaccctggtctggaataaggaaacatccgagggagaagttcactgtcttgataattagcctgaccagcaggatgaatgcaacactgacagtgatggactctgtgacatggtcacgttgagctgaaaccacagtttctctgtgctgtgttttctaacacatttttctgtttttaacc

SEQ ID NO: 354012 - DNA, 193 bp, Homo Sapiens
tgcctctggagtttaaagtttccttatggagataagttttgtgattcctgtaatagatgtgtatgttttctatttgagagttaaaacatttgagagttaaaacatttagttttaatacaacctatgtatatatacttctgtgttaatttttgctttgtcattaataaaatttaaaaatattcactaaaaaaaa

SEQ ID NO: 354013 - DNA, 1204 bp, Homo Sapiens
  misc_feature (446)..(447): n is a, c, g, or t
  misc_feature (449)..(449): n is a, c, g, or t
aaatacactctattttattttgtcttaaaatagtttaacctttatgctacagacttatttcaaaaaacagaaaatcttatcttgcaccaaaaaatatatatataacactctgttttattattttttctccaaagaccattaaatactaaagggaaacaaaaacgaaataatgaatgtaaagaaccaaattttgttttaaaaactagagttgcacatttgaaaacattaattctaagcaatgatttgtcatcactgcatcaagtccacgctcacactccagcaacagcaggatccattaactgccaagtgcattggttcctagccatacaatggctaaacatttcattttcacggtaagaggagcaaaaggcttcaatgggcctctggtactctttaagaaacaaaacaacaacaaaaatatttcctagttatccagtgattttttnntnaagatcactaccttttaaaatttgttaagagaataagaagtaagtagtgttttaaataaaatgaaaaaatacaacagcatcagactaaaatacgtgattattttaaacaaacagtgcacaatctgaggaagtttggttagggcacaatcatttttatatctacatggaagtcacatcatacacatattggagaacagggattggggagcttgctttgccttaaaaaagtttaaaactaaaagacaaaatagtgtccccagctttttcaaaaacctttgtgacagtataaaaagcaggtaacaaacttagttttaagttagttatggtgctaatctgctaaaagtaaagatgaacaaatgactacattagtaaaccagacaattcatattcataattgataataaaagcaaagtctatgggatgtttgattgccaagaataaactgaatgaaataaattgaataaaaaaagaatgcattattcattcagtctggcccctaccatcaaaatgaaaagacaattactggagagcagcaattacaggttacatggcagtcatgatgatgcaacagctaggtcactgctctgtttttcacaaattggagggggtggaaacttaaccaagtcagtggcataaaccaatctgtgacccacatgtaccattttagcagagagattactctgaagacaatgtcctgtgaagcataaagaactacttatgctaccaaatgtaaaactttgattaagaaaaacccc

SEQ ID NO: 354014 - DNA, 1686 bp, Homo Sapiens
  misc_feature (37)..(37): n is a, c, g, or t
  misc_feature (115)..(182): n is a, c, g, or t
gggtggcggagcggggaggataacaaccaaaccaaangaaacgaggcctgggtggtgtattccggcagagggcgcactccgccgccatggagcagcgccgcgtcaccgacttctnnnnnnnnnnnnnnnnnnnnnnnnnnnnnnnnnnnnnnnnnnnnnnnnnnnnnnnnnnnnnnnnnnnngccaggcccgcactccgcgccccggcctccgctaccagtggcagccgcaagcgcgcccgcccgcccgccgcccccggacgcgaccaggccaggccaccggcccgcaggagactgcggctgtcggtggacgaggtttccagccccagtacccccgaggccccagacatcccagcctgcccttctccgggccagaagataaagaaatccaccccggcagcaggtcagccgccccacctgacatccgcgcaggaccaggacaccatctctgagcttgcgtcatgcctgcaacgggcccgggagctgggggcaagagtccgggcgctgaaggccagtgcccaggatgctggggagtcctgcaccccagaggccgagggccgccctgaggagccatgtggcgagaaggcgcccgcctaccagcgcttccatgccctggcccagcccggcctgccgggactcgtgctgccctacaagtaccaggtgctggcggagatgttccgcagcatggacaccatcgtgggcatgctccacaaccgctccgagacgcccacctttgccaaggtccagcggggcgtccaggacatgatgcgtaggcgttttgaggagcgcaatgttggccagatcaaaaccgtgtacccggcctcctaccgcttccgccaggagcgcagtgtccccaccttcaaggatggcaccaggaggtcagattaccagctcaccatcgagccactgctggagcaggaggctgacggagcagccccccagctcacggcctcgcgcctcctgcagcgacggcagatcttcagccagaagctggtggagcacgtcaaggagcaccacaaggccttcctggcctccctgagccccgccatggtggtgccggaggaccagctgacccgctggcacccgcgcttcaacgtggatgaagtacccgacatcgagccggccgcgctgccccagccacccgccacggagaagctcaccactgctcaggaggtgctggcccgggcccgcaacctgatttcacccaggatggagaaggccttgagtcaattggccctgcgctctgctgcgcccagcagccccgggtctcccaggccagcactgccggctaccccaccagacaccccgcctgcagcctctcccagtgctctgaagggggtgtcccaggatctgctggagcggatccgagccaaggaggcacagaagcagctggcacagatgacgcggtgcccggaacaggagcagcggctgcagcgcttaaaacggctgcctgagctggcccgcgtgctgcggagcgtctttgtgtcccgacgcaagcctgcgctcagcatggaggtggcctgtgccaaggatggtggggcacctgttgtactatcatgagcccctgggggaaatggagaaggcacctggctggctcccttctccaagctgcttggccgggatttggtttacaaccttccaccgggatttcggaaaccggaccaccttagctttcaaggcgtggaat

SEQ ID NO: 354015 - DNA, 1180 bp, Homo Sapiens
  misc_feature (66)..(149): n is a, c, g, or t
agatacacttctaagtaatctatatgtcaagtaagacaaaatgaaattagaaaatatttttaagtnnnnnnnnnnnnnnnnnnnnnnnnnnnnnnnnnnnnnnnnnnnnnnnnnnnnnnnnnnnnnnnnnnnnnnnnnnnnnnnnnnnnttatggtagaaaagaaggaagtctgtacattatgtagctatgcacccatctaaagaagttaggaaaatgacatcaagtagaacatcaaaagaaagaaggaaaggataacttaaaacagaaatgaatgaaataaaaccagaatagaagagacgatctacaaatccaaaagttggtttgttgaaaatactagtagagctgacatacttgtggtgagactgatggaaataatgcagttacaactaaccaatatcataattggaaaggaaatcactataggtgctgtaaaaattaaaaagataatagaatattatgaacaatttttctgccaatattattgaaaggttagataaaatggaaaattcatttaaaaatataatttgacagtattatgttatgtgaatactataatgataatcctgtaatcattaaatgaaccagtagtttaaaatttttccatatagggaaggtcagggccagatgtgttcaatggttggttctactagacattcaaaaaaaataataattcaagtctacacaaactctcctgagattagaaaaaataaagaagagtccccccacctgtttcttactttatgagaccacacctaaaagatagaagactgctttgcaaccaagaaatccttcatgaacacctctttaatcacaagtcctcaactccaaggttagctttatttcaacttttataatacttttcttacttttcttgatagctttaccacccatgtattcattcctaaaaaaatacacagttttgtctgattttgaattttatgtgaatggaattgtacatatctgtgtttgtgtcttccttgttttactcaatactgtttctgagatcaatcatattatttgttaatattttgtttaggatttttgcatctctatttcagtgtgtgtttggaatgtaaatttccattctcagactatcttttggcctgaatttggttacatgagtatatgttctaaaaatattacttacactttcaataaattttaaggacttttaaaaa

SEQ ID NO: 354016 - DNA, 749 bp, Homo Sapiens
tcggtacccgactgcatccaacgccgcggcaggcgacggtggggaagatggcgtaccagagcttgcggctggagtacctgcagatccacaccggtcagccgcgcctacaccactgcctgcgtcctcaccaccgccgccgtgttggaattgatcacaccttttcagttgtacttcaatcctgaattaatctttaaacactttcaaatatggagattaatcaccaacttcttattttttgggccagttggattcaattttttatttaacatgatttttctatatcgttactgtcgaatgctagaagaaggctctttccgaggtcggacagcagactttgtatttatgttcctttttggtggattcttaatgaccgtatccttcaacaaacaacacggggaaaatgttgaagaacaccctggcctcttcctaaagcttgtcatctgtctcccacagttctctagatcttaacttcagggcactatcatttattttacagcacattttctgtgacaaggttccaaacctagcagtccggacaggatgagcaaagtcaaaggaactttttaaccccaggcccttaacataatgcctcggtctatgtgggggaacccaaaggaaaccccctatggtcccccatggaacttccttcgggccttcttcaacttcccaaggccccctttttctggcccctggggtggccccttggggaattttcctttggctggttggggggaaacctcaatcctttg

SEQ ID NO: 354017 - DNA, 1330 bp, Homo Sapiens
  misc_feature (42)..(42): n is a, c, g, or t
  misc_feature (60)..(99): n is a, c, g, or t
  misc_feature (102)..(137): n is a, c, g, or t
  misc_feature (184)..(194): n is a, c, g, or t
aaaaaaacaaccgcgggacgctgtgcaactgtaagactcacntatggcactgcgttaagnnnnnnnnnnnnnnnnnnnnnnnnnnnnnnnnnnnnnnnncgnnnnnnnnnnnnnnnnnnnnnnnnnnnnnnnnnnnnagtcgacggtaccggacatatgcccgggaattcggccattacggccnnnnnnnnnnntgggcaggcgacggtggggaagatggcgtaccagagcttgcggctggagtacctgcagatcccaccggtcagccgcgcctacaccactgcctgcgtcctcaccaccgccgccgtgcagttggaattgatcacaccttttcagttgtacttcaatcctgaattaatctttaaacactttcaaatatggagattaatcaccaacttcttattttttgggccagttggattcaattttttatttaacatgatttttctatatcgttactgtcgaatgctagaagaaggctctttccgaggtcggacagcagactttgtatttatgttcctttttggtggattcttaatgaccctttttggtctgtttgtgagcttagttttcttgggccaggcctttacaataatgctcgtctatgtgtggagccgaaggaacccctatgtccgcatgaacttcttcggccttctcaacttccaggccccctttctgccctgggtgctcatgggattttccttgttgttggggaactcaatcattgtggaccttttgggtattgcagttggacacatatattttttcttggaagatgtatttcccaatcaacctggtggaataagaattctgaaaacaccatctattttgaaagctatttttgatacaccagatgaggatccaaattacaatccactacctgaggaacggccaggaggcttcgcctggggtgagggccagcgggcttggaggttaaagcagcagtgccaataatgagacccagctgggaaggactcggtgatacccactgggatcttttatcctttgttgcaaaagtgtggacacttttgacagcttggcagattttaactccagaagcactttatgaaatggtacactgactaatccagaagacatttccaacagtttgccagtggttcctcactacactggtactgaaagtgtaatttcttagagccaaaaaactggagaaacaaatatcctgccacctctaacaagtacatgagtacttgatttttatggtataaagcagagccttttcttcctcttcttgatagatgaggccatggtgtaaatggaagtttcagagaggacaaaataaaacggaattccatttttctctcactgt

SEQ ID NO: 354018 - DNA, 477 bp, Homo Sapiens
  misc_feature (38)..(38): n is a, c, g, or t
  misc_feature (104)..(104): n is a, c, g, or t
gtaggccccctctccttgcccggtgaacacccttagcnaactcaaggtcttttactctagccagatggatgcctcatcctagaagactctggaggagctgaaantctgtctgcccacccactaagggccttcaagctaataaagatagaaaacaaggcaggaatttttgtctgttttattcacagtgtatctcaaacacatgaagcagtccctcttcgtattaggcactcagaaatacttgctgaaggtacagttatcaaactgaaatctgagcatttttccttttgatgttccaagttatcttttgggtgattattataaataggtaaaatattgctataagttccctattcacgggtattttataaatttttaaaacttgttcttaatcttcagaagtgtacagaactgttcttcagatctttgtcaaccaaaacatgtattttcaataaattgagattcccagttcaaaaaaaa

SEQ ID NO: 354019 - DNA, 1070 bp, Homo Sapiens
gcttgctcccatacatggatgattttaatgagcataatcggcggttctataactatagttactctctcggcggtgggggagacaattcaacatatatagtggtgcagtgttcccagttttaaggctgtgccctgtgattaggtaattcaagattagaagatggaaaattcagacctcatgcaataatttgggaaagagtcccataacgggcaattttcaatgtcatggaagcagcattatcttccaaaggaatcgatcgtttgttgtttgcttcaaaaaaacagatggctttggcgttccttcccttcgccatccgccatatttcttcagcctttcttctcgatcacccgtgtattctttgaccagtaaatgaccacacctcaatgatggtaaaacagcatcatcagtaagctatcttatatgcctcatcctgtgagtttgagcttcaggaaacatgagtaaaagtatatgtaatgtatatagtcgtatatgtattctagcaagaaaaacatatttattttgacaaaggggaacactgactttctgaaggattcagaaagaaccttagtgaaaggttctcagtctctgagagtggaccctaattaacataaagaccattcatcagcgaataactactgagcaactctagtgtgccagcacaggccagacatactagtgagccaggcacatctggccttgggaaactcatcctacaggggaaggccagtttttttcccttcaattcctcaagtctgggtggtgacaaggtaggggctaggtactggactaccacaggtttttaggaactaaggtgtttctcataaacacaaaatgttgggtgaaactgggaacaactactcagaagctaatttatttgcttaaatggaaagtgtgggagccactaccctctcttttgatctgccaaggatttcctctcagagctgttgcacagacagagattgtacttggtaagataccaaacaagacagatatggatctaaatttctaatgtgttctatgggtttcaattctgaaaaaagaaaatgaataaagattttaataaatattga

SEQ ID NO: 354020 - DNA, 1322 bp, Homo Sapiens
  misc_feature (941)..(977): n is a, c, g, or t
cgacggcagttaatcccgggtgtaaaggtagcgaggcctgggtggcgaattcggcacgagggaacgatttttcccccagaagccactgaataattcttttggtgtatttttgccttcctgttggctgtctggccttggagcaggtcgggagagtagagtacataatcagtgccacacagaggcagggcgtgtctgagagactaatgcctgtcctgcctctggcctgtgtcctgggtgtgtaccatacctgctgggccagtcccacacatttccaccctgcccctggagcagcagctttgataccatgggtgtcccttgagtctgagctagagtgtgtccccgataaactgtgagacctccctgttcttggtgaccccagttgggctttggcccctccagcaaccttgtgtcccagccctgcccttcttcccaccccctcaatctgctagtccctgaagcctttaaccaaacgggagtgggcacagaaagccttctcctggcaacaggacaagggctgcccgcgtgtccagccctgttgctctcctggcgctgagaggtgggtccaagcagagttgatcagtcccctgcctgccctgcctaggtctagccaggggaggttgtgtgtgtgggagaagaccccgggatctgctggggtgggatggaggttattaaagatctaagtgaggaggggctggggtttggatgcggggtgaggcccgagcgctcacacttcgtgtagggcgggcaggggcctgacctcttgcagggcagtggccttggtgccctacccctgccctgcgcagtatttattgctaaattattgtccaggaggggcagcactgggcctggccccccgggtatttattgctgtacatagtgtatgtttgtgatatataaggttttctttattttgtatatgatcaataaaccttttaaagagnnnnnnnnnnnnnnnnnnnnnnnnnnnnnnnnnnnnnctaaaaagttttccctcgagggggccaaagttataggcgttacccagagtttcttgtgttccaaagaggggtccccataataaggaggagtcgctatattaaaaagcgtaggcaacgggaccgatgctgtctaaaaaagttgccgaagacatggggaacaactgtgcataagcatgggggaatctatggcgtgcagagggcaaccgctttaaacatctctgtagggggtgtggtgcaccaaaatatatgtgggcgaccaaaacaaataagcctataacgagaaggcattttaaagaaggcccttctcaaaagaggagtaaaaatattatctaaagaagaatcttt

SEQ ID NO: 354021 - DNA, 1267 bp, Homo Sapiens
gtctgatcttgtctaagtagaatccaggcgttagttggaatcatatcataagtatccatgaagaaaacgtcatgatctgcctcggagtggggagaaacaggccctccttgtccttgtgcagcccccacttttgtcctggctgtgggtggccatccattttgagcacctctgccaggctgcagacctggaggcgaagggagtgtggaagaggagggtgtaagggtcgacgcgtgctgaatgggaggtgcaggtcctcggtgcgttggcagaagaggcttctggagtttcgaggccatacctcctttcaagagctttggatttggggcgacttccctgggtctaggggagtgttcctgtcccctgtcaggtcagccctgcggagccactccacccctcttccccttcccctggatttcctgacatagatggtgtgttcatgtgcaggtgtgagtgtgctgtccttctgatctctgttgatcccgctttcctactgagagggtggtggagaagggtggtggtctcttctcacctcagtttttctgacacagcgaatcgagggctttggccaaggccagggtctctcaaacttgtccgccaagtaaaccatgatatatgtcttcccttccaccttaactttgccccaactcctcttttatcctaacatggacgctcagatttcagaggaatacccagcagggacaggtcagctctcaccaggagagtgaggcccctggctgctgctcgggggtggcactggtgttgctggctcagctcttggtgcatgtttcagatatgtgtgtacacttctgactggtgatcagggcccggcccacggccctgagcggctgcagcctgctttgggacgatggtcaggtcccatgttgtccctgctgcctccctctggagtggccacttggccaaagcgcccatccacatctggaaagtcggagccgcagcctgctgcaccgtttccgctctgggatcttgtgagttacttttttaggctgtggtttggtgaaaggaaccaacacattaacgatttctcccccagaagccactgaataattctttttggtgtatttttgccttcctgttggctgtctggccttggagcaggtcgggagagtagagtacataatcagtgccacacagaggcagggcgtgtctgagagactaatgcctgtcctgcctctggcctgtgtcctgggtgtgtaccatacctgctgggccagtcccacacatttccaccccaccccgtctggtggag

SEQ ID NO: 354022 - DNA, 513 bp, Homo Sapiens
gacaagtcctgtgtctacctgcgtcacttgaaaatggaaatattggctgttgactcttgtcatttagtgacttcatccccctcccctcagtctgatcttgtctaagtagaatccaggcgttagttggaatcatatcataagtatccatgaagaaaacgtcatgatctgcctcggagtggggagaaacaggccctccttgtccttgtgcagcccccacttttgtcctggctgtgggtggccatccattttgagcacctctgccaggctgcagacctgggaggcgaagggagtgtggaagaggagggtgtaagggtcgacgcgtgctgaatgggaggtgcaggtcctcggtgcgttggcagaagaggcttctgggagtttcgaagccatacctccttttcaagagctttgggatttggggggcgacttccctggggttttagggggagtgtttcctgttcccctgttcaggttcaagccctgcggaccaattccacccttttttcccctttccct

SEQ ID NO: 354023 - DNA, 465 bp, Homo Sapiens
  misc_feature (11)..(11): n is a, c, g, or t
  misc_feature (68)..(68): n is a, c, g, or t
  misc_feature (242)..(242): n is a, c, g, or t
aaaaaagcctncccctccttgtccaaacccttgttgctaccccctggcgcctaaaaaggtgggtcccnaaacaaaagttgaatcaatcccctgccctgcccctcccctaggtcctaaccccagggaggttgtgtgtgtgggaagaaaaccccgggatctgcctggggtgggatggaggttattaaagatcctaagtgaggaggggctggggtttggatgcggggtgaaggcccgagcgcctncaacttcgtgtagggcgggcaggggcctgaacctcttgcagggcagtggccttggtgccctacccctgccctgcgcagtatttattgctaaattattgtccaggaggggcagcaactggcctggccccccgggtatttattgctgtacatagtgtatgtttgtgatatataaggttttctttattttgtatatgatcaataaaccttttaaagagaaaaaaaa

SEQ ID NO: 354024 - DNA, 223 bp, Homo Sapiens
gaaaaattaatacatatacatggtaagacattccacaatacaaaagggtatacaataaatggtaagcttccccatggaggtcagcctctagtcccctctccagagttaatcactgttatctatatgttgtgtatcctttcatagcaattctatgcatttacaagtttataaatatgtatatttatatatctatttttaatacaaatagtagaattctagacgc

SEQ ID NO: 354025 - DNA, 522 bp, Homo Sapiens
  misc_feature (136)..(179): n is a, c, g, or t
ctccattcaccatcttgcccagcagttctctctacatttaaccacaacgacgacaggtagtactgacaaatgcagagagttcccttggttaagtttgaggtactaggaaacaggtgactgttttatgcaaagcagnnnnnnnnnnnnnnnnnnnnnnnnnnnnnnnnnnnnnnnnnnnncccaaagcggctgcagttaggtcttgaaaaagcttaaggtattaaaactagaaaaacgcaccaaaagttgtgcgtcaaaaagttgctccccaatgagaagtcttctaccgtcatggagcttctgtttccacatactgtccaagaccaccacagggtgcaccgtaccattgggaggtgcttccatattccgcaacaaatgaaacttccatgatgaagatccggaagaaaagatgtagtgatggaaaaggagccacatattccacaccatttaaataactttaatttacatactcactcacacaggtaccagtgctttgaaaacagattcttcagtcctaaaaag

SEQ ID NO: 354026 - DNA, 881 bp, Homo Sapiens
  misc_feature (412)..(428): n is a, c, g, or t
gccacttctcaacgaaaaggtgataatgtgcctcaggttaatggtgaaaatacagagagacatgctcagccaccacctataccagtacagaatgatcctgaactttatgaaaaactgacatcttcaaatgaaataaacaaggagaagagtgacacagttgctgatatagaaagtgaaccagtggtagaaagcacagaaactgaggggacataatcatcactcagtaggtaaaagataccttttgtaaagttgtcatctctctgtaatagataatggctgactggaccatagttgttcacttttgtctgccagaattaagttaatctgatgttcatgttcacctttctcttaaaataattgtacaactgacttgtatagacattgttcttaatatgaacatggtaggtaaacnnnnnnnnnnnnnnnnnctgataaaatacaaatgttggccccagattcttttaacgtcaaggaaatgaataacagcttgtcagagacttcctatggaagaaagaattttttagatactatcattaggttggatatggtaatagatatatttcagaatagcaagtggtggtatatccttatccatatctttaggctgctgcacaattttaaggctatagataaagctgtggatattttatgcaaagactggctctaggtatttgaggagcacaatacagagattttaaaaagtgattttgtaaaatctacactatggtctctgtttctccaaagtaagtgtttgtgatttgttcctcatactgcagtgagtaaaaaagaaacaagaaaacaacaacataaatattaaagtacgtttcaatgttgggtgaattttgtttttagatgccaataaaacttatttgtttgataac

SEQ ID NO: 354027 - DNA, 749 bp, Homo Sapiens
ggggggaactgcaattggtggctttgaaggcgcggcgagcgggaacagctcttgaggagtgagactgcaggagatgtgggccgtgccaaagagatggatgagactgttgctgagttcatcaagaggaccatcttgaaaatccccatgaatgaactgacaacaatcctgaaggcctgggattttttgtctgaaaatcaactgcagactgtaaatttccgacagagaaaggaatctgtagttcagcacttgatccatctgtgtgaggaaaagcgtgcaagtatcagtgatgctgccctgttagacatcatttatatgcaatttcatcagcaccagaaagtttgggatgtttttcagatgagtaaaggaccaggtgaagatgttgacctttttgatatgaaacaatttaaaaattcgttcaagaaaattcttcagagagcattaaaaaatgtgacagtcagcttcagagaaactgaggagaatgcagtctggattcgaattgcctggggaacacagtacacaaagccaaaccagtacaaacctacctacgtggtgtactactcccagactccgtacgccttcacgtcctcctccatgctgagggcgcaatacaccgcttctgggtcagggagttcagaagctactggaaaaatctacccccgacaagaggagatcattcttagatattaccccgaatgagaaagcttgcaattagtgaacatgaaaaggaaaataaaaattcctcaccagtc

SEQ ID NO: 354028 - DNA, 781 bp, Homo Sapiens
  misc_feature (671)..(679): n is a, c, g, or t
ttttgcaaaacaatcagaaaacatttattatactgaaatgtgtacatcctactattaaaaaaacaaagtaacaaatttgctggtgccaaaatttatttagcctgtttcactgggacaaactcacgttcaatgccactcagtataatttcaagtctgataagcatctaagtatttttaccccgcttctaaaacctgatgaggaattcaaaataagcacacagcattaaatgacatttattgttccataaatcttgagacccaaaaaggaatgctaaatagacaagcaaaacttttaaaacaaacgagataaactcacttctttccccagtgactggtacagaaaacatgtggtcacacgaaagcaaagggaaaaagtcagaaaggaaaactctctgcctataggatctataggagttacagatattttcaaatcgatgatgaaaatagatcgtgcttctttgtagcaaataattaaccccctttatgaataaaacataaaatgtcaaagcttttactcactgaagtagtttgtcttctgggagagatttcaaactcaaaattactcatttcctattttttgcctgaacacaatgaggatcaaagtacattcaaatcaggacacctgggtatatggacaaagatatcctacaattaaaatggaatagaagttnnnnnnnnnttcagtcccctacaccacaggcctcaaacatgcttgctgatggattctgggaaggttttggatgaaggacggagatatgggaggaaagtgagaaaacagtcc

SEQ ID NO: 354029 - DNA, 341 bp, Homo Sapiens
  misc_feature (103)..(103): n is a, c, g, or t
  misc_feature (323)..(323): n is a, c, g, or t
gaaattaataacatttttatttgacccaatatatgcaaaacattatattccaacatgtaatcagtattaaaaagtattgagataatttttacatcagtttttncgtactaagtcccgtattttacaatatagcacatctcaattcgctatatttcgagggttatcaactagctacgttgcaagagctgagtcaactcaggaggccagcggcaaccataaggggcaatgcatttagagttcacttattaaatgctgacgttaacagaacccacagagccgcatttcccttggtttcggaggacacggcgaaaaataacaacagncaaagggttctcgagaat

SEQ ID NO: 354030 - DNA, 355 bp, Homo Sapiens
caaactgctctatgaaaagaaaggttaaactatgtgagttgaacgcacacatcacaaagaattttctgagaatgattctgtctggtttttatttgaagatatttccctttctactgttggcatcaaatggctagaaatctccacttgcaaattccgcaaaaagagtgtttcaaatctgctctgtctaaagggacgttccactctgtgagttgaatgcacacaacacaaagaatttactgagaattcttccgtctagcattcaatgaagaaatcccgtttccaacgaaggcctcaaacaggtccatatatccacttgcagactttacacacagtgtgtttccaaactcctctatga

SEQ ID NO: 354031 - DNA, 129 bp, Homo Sapiens
actgccaacagaactgcaatgcaagaaataaaatcagaaagaaagagtattatttgaaaatttgggtctacactaaagaatgaagagtatcagcaatggttgatatgtgggtaaatatacaactcttgt

SEQ ID NO: 354032 - DNA, 605 bp, Homo Sapiens
  misc_feature (351)..(351): n is a, c, g, or t
tgatagagctaaatgctgcaatgctttaatacattatgccaaggtatatttttaccaggtaaagaaagcttctcatgttctattgactgagaataatcaaacccttcataatctagaacttagagattgtatcttttgagaacaacatcagagaaagactgtctttgccatccacacagcagaaaaacgttgggaccttgggccttgggttcataatatcacaactcagaagggtcccttgagactcttggaactgtacaccccatcagagatcttaaagtaaagctaaactagagatgcttctccccacaagcaaatgacaaccttaaagtggacgctttgtcccagtancacagatcaagacttctctgctattatgagactctgatctctctatttttccttgcttatgcctctatgaataagagaactgaaaaggatctctcttgtacatttgtagggtatatttgtatttgtggaggattttggccaatctaatatatggacaattttatgccttgaaaaatggaagatgaagggccaatgtgagctaggaattttaatggtatctttgttgcttcataatcagtcagaaacagaacatt

SEQ ID NO: 354033 - DNA, 1095 bp, Homo Sapiens
  misc_feature (954)..(993): n is a, c, g, or t
gctgcatatcctttttatgggattgcgtgtgaatttgaaccatgagacaccactaaaaacacacttatcatccatgcttggtatatctcacaacaaattattaggaatgtctcatggttcaaatttgttgtgagatataccaagcatggatgataagtgtgtttttagtggtgtgttgtttttttaaagaggtgattcaagtaccgttgctaagctgtcaacataccaagctgttgaaaaaattgaccatttctttcagaagtaattctcagcctgtggaataatagcaggtgaagacttcatagaaggcgacagattgatagggaggctattgaagcagtttttctgaagcctgcattttgagttagtttatagtgctaatagattctatataactgtgagagtttggtagtaaaccagtagggattgttttctctcctaaaaatttgcacactacttcattgtctaccaactttttacatattggaaaatagaaattgcaaatacatacatgtatggaaacatattcagattgggaaaaacaatggacattagtttttaaaaagttacgtggaagcaagatttctatatttgtttttttaaaggaagcagtcattctttctactaaatccatttcaagctagttctctgaaaattttgccatttatctacagaaatttgattataaatatgttcctttttcaaagaaactttattctagaacaaaatagtctatatggtacttgatctacatttaagtggaaaaattaccagtatttgaaagctcagtttatgtcattgtcttaacttcagatacaaataactgaacagaaagttttaacctttaatatctcatgttctgttttttattcacaattttccttttatgttaattcaattatatacttctgaatggcaccttactttttggaaacaaatcttctgttatttacnnnnnnnnnnnnnnnnnnnnnnnnnnnnnnnnnnnnnnnngctgctctcgataatagtcaacatttgcatatatatggaatttcttactttttttctcccaaactctatttaataaacttattttaatgtttgtgtaaaaaa

SEQ ID NO: 354034 - DNA, 857 bp, Homo Sapiens
gtatgactgaccttaactgtactttttctagcaagagatgctttattctgcagcatgaacagatttaaaatggctggtgttaaatatcagctcctaataagatgtggactgaaaacactatcacaacactatgagaagcccctagcactggttaacgctttcctagccctagtctctggatttggggagcttgtcttcagtggctgagactgtgagctgggagcagttctctcagctggagagactcgggatggggtaacctggggaccagtctagcccctgcaccctcttccctgcctctgctccttgggagcgggtggagagacacccatgtggctccccttagggccagcaccaagcaccacgctctcatcctgcaagtcggcgcacacagtggatgaaggcaggagacccagaaagcagtgcagtgcagctctaataaaggccttatttttcttatgtaaatcatctttttacatttgtttgtaaacatgtttaaagaacgaacctagtgggacatttttagactttgatgctctagccattttggattgtgtaagttgcagatgtggcttttactttttaaatggcatattaacaagccagcaaagtgtgtcagaccatggcgtggtatttattgtgcagcagatccagagacagaggcagcctgtcttttcagttggtttctgcttttaatttacttgtacaattcattgttactgttctgtttttctattaatcttttgtcaacttcctgattatgtaacaaagtatgtacagtctacttttgaactatttttatcacagtattatttattgctttctttcaataaagtactgaagcattttccactgcc

SEQ ID NO: 354035 - DNA, 859 bp, Homo Sapiens
atttgcccacctccttctgatcattttattttcttggcctgctctggcaggcattcaacaaacatttgttgtgtgctgtgtgccagtcactttctaggcacgtgagacagcagtggataaaacaaagatccctgtcctcttggggttttacgttctgctaggttgacacccagaatagattataaacacagtaagcaaattgtaccttagaagttgatcagtgctcttcaaaaggcgaggaatagagcccgatctggggatctggaatgatggcagtgcaggtaggaatttttaaatcggaaaggcttcatggagatgactttgaagcaagcacctggaagaagtgagagaatgaggcacgtggatgtgggccagcagcattccaggcaaagggaaccacagcaaatgcaaaacccctgagggctggattgtgcccgcttcactcaaacagctagaaagagcgctagtatggtggcagtgagtcaggggaagaagaggaagagatgaggtcagagaagtgatgagcctgttctatgccaaggcgaggacttttatctttgtcaaatatttccactcccatcatggcccggggaaatctcactaatgtaaaccttactgaaaatcctaactgctgtgatcaaggctgccataaagggaagcccggaagaggcggggaggctgccttggaacagggtagtgtaaggatgtgccagaaggcctgctggaggttgcagccctttgagctggacttggggatagtgtggttttccaggcagaaggaagtgaaggattaggtcggcctggtagtacttggcacacaacatgcgcccaataaataaaatggaaataaaaccaaaaa

SEQ ID NO: 354036 - DNA, 265 bp, Homo Sapiens
  misc_feature (193)..(203): n is a, c, g, or t
ttgcatacttgcacatcaaaccgatgtacatagtttaacacgtggtccttttgtgaaacctagaacccagaggattgctttttttctttcagcctattttgagttaacttcagtgctttcttagggaaatgacagggcaaagcaatttttctgttggctttgggctgtatttgtgcactaaatctttattctnnnnnnnnnnntggaaactttaatttttttaaaacgagaatttcatttacagctacattaaaatcttaatgag

SEQ ID NO: 354037 - DNA, 1034 bp, Homo Sapiens
  misc_feature (38)..(38): n is a, c, g, or t
  misc_feature (52)..(52): n is a, c, g, or t
  misc_feature (87)..(87): n is a, c, g, or t
  misc_feature (136)..(154): n is a, c, g, or t
  misc_feature (162)..(163): n is a, c, g, or t
  misc_feature (451)..(511): n is a, c, g, or t
  misc_feature (515)..(515): n is a, c, g, or t
  misc_feature (820)..(820): n is a, c, g, or t
  misc_feature (987)..(987): n is a, c, g, or t
  misc_feature (1005)..(1005): n is a, c, g, or t
  misc_feature (1009)..(1009): n is a, c, g, or t
  misc_feature (1025)..(1025): n is a, c, g, or t
  misc_feature (1028)..(1028): n is a, c, g, or t
  misc_feature (1033)..(1033): n is a, c, g, or t
tatagtaatcacattagaagtcacaatatacaaactgntagaatcaaaaatnacaaaaaatacaaacttaggtatacgaatgaaatnataaaaacattatttaaaaacaaaaaactacatctacaacaataaaacnnnnnnnnnnnnnnnnnnnagagaaanngacaaagacggcatatcacaatcatcacatttcaacaaacccgccctgcccagtctggctgcctcaccattgagatactggaccacttgggtgtgaccactatggcaatacaagcatttcattatgggactggctactttgtataaaactatatgtgaaacataaaatttctttctttcaaaatgaaacgtccaagtgaaacagatagagctaacatataccaaattttagctggctgttagtagaaaatttcaacaattctgtaagttcaaaaaggaaacatatttnnnnnnnnnnnnnnnnnnnnnnnnnnnnnnnnnnnnnnnnnnnnnnnnnnnnnnnnnnnnntgtnaatcatgaagtgtgagtgtacacaacggaaagtcatacccaggcttctccacccataacttagacagctacagggactggttacgagcaatagaaagatgtcaaacatgatttttaaaaataactactaccagttttgaaaagatccctggcgaaagaaaccccaaaatcaacttaataaataactgtacaccaaagggaaagggttgtgttttctttgatggtgtattctctatggcaagagagttttaatattttatcaactgctaagaagataagcataacctctttcctttaaaacatatnaccctcaagtgtcttctgtccagaatccatagaagaaatttttgtcagagaatccagcccttgtgaccagacccctgttagaagagggaatgcttcctaaattccggaagtcgctgcaaggattcagtttaaactttcatgatattctaatcttaccatctcaaagntagttctgtatcaggggntctnaaacaatgtatatctngcnaggana

SEQ ID NO: 354038 - DNA, 186 bp, Homo Sapiens
ccttttttggcccaatgttgaagatgtagaactttgtttttaaataatgtttttataatttcattcgtatacctaagtttgtattttttgtgactttggacttcaacagtttgtatattgggacttctaatgtgattactgtactaaataaattccactaataaacatcttacattaacaccttac

SEQ ID NO: 354039 - DNA, 2448 bp, Homo Sapiens
atcaggccaaatcggccgagctcgaattcgtcgagagcgggtgtccgggtcagctgctgccgccgacgccgtaccgctgcggccgggggattgggccggggtctccaccgccgaccgaggggagcgggctccgctcggccctgctttttgcgacctggccgtcagccccacgtcgccggcctggaggggcgaagaggacgagggggccaaggcttcctccggggacattggctccctggattatcaagagtttgtagttgacattgaatccaggctgaggatggaaggtgtggaacttaaagaagaatggcaagatgaagattttccgatacctttaccagaagatgatagtattgaagcagatatactagctataactggaccagaggaccagcctggctcactagaagttaatggaaataaagtgagaaagaaactaatggctccagacattagcctgacactggatcctagtgatggctctgtattgtcagatgatttggatgaaagtggggagattgacttagatggcttagacacaccgtcagagaatagtaatgagtttgagtgggaagatgatcttccaaaacccaagactactgaagtaattaggaaaggctcaattactgaatacacagcagcagaggaaaaagaagatggacgacgctggcgtatgttcaggattggagaacaggaccacagggttgatatgaaggcaattgaaccctataaaaaagttatcagccatgggggatattatggggatggattaaatgccattgttgtgtttgctgtctgtttcatgcctgaaagtagtcagcctaactatagatacctgatggacaatctttttaaatatgttattggcactttggagctactagtagcagaaaactacatgatagtttatttaaatggtgcaacaactcgaagaaaaatgcccagtctgggatggctcaggaaatgttatcagcaaattgatagaaggttacggaaaaatctaaaatccctaatcattgtacatccttcttggtttatcagaacacttctggctgttacaagaccatttattagctcgaaattcagccaaaaaattagatacgtgtttaatttggcagaactagcagaacttgtccccatggaatacgttggcataccagaatgcataaaacaagttgatcaagaacttaatggaaaacaagatgaaccgaaaaatgaacagtaagtttggcatctagtccaaacaagactgaagaatgtgctgatggagcagtgctgtttctgcattcataatgcatttattggcccatatttttatgtaacctgttacaaaatagacttgactttttcataatggacttttgtattatacaagggactgttcactgctgtactggtttgcaaatttcttgaatttagctctttaatagctaactgtattattatcgttttatattttatattgctaaatagagaaccacactttatataaagtagtttttgcatttgtttattgaatgatgcatcttcttcggtgaaatatttatatgcataaatggcaaaggaaagaaataatatatatttttatgtcattgagcaatattttttaatgtgtacctgtcttatggaagaaatatgcaggtatataagaccacgattttctaaagtgcatattagaatttttgtttttgtaaatggttaaatacatttcctgggtaacttaggaaattaagtttttcataaggcaacagatggttaaactgattgtcatgaatacccaaagatcatgtatataatcgaagtgtattagtaccatcccaaggtgtttttctcatttaacatatttgtttcataattcagcaagtacagatgcaagcgcattgcacactttttcctttctaaacttaaagacaagtcaaaaagccattcttagaactagaggatttaagagggtaggaattagggtttgtatatatgtatatatgggacattttatcttctggcccaaagtcagaactttataaaaatcttgagtttgttcactaatgtgaaataagctatgtgtccagggtattgctcccctgagtgtatatgagtgctgagtagtattgcagagaatgtgatgagttattcactgtcacaactttttctatagaaaacaggggctgctttttaaactctcactatgggcactttaccaaaatacttccatatcaattatttgaactcggtagttgtttgacctagttagatgtggtgtttattcaagtttgtatgaaatcatgtttgacaatactgtaaattaggttaattttgtaagtcttagcatcatcatattgtgctgttttggataacacgtttgttacaagcatttaaactgtttcatttggtagtacctttacattgaaataaattgtgtttgtgcctccaaacaaaaagtttaaaaaa

SEQ ID NO: 354040 - DNA, 430 bp, Homo Sapiens
  misc_feature (21)..(21): n is a, c, g, or t
  misc_feature (71)..(71): n is a, c, g, or t
cgtcgaactacttcccttaanattccccacagactcccctggccgggacccagcccccacgaccgtcgccncgtcaccaagtctttagaatagctttagcgtcgtgaaccccgctgctttgtttatggttttgtttcacttttcttaatttgccccccacccccaccttgaaaggttttgttttgtactctcttaattttgtgccatgtggctacattagttgatgtttatcgagttcattggtcaatatttgacccattcttatttcaatttctccttttaaatatgtagatgagagaagaacctcatgattctaccaaaatttttatcaacagctgtttaaagtctttgtagcgtttaaaaaatatatatatatacataactgttatgtagttcggatagcttagttttaaaagactgattaaaaaac

SEQ ID NO: 354041 - DNA, 789 bp, Homo Sapiens
  misc_feature (455)..(468): n is a, c, g, or t
ggaacaaaagttgctttaaaagccattatgtaaaacaagacttgaaaatgagtgagggaattttagcgacactgtctgagcagcagtgggaaccatcttcgtttcccctttgaactcccagtgggatgccctaccctgcgcccttaggacccggactgaccgtgtacaaaactttacgtgccaaaattctcagtgaatttagctttctccctctttttgatgctgtaatttttgttcatcatgttttgctgtgatgttacataggtagatttgtatgtagttttaatgtcacctataacaaaatgtgtttggtagcagattgtccagaaagcattttaaatgaagaggtataaacccttaagggccaaaattctgtatattagattactcttaaacgaaaaaccagctgccgcttttatgtacacatattacatacgagtaggcagcagactttnnnnnnnnnnnnnncctaggcatgttgatgttgcaaaatgctgtataaagctgaaacctgttcattcagtgccattgtagttgacatgaagcgattgtaaaactgtctccgatttttctctggtttattaaaatgctaactataacattttttgtgaatactttgaatgtttcctaacagttgtgatgttactgttccgttttatgctcttattccaagttcatttttaatggtttggaagccatttttgtaatgaataaatgttcatgctgtacagtatctgtagcatgccgttctggattaataaaagcaacttagtatgtgcagataaaaaa

SEQ ID NO: 354042 - DNA, 1633 bp, Homo Sapiens
  misc_feature (9)..(10): n is a, c, g, or t
  misc_feature (27)..(27): n is a, c, g, or t
  misc_feature (214)..(214): n is a, c, g, or t
  misc_feature (229)..(229): n is a, c, g, or t
gaggaggcnngccggagcgacggcggnggctggggccggagccgagccggggtcgggcagcagcagggaccccccagaggcggggcctgtgggaccgctatgggcgtggagatcgaaaccatctcccccggagacgaaaggacattccccaagaagggccaaacgtgtgtggtgcactacacaggtaagtctcaccccctcagcccccaccaangtccttcccctcccnaaggcagggctgtcctctgagcttctctccagaggtgcctgcctctggatcagggctaaagcccaaggcagcagggtctccctgtgaccagccatcctctactcctcccagccagtctagtgggaatgataaaggaggcttggaaggccaactctttccctcttctaccagcaagggccatccatggtgccagcttctaggtgagtcaaacaccttcagtccccttccttctgttgcaggtatggtggagcccctgtccctgctgggtctgtctgatatttggaaatccctcctagagctccccgcagactttctctccatcctgcagtatcattagagaagaagaggaggggagaggacagacaagtcacccagaggctccgatgccatttgaggggtggggtgatggcagtgcttttctctgggtactgagggagcccagagcgggactgatcccagttggatgctctttatctgcaggcgaggtagagtgagttcttcaggactgctggcaggaagatcatgagcaggtgtttgttccaagggaggtgagcaccctgccttgtgacctgcttcctaaagtggcaaactcgatgacagccacttagcagacagcaagcccaggaatgctccaaaatgggaagaagtttgattcatccagagacagaaacaaacctttcaagttcagaattggcaaacaggaagtcatcaaaggttttgaagagggtgcagcccagctgggtcctctttctcctctccccatctgcccccatccctgctagatgagcttggggcagagggcgaagctgacctgcacccctgatgtggcatatggagccacgggccaccccggtgtcatccctcccaatgccaccctcatctttgacgtggagctgctcaacttagagtgaaggcaggaaggaactcaaggtggctggagatggctgctgctcaccctcctagcctgctctgccactgggacggctcctgcttttggggctcttgatcagtgtgctaacctcactgcctcatggcatcatccattctctctgcccaagttgctctgtatgtgttcgtcagtgttcatgcgaattcttgcttgaggaaacttcggttgcagattgaagcatttcaggttgtgcattttgtgtgatgcatgtagtagcctttcctgatgacagaacacagatctcttgttcgcacaatctacactgccttaccttcacttaaaccacacacacaaggtgctcagacatgaaatgtacatggcgtaccgtacacagagggacttgagccagttacctttgctgtcactttctctcttataaattctgttagctgctcacttaaacaatgtcctctttgagaaaatgtaaaataaaggctctgtgcttgacaaaaaaa

SEQ ID NO: 354043 - DNA, 1324 bp, Homo Sapiens
  misc_feature (29)..(29): n is a, c, g, or t
  misc_feature (93)..(93): n is a, c, g, or t
  misc_feature (99)..(99): n is a, c, g, or t
  misc_feature (108)..(108): n is a, c, g, or t
  misc_feature (192)..(192): n is a, c, g, or t
  misc_feature (197)..(197): n is a, c, g, or t
  misc_feature (199)..(199): n is a, c, g, or t
  misc_feature (202)..(202): n is a, c, g, or t
  misc_feature (271)..(271): n is a, c, g, or t
  misc_feature (279)..(279): n is a, c, g, or t
  misc_feature (329)..(329): n is a, c, g, or t
  misc_feature (385)..(385): n is a, c, g, or t
  misc_feature (424)..(424): n is a, c, g, or t
  misc_feature (478)..(478): n is a, c, g, or t
  misc_feature (505)..(505): n is a, c, g, or t
  misc_feature (549)..(549): n is a, c, g, or t
  misc_feature (575)..(575): n is a, c, g, or t
  misc_feature (606)..(606): n is a, c, g, or t
gcgaggaggctagccggagcgacggcggnggctggggccggagccgagccggggtcgggcagcagcagggaccccccaaaggcggggcctgtnggaccnctatgggcntggagatcgaaaccatctcccccggagacggtaccgggctccctccggagccaggggaggggaggggtcccggggcggagcggnatggngntgnggtctgattcggaggtggcgtggagggtgctgaagggtcggggggctgtgatggggaaggcaggcgganacgccggnacgggattcttgggggtctaggagaccatcctccgccatcctcttccgcnctcacctaggggaatgtaggcggcactcggaggcgggggtctgcagcccggaagcnggggtctgcagcccgccaccgccccgggcttctcctttngcggctgcagtcgttcggttatccgctgctgctgataccccaacctgggtttcngcttcactttccctgccctactcggcnagctctggaaaacaggaccttctctcggatacccgctgctcggngacctcctcctaacgcgtcccccgcngggcctcccctcggtcacttccctgcaggcngggctgtaagcgggtgtagggacagaccgcgaggctggggaaaggggaagcgctcccttgcccgcttccggatctcgctttatcctgccgccgctttcagactccctggccaccctgtccactcccatggcctccacattgaagcttctaagcccagccctgcgacctacgggccgaacctctccctggacgtcccagggtgctccctgggtcagcaagtccaaaacagaactctcgcttcccaccttctctcctaagtgatcctctttatcccccttccgtgtctcactttcccaagtccccccattactgggtctgggtgtgcaaggaatagccatttctttatttcttgaaatttaattaataccaaagcccccattgtctgcagggtttgatgggcaaacttcatatcagatattattaatatgaacagctcccctccccaggaaattggataacttcttggctccaggccatcttccttgtccaatcccagccactacttcagatatcccctggagtacaggcttctttgcccacgcaggaaacattgctgctgggtcccagaaagcatctccctgaggccttttcatccctcagcagcccctgagctaatctccccatcttcagtctctcctccctgctttcaatctcgtccccaatctcatattcactccctttctatatcatagcctgaagactcttcttaaaatgcagt

SEQ ID NO: 354044 - DNA, 925 bp, Homo Sapiens
  misc_feature (72)..(81): n is a, c, g, or t
caagcacaaagcctttattttactttttctcaaagaggacattgtttaagtgagcagctaacaaaatttatnnnnnnnnnngtgacagcaaaggtaactggctcaagtccctctgtgtacggtacgccatgtacatttcatgtctgagcaccttgtgtgtgtggtttaagtgaaggtaaggcagtgtagattgtgcgaacaagagatctgtgttctgtcatcaggaaaggctactacatgcatcacacaaaatgcacaacctgaaatgcttcaatctgcaaccgaagtttcctcaagcaagaattcgcatgaacactgacgaacacatacagagcaacttgggcagagagaatggatgatgccatgaggcagtgaggttagcacactgatcaagagccccaaaagcaggagccgtcccagtggcagagcaggctaggagggtgagcagcagccatctccagccaccttgagttccttcctgccttcactctaagttgagcagctccacgtcaaagatgagggtggcattgggagggatgacaccggggtggcccgtggctccatatgccacatcaggggtgcaggtcagcttcgccctctgccccaagctcatctgggctgcaccctcttcaaaacctttgatgacttcctgtttgccaattctgaacttgaaaggtttgtttctgtctctggatgaatcaaacttcttcccattttggagcattcctgtgtagtgcaccacacacgtttggcccttcttggggaatgtccttccgtctccgggggagatggtctcgatctccacgcccatagcggtcccacaggccccgcctctggggggtccctgctgctgcccgaccccggctcggctccggccccagccccaccgtcgctccggctcgcctcctcgccgccactgcccgct

SEQ ID NO: 354045 - DNA, 879 bp, Homo Sapiens
  misc_feature (801)..(837): n is a, c, g, or t
gttctgtcatgcaggaaagggctactacatgcatcacaccaagatgcacaacctgaaatgctgtcaatcgtgcaaccgaagtttccctcaagcaaagaattcgcatgaacacttgacgaacacatacagagcaacttgggcagagagaatggatgatgccatgaggcagtgaggttagcacactgatcaagagccccaaaagcaggagccgtcccagtggcagagcaggctaggagggtgagcagcagccatctccagccaccttgagttccttcctgccttcactctaagttgagcagctccacgtcaaagatgagggtggcattgggagggatgacaccggggtggcccgtggctccatatgccacatcaggggtgcaggtcagcttcgccctctgccccaagctcatctagcagggatgggggcagatggggagaggagaaagaggacccagctgggctgcaccctcttcaaaacctttgatgacttcctgtttgccaattctgaacttgaaaggtttgtttctgtctctggatgaatcaaacttcttcccattttggagcattcctgtgtagtgcaccacacacgtttggcccttcttggggaatgtccttccgtctccgggggagatggtctcgatctccacgcccatagcggtcccacaggccccgcctctggggggtcctgctgctgcccgaccccggctcggctccggccccagccccgccgtcgctccggctcgcctcctcgccgccaccgccgctctcgacgaattcgagctcggccgatttggcctgatnnnnnnnnnnnnnnnnnnnnnnnnnnnnnnnnnnnnncgccgccaccgcgtaatcccagtccccatatgatctatatca

SEQ ID NO: 354046 - DNA, 716 bp, Homo Sapiens
cggacgcgtgggcggacgcgtgggtttctgaggaaaacaggctacaactgtttattaaaaccacttgcagtgcattcgtttatcagatgctcagtgcaaagtgtaattgggtcatggtcaaaaacgcttgcaacatctaattggcgttcaagatagtcattcaaaagttcttggcccgctgaagtctgttaacagttgaaacattctacagttaaccattagcatgctagttgtcctaatggaaatttttgaagagtttttcaatatataccctacccttgccaggaagagaagtaaaatcctcaggttgtggggtatttgtttctactccagccctggcaggcaaggctaaaacctgagattatcgatctatgagacatcttgatatgtaaagcacttaatattaaaggcataaaagtgaaactgctaaatatgtatagagaggttgacgtgtgatacgtgggacagttcacatagacatcagagaattttattccagaaaggaacctcctgaatgtgatgaatacggcaaagcctttaatcacatctcagcccttagcatcggaaagcttatactgtaaataaacttgatgaatattatatgtgaggaaaactttcatgtatagcactcattgcttcagacagaaaatgaattccgtcggtatgttccaatcgtgatgaatttgagaaacattgcaagagggagctcaatcttg

SEQ ID NO: 354047 - DNA, 2439 bp, Homo Sapiens
  misc_feature (603)..(612): n is a, c, g, or t
  misc_feature (615)..(615): n is a, c, g, or t
  misc_feature (897)..(897): n is a, c, g, or t
  misc_feature (1168)..(1190): n is a, c, g, or t
  misc_feature (1360)..(1375): n is a, c, g, or t
  misc_feature (2082)..(2117): n is a, c, g, or t
ttttttacaacttagaaaccggttttactctgctgcaaacaaatggacaagatattgtacaatatgtaataaaaagtacagcataatacaagtgccactaataaaagaaacttaaggataagacttaaaaatgcttatttgttatatatatatacacactgcaataaaaagccacaataaatacacgaatttccatgtcattcataataaatactgaaaatataaatacagaagactacagctaatatgaataaattattacaacataaggtccaggttaagttctgttgaatattattgtagcttattttatataccctttggcatttttgatgttataacttatacacaagagaaatcaatctagaaactgtgtgacatacaacatgacatcttaatgtaacatgactgtatgtgtggactggagttgattttcctccttttcaactgttttaagtcattagattgaacataactaataaatatctattgaagtactgttgatattgagtaaaagtaacaataaaaatcagttgaaagataaaactaatcataaggtcacaaaatacagttcagtggcttttctgagtttttaaagttacnnnnnnnnnngcncagcacaaacaaacaaaaaataagagaacaaatattctcaaaagacttcccttgtgtaaggaccattcccaatatcttgaatggttcaacacagacctgaaggataacacccaagtcctttggatcatttgatctaccaatacattcagctcactagattccaacagaatttgcaaatgtaccaaatttctatggcaagttggaaagtgaaacatagttgatgtctaaaactatgatcaagatgaagacactgcaaaaagtgacatatgtctatgcaaccanttatacatatttttaaaatgggaaacgtatttttgacaaatgtcaaatgatctatcaaattgatataccctgtgacactgagggaaacacactgaaagaacaaagtgccattttctgcgtaaacaggcattaaccagtacatatgtattaaaagttctatcttaagaggctagtacaccagaaattcaataaactaaaaataaagcagatcaactttactaagacacaataaaggctgaggttcttaggaacagagctgtaatctacaggnnnnnnnnnnnnnnnnnnnnnnnactatttctgtactgtaaatttctagcatttattatacatcaaacacttttgaaacatgtttcacaaactatgcctcagacttatttcaatagaggtgcctagagtcaattaaaacatgggccaaattttattcaacattctttacatgatcattctatagcattagccnnnnnnnnnnnnnnnnaaataaaaaaggtcatttccccctagtgttatttgtggggagtaaccacactgatgtggctgtcatttcacaagagcatccgagtttgggagatatgcagctgtaccaagattgaaaaaaatcccatggagaaaggaaacattgatttcgggggtgttcctcatcttctggtgagttctgactctgagttgggtgtcaactctgagcagataaaaaaggctttgaaagctccagggagtgcttgaatcaagtgatgtaaccagaaaaatcaccatttctccacgacacctcccttcgttttcaggccttgtcaagaagacaaatttttaaatcattttcctgacccctgagaaagcaggaagccattgtttaaataacacaaggacaaaggctgggatcaaatggtggctgtgtaaatctctggagtcattttattccatcagactcttcacaactattcctatctcccacaggaggagtggaaaaactttggattcttatttgtcattttaagccaaggaaagattaatgagaaggtcattacttagaagtaagaatgtagaaaatgcttactttttgtaattgtaacttcttagaaaatggaacaccttaaaagtcaagtcatttgatcctagttaaagatgtttgtactggggatctgaaacagtcacttttcctgacattacctaccgacataagagcaatcnnnnnnnnnnnnnnnnnnnnnnnnnnnnnnnnnnnnctagtacagccatatttgtcaaaagttggtcatgttacagaccattgtctctgaatccgtgtctttctttaaaaatctgatttcttaggagacttatggaagtgatcatatattaatgtaataatcaccaaatgtagggggaaacccaacttcccttgaatcccctagtacaatggcccaaatcaccacaactgttgccaggtgcctaaccctcaaagactggccaagatattttcttattgtgagaaaacctaagagagctgaattgtgttgccaaggaaactgccttccctagagatgttaagaatagatggcgatctct

SEQ ID NO: 354048 - DNA, 1550 bp, Homo Sapiens
  misc_feature (1140)..(1150): n is a, c, g, or t
ctcataatggatacactcgcttccctggctctggcaacggaaccacccactgagtctctcttgcttcggaaaccttatggtagaaataagcctctcatctcacgtacaatgatgaagaatattttgggtcatgcattctatcaacttgtagtagtctttacactcttatttgctggagaaaagttttttgacattgatagtggaagaaatgctcctttgcatgctcctccttcagaacattatactattgtttttaatacctttgtgctgatgcaacttttcaacgaaataaatgcccggaaaattcatggtgaaagaaatgtattcgaaggaatctttaacaatgccatcttctgcacaattgttttaggcacttttgtggtacagataataattgtgcagtttggtggaaaacctttcagttgttcagaactttcaatagaacagtggctatggtcaatattcctaggaatgggaacattactctggggccagcttatttcaacaattccaactagccgtttaaaattcctcaaagaagctggtcatggaacacaaaaggaagaaatacctgaggaggaattagcagaggatgttgaagagattgatcacgctgaaagggagttgcggcgtggccaaatcttgtggtttagaggtctgaacagaatccaaacacagattcgagtggtgaatgcatttcgtagttctttatatgaagggttagaaaaaccggaatcaagaagttcgattcacaactttatgacacatcctgagtttaggatagaagattcagagcctcatatcccccttattgatgacactgatgccgaagatgatgctcctacaaaacgtaactccagtcctccaccctctcccaacaaaaataacaatgctgttgacagtggaattcaccttacaatagaaatgaacaagtctgctacctcttcatccccaggaagcccactacatagtttggaaacatcactctgattgtaagctgaatgttaacacactagctgcattgtaaagaaacaaattgaaactgggtcttttcacatattgtgatggacaagctagtattcttgtctttggacttcaacagaagacacacttgtacgaatgtagatttatttttttaannnnnnnnnnngacaaagctttctgccagactgagggtgcctttttggggggtgggagaaatgaactgacagataaacagtaactcagcgtaagtgacctgtggatcatcagtagtaccccaagcatggtccctgaacagtgtattagcagagctttagtttatctcagtccctggatgggagagagagggaggagtaaaactgggcaagacaaagagccctggatcgttgaattgatagtttaatttctgctgttggctgttaataatttggattatttatgtttataaatgatacagatctgtttacaaggtttgtagatactttttttgttcctgttcatagatgggaagcttccttataactgatgcagagaaaaattagtccttcaaatactgctgtattttcagg

SEQ ID NO: 354049 - DNA, 1776 bp, Homo Sapiens
  misc_feature (234)..(234): n is a, c, g, or t
  misc_feature (267)..(267): n is a, c, g, or t
  misc_feature (327)..(327): n is a, c, g, or t
  misc_feature (367)..(367): n is a, c, g, or t
  misc_feature (377)..(377): n is a, c, g, or t
  misc_feature (439)..(439): n is a, c, g, or t
  misc_feature (600)..(600): n is a, c, g, or t
acgaaggcagaaagtcgccagctaaggcccggaaatccaggtagcaaatgcatctggggcaagatgtgtttagtgtaatgacgggttctaccatcattcccaagccagcccagctatgctccgtcccagagctagatggtcagcaccctggcctggtccagtctgctctcgtgcttctgtacgcagggctcactttgcgggcgccacgctgcctccaggatgcagttcgtcagnccgtcagtgctagtgcggctctctttctcaccnagctgcagcctttccaccacccgctgatctccagctcaggggggtcagacgcctgcgagnctcctgcagcagccgctggagctggctcttctgtcgctcngccgtccggncggtctcctcggcctccgccagccggactcgcagctcctgcatctctgccgccagcgtctanttggttacttcagtggctgagaaacggttatggctctcctccagcttcagctccagtgtgtggatcttgttctctaggtagagccggccgctgtcctgctgctccgcgcgctgcagcaggctccccacgttaatcaggctgccattgtgggacaccaaggnctttgtgttctgtgggggcagcaccctggcttcgtgcttttcccaggagggggcagcaggtccaggtttccgaagagcacctcctcgggaaggccaccatccaggccctcctggcggctgtactgaaggctccggtactggcagatgttctgggtcaccaccctgctgaccagctgcttggcctgctctgcactgagccggatcccaagggtaaggaggatcctctctaagtctcgccggtgcaagtagccacaccagttggcatcaaagaacacaaaagcaagcagacagtctaaggggagcacagcagagggatccagctccttgggcatgtcctgaagtgaagagaactccatctctgactggtttgaggcaacggaccggacctccgaatcctccagctttgctcctgcaaactcctcctctccatcatccctcagaagcaacagttctgggtccagggccatctcacacaggtcctcagaagcctcgccccggggtttttcttcttcctctcccccagaagagagtggtttgggcaaaagcccatcctccttcagcggggcctctgactctgtagccgggccctcattctgtgcctcatccttgggctccttgaccacctcctctttgatggcttcttcctccttggtggcttcttccttggccgcctcctccttctcaggttcaggtggggacacgaccttttcaggaaggctcagtagcatcttataaactctatagccataaatccctctggagcatctccagaaacagctcggccagcaccatcacctcaaaagagatcctttcctttggcctccgatcctccacaatcccatggagggacaggtttacacagccagggcgtgcgatgacagcaggttctagggggggtggaggggcctctgggagatcagtggtccgtttcctgctgtgtggtggcctctggagctttctgcgttccgtctagaagtgtctgctgcttgcctccaaggcatcaggtgcctgttcagtaggctccgtttccccttgtgcctcctgggttgcggggaactgcctctgcagctttctgctggcacagggcctcccactccctccataagtacggccccacgcgtcacgcgacagcgtgggtcgactgatatcccgagaacctcgcggaccggtaccagg

SEQ ID NO: 354050 - DNA, 964 bp, Homo Sapiens
  misc_feature (1)..(1): n is a, c, g, or t
  misc_feature (17)..(18): n is a, c, g, or t
  misc_feature (42)..(42): n is a, c, g, or t
nggaaaagggtgacaanntgggtggagaaggaggagccggcnacctagcaactgacgggcctcgcacggaactgccatcctgtgagggcagcggtggcgcccggcaaagttggagcccttgcggtaccagaaagcagcgagagcgagacctgggagccagggcaggggtggctgaccccatgctcagcctctaggggacggcaggccatcaggctgggggctgtgctatgtgggatggatgtgtgaggaaccccggttccacttaacaactaaatacaacatcttttgcacccctagaatgtcattttgccctcaaccttggtatttctcctggggcccttttagtcttgtgctgactttctcctgtcctcttccagtttagaataagacaggggagaaaaaggcttttcgagtgtgggacaaggtctgatgtcagtgaacggaactgaagagcaagacatggagcctggctggggctaagcagccccctcctccggatggcacaggctctgctaggttccggacacaggcttctgggggaagggtctcccttggccatcacgggaatggagtccatgctagaaagagctcagtgttgggctgggtttgccagtagaacactgcgttccagtcaccccggtcttgccagaagaaaccagcacctcttccccgtggctcctgtgttcagaatgtggtattggctctggcccagccttctcccctgttacccataattcttgcctctttccataatccgtggtttcagtttgactttgtatataaagttggggtttaatttatttatataaaaggggctgggtcataaaaataaaaccaagagtcaaaacaccaacagacccgagagaaacaaacaaacgaaacagacgagccacacccaaggaaaaagcaaaagaagggacaaaaccagagcaatcgggggggcgcggagtaaaagggagaggga

SEQ ID NO: 354051 - DNA, 902 bp, Homo Sapiens
  misc_feature (51)..(87): n is a, c, g, or t
agcggatacgcgtactaatgggtgacccggccttcatcgcggtggcggcgnnnnnnnnnnnnnnnnnnnnnnnnnnnnnnnnnnnnnatcaggccaaatcggccgagctcgaattcgtcgagagcggggcttcccaggaacctcagggagagcgggcagccttcaaggtggacaggtaacccaggtttttctgccttttatgtgccatttgcaaaggctttatactctttgacaaacagacgctttccagtttggactatcagtcatgctgggcatgcgttggctcccaaagacaagaagattcttacaacatcagaggattcaaacgctcaagaaattaaggacatttatggactaaatggacaaatagagcacaaactagctttcctgagaactcatgtgccaaaggacatgaaacttgtgctcattggccattcaataggcagctatttcacacttcagatgctgaagcgagtccctgagctcccggtaattcgtgcctttctgctctttccaacaattgaacgaatgtctgagtcacccaatggcagaattgccactccactttagtgctggtttcgatatgttctctatgttactggctacttattatcgaaaccgtgtcctgagacaatcaagtccttgctaatcagaaggggccttcaagtaatgaacctagagaatgaatttttcaccattgaatatatttagaaccattctgccttgctaatgctgcctaccttgggggccaagaaatgatggaggtggtgaaggagagatgacgaaaccataaaggagcatttatgtaagcttacatttgattatggtactatagatccttggtgtcaaaagagtactatgaagacattaagaagaatttgcagaaaggagacattcgactc

SEQ ID NO: 354052 - DNA, 2082 bp, Homo Sapiens
  misc_feature (2018)..(2018): n is a, c, g, or t
  misc_feature (2046)..(2046): n is a, c, g, or t
cttgatttcctacgaatcagtgacacagaagagcttccagaatttaagagttttgaggaactagaacctcccaaacattcaaaagtcaaacggcaaagcagcacccctagtgctcctgaactgggacagcagccggatgtcaacattagtgaatggaaggacaaacccacccacgaaattcttcaaaaactgaatgattgcagttgtctggctagccaagccatcctgctgggtatactgctcaaaagagaaggccccaacttcatcacaaaggaaggtaccgtttctgatcacattgagagagtctatagaagagctggcagccaaaaactttggtcggttgtacgccgtgcagcaagtcttttaagtaaagtagtggacagcctggccccatccattactaatgttttagtgcagggcaaacaggtaactctgggtgcctttgggcatggaagaagaagttatctctaatccttttgtctccaagagtgattcaaaacatcatctattataagtgtaacacccatgatgagagggaagcggtcattcagcaagaactggtcatccatattggctggatcatctccaataaccctgagttattcagtggcatgctgaaaatacgaatcgggtggatcatccatgccatggagtatgaacttcagatccgtggcggagacaagccagccttggacttgtatcagctgtcacctagtgaagttaaacagcttctgctggaatattctgcagcctcaacagaatggaagatgttggctgaacaggcgtcagatcgatgggtctttgaatagaactcccaccgggttctatgaccgagtgtggcagattctggagcgcacgcccaatgggatcattgttgctgggaagcatttgcctcagcaaccaaccctgtcagatatgaccatgtatgagatgaatttctctctccttgttgaagacacgttgggaaatattgaccagccacagtacagacagatcgttgtagagttacttatggttgtatccattgtactggaaagaaaccccgagctagaatttcaagacaaagtagatctagacagactggtcaaagaagcatttaatgaatttcaaaaagatcagagtcggctaaaggaaattgaaaaacaagatgacatgacttccttttacaacactcctcccctgggaaaaagaggaacatgcagctatttgacaaaggcggtgatgaatctgctgctggaaggagaagtcaagccaaacaatgatgacccgtgtctgattagctagtggggaaggtgtaggaagctctgttgagacacatgttctgaagtgtgttggtgtttcatgttcaagcttaatcaaggcagccattaatatacgaactgagcatgctggggaggtgaatgccacatccttggcggggttatggacctcttgcatgtcatagccaatctaacggtaatggtaaatgcttttaatcaagcaggaaaaagttctcatgattatgccaactataatagtaatcctcactgagtgataaaaatagtttatgaattgaaaatttgccgctgcatgttgtatgatcaaatagttcatcaaaatgaatctttgctctttggactgaattcttaccatactgccattaaaataaatttgccaactagtaatgcatactggaaatcaaaagatactgaaagaatggtgaacttctcttagtggtattgtcatgctaaaagatgttaatatacatcataaaagcaaagtcagccagctgatattttggttctcaaaaactgcattattaataatattttagtatacagagctattctacagtttttacattgtaaacatgactgtggttttgtatttgctaaatataggggttggactaaaatataataaatctgtaccttatcaaacattttctttgagctcctgctaaaaataggacatgtctatgattgttcaaaaatatgttaaatttaggctcagcacagtagctcacacctgaaatcttnagcacttcgggaggctgaggcaggtggntcaactttaggttagggagttcaagacccagcccag

SEQ ID NO: 354053 - DNA, 980 bp, Homo Sapiens
ttgaatatatgcaatttgccagattctgtgtgagccacaggatacagagtgatgaataagacccaattactatcatcaaggaactcacagaatacaggaataaaaagagttttgaagttttgtatgtgaaactgccagaactgcctaagccattttggactcccaagaaaagaacaatagtaagcttttaagattcctggggataatctttttagctgaagctagggttgccggattataatttgggtgcgggaagttttactaatgcttctttgcagtggagagtatggcccctttatcttttaaatagaatgcaactgagatgtgagcccctttgattctctagatgattttttggggtggtctcagcccagaccagagtggtagggtcagaactttgtgtgagtctctgtggttctaccagaacaaacataggcctgatattctagcaacgcatttggatgacttccatatatccaaatacactatccgtctctgcgcgaagctgtgaacgtgatgtgtgcctaataatactaacacttgctcatttcctgagcccgtacaacaaaacactgtgcagttaacaaacttacgtggggtatagtcattttatgaactagatccttcttttcctcatttttattttccttatcatgagcctcccttcccagacattaacactaaagccagaaaaggaaaatggaattctccagttctaaagaacattgggttaccattctagaaacctttctcaggtctgcaatgttgactcacacattaatgctgggagaggctgaagatttagagtcatcagaacaggagaagagagtgtaacttaagcgtgtagaaaggaagcagtaaacttgtccttgaacctattaagggctagagttgatactgtctaaataagtttgttgcacgtggtattggagcaaaatattctttcagaggaggtgctagaagtagggttctttaggtta

SEQ ID NO: 354054 - DNA, 449 bp, Homo Sapiens
  misc_feature (21)..(21): n is a, c, g, or t
  misc_feature (226)..(226): n is a, c, g, or t
gcaggcttgaggaataattanataaaaatgggcttccacgatggtgaatcagcatgctgatttctcttggcaggaagctcctcagggaaatgtccgtgaatccatttaaagatgcctcctctggtggatagagaaaccgcagtcccaaaaacagatgggtgtatatttgcctttgtaagcaaagggcatgtatccatactcgcatcctaaaacagtgtcccacatnctttgccaaaggcactgaattttacctttttttattacctcgtggccagcacttcctcagtaggcatttcaggtgtgtcacaaaccatgttcatttttaatcttgaaaaagtcaatcgtctgtagtctgtactataaaatgatgcctgcaactttgtggtgaatattatccccaagttaacagtgaaataagtaaataaaactattattgaacaaaaaaaaaa

SEQ ID NO: 354055 - DNA, 658 bp, Homo Sapiens
ctcgggaagaccgacagcagttcaaggaggagaagacgggcaccatcctgaggaacaactggggcagcccccggcgggagggcccggatgcacaccccatcctggctgctgacgggcatcccgagctgggccccgatgggcatccagggccaggcaccgcctaggttcccatgtcccagcctggcctgtggctgccctccatcccttccccagagatggctccttgggatgaagagggtagagtgggctgctggtgtcgcatcaagatttggcaggatcggcttcctcaggggcacagacctctcccacccacaagaactcctcccacccaacttccccttagagtgctgtgagatgagagtgggtaaatcagggacagggccatggggtagggtgagaagggcaggggtgtcctgatgcaaaggtggggagaagggatcctaatcccttcctctcccattcaccctgtgtaacaggaccccaaggacctgcctccccggaagtgccttaacctagagggtcggggaggaggttgtgtcactgactcaggctgctccttctctagtttcccctctcatctgaccttagtttgctgccatcagtctagtggtttcgtggtttcgtctatttattaaaaaatatttgagaacaaaaaaaa

SEQ ID NO: 354056 - DNA, 704 bp, Homo Sapiens
  misc_feature (89)..(132): n is a, c, g, or t
  misc_feature (191)..(293): n is a, c, g, or t
aggtgggaagggccatcggtccgggccggctatacgccagctggcaaaaggggaatgtccaagccgattaagttggggtaccgcagggnnnnnnnnnnnnnnnnnnnnnnnnnnnnnnnnnnnnnnnnnnnnttttctggggttatttagagtttatttgaacaactatcttaaacatataattataacannnnnnnnnnnnnnnnnnnnnnnnnnnnnnnnnnnnnnnnnnnnnnnnnnnnnnnnnnnnnnnnnnnnnnnnnnnnnnnnnnnnnnnnnnnnnnnnnnnnnnnaaggtacagccaagcaggggtgacacatggtaggtcagtgctgggaaagacaaacatgatatgctgaggacatggaacaatcaagggcatccaggcagaggctgagtggaggaggagtttgcaaggctgtgccaagaacatttttcagggtagaatctaccccccaggcagagatgtggggaataaagaccaaaatggaaacagcactggccaagtctgagagccatgtgaaatagcacagcacacttagggatctggggatttgggattgctggagtcaaagtgttgagtgtgagggggtagaaaagcataattatatgtagagtcagtgcctgaacagttcagtcagaaaaacctcgagccgaattcctgaagcccggggaatccactaggtctagatcgcccatctcc

SEQ ID NO: 354057 - DNA, 506 bp, Homo Sapiens
tgaattaatcagtcagcagtggctaggttatgcttagtggtttataaccaaatcttagtttataacaacaaatgtgtattgttaattcccactacaagtttataacgacattgctggatgctacactccatgtctctttgtgggacccaggctcatgggacttctgttatctgcattagagagagagaagacaacaaaatatgcactggttcttgaagctttggcccagaagtaaaatatgtcttttacctgttcacattgcattgggccagggcaattatcatggctgcaagtaacttcaaaaggatggggaagtgcgatcttggcatgtgtcagaagaaatgaaaacatttggtgaagagcattaatgactgtctttacaggaaaaaagcaatcaaatagacatgatttcttgtttcagtttcatcatttcctactgtgttacctaaactttctgagccccagtttcttattactaaaataaaataatgataaagatgaaaaaa

SEQ ID NO: 354058 - DNA, 434 bp, Homo Sapiens
  misc_feature (395)..(395): n is a, c, g, or t
tcagtcagcagtggctaggttatgcttagtggtttataaccaaatcttagtttataacaacaaatgtgtattgttaattcccactacaagtttataacgacattgctggatgctacactccatgtctctttgtgggacccaggcttatgggacttctgttatctgcattagagagagagaagacaacaaaatatgcactggttcttgaagctttggcccagaagtaaaatatgtcttttacctgttcacattgcattgggccagggcaattatcatgggctgcaagtaacttcaaaaggatgggggaagtgcgatcttgggcatgtgttcagaaggaaattgaaaacatttgggttgaaggagcctttaatggactgttcttttacagggaaaanaaggccattccaattagggacatggattttccttgtttt

SEQ ID NO: 354059 - DNA, 695 bp, Homo Sapiens
  misc_feature (205)..(205): n is a, c, g, or t
  misc_feature (679)..(679): n is a, c, g, or t
gtaaaatgcttgaaggcgggaccctgtagaaaaatttaggcaatagttggagatgtttcacctttattctgaaaatgctgaagactaaaaatttttttatgaagaataaaaatacaactgtctggaaataagattggaggagaaaacatgaaggcagggagatagcaaatcctgttgattaaaataactcagataggagagaagnaggggtggagcaatagagaatggaaggaatacctaaaatgtgttaacaaaggaaaaacaaaatgttttatactggatatgagaaatcggaaagaggagagggaaaagttaatagacgttcaaacatagattttaaaattttctgtccaaattagtgggtaaaacaccatagcatttgtacaactgccaaaactgtttttcaggtctaaataatttgcataattactgtcagcatttctttgttccttcgttattttccaactctatttgttgaccttgagaaaattagtttccctagtctcatacgtcttccaatgtctgtgttttctagtggaaaaagaaaagggaattgaaaacgaagacagctacattacattttgtctgatattgaatcactggccatttaatctgctccttaaaactctctttgagtcattttttccactttgaaatgtagcttcatagattcaaggangggtactagcaaaaaa

SEQ ID NO: 354060 - DNA, 873 bp, Homo Sapiens
  misc_feature (221)..(237): n is a, c, g, or t
gggtgaggccgggctccccgcctcactgcccttgagaccaaaggggcagccctggccctccctcccctctgctggccagagggtctgcatctcagcccacccccaacccaccgtttggggtgagaaagcagaatctgtgcttccccaggtttcttgtcccagacaaccagcgatgttagaacctttccggtttcaccatttccggattctggtcccctttnnnnnnnnnnnnnnnnnagcactctggctcccaggatctgtgcccttatttcaggtgccttcctaggacacaggggactccttgacgctccccaggctttctgtgcccaggcctctgttccccagcggtgaggttgcagtgagtgaaggagaggaggtgatctgttctccctccactttctgccctatatccagcatcgttcttcccccttccctggcctctgcagggccttctccagctcccatttggttagtccctgggccatccctcctgtcctggatcccttctccctaactgcaaaatgcctgcagattccagctccttcgtccctgatcctcaagcggttccctcccgtctcagctcagcggatcccccagagtggaggaggcctctccatgaggaggggagcagcccaaggcacctgtcctctgacccaccggcagcgagtgcgcaggtgtgagtgtaagttcatgtaggagagtgtatgcgtgtgcgcctgtgccctgcttgcaggcaagcagggctccctcatgtagcccggccttccccctgctgggggtccaccacatcgctgctctttctcacagtctgcctctgatgagggcgaattgctatgacattccaagctccaataaagactgtcccagactttg

SEQ ID NO: 354061 - DNA, 1843 bp, Homo Sapiens
ctggaccggtccggaattctcgggatcggaaccctgtgtgctggggaggaatcccgcagtggccggggggcttgaggccgctgctttgtctcttcgtccagagccttatgtaagagcttttctcgggaaacaggaagtcctgcttgccaatttcagcacagggagtagtgcaggccttattccaacacacccggcccagccttaaccccagaactcagccagtttcttgcttccgtgcccctggttctcctccccatcgagcccacccctcctttcccaccttcagtcacccctagtgaactgccccagcgatctctgctgtgcttgaccccgagggtcttccaccctcgccctgaccctggacactgcccagcttggccccccatcctgctcctggcacaatgccctctagccagccaaccttccctcccccaaccctggggccgccccagggttcctgcgcactgcctgttcctcctgggtgtcactggcagccctgtccttcctagagggactggaacctaattctcctgaggctgagggagggtggagggtctcaaggcaacgctggccccacgacggagtgccaggagcactaacagtacccttagcttgctttcctcctccctcctttttattttcaagttcctttttatttctccttgcgtaacaaccttcttcccttctgcaccactgcccgtacccttacccgccccgccacctccttgctaccccactcttgaaaccacagctgttggcagggtccccagctcatgccagcctcatctcctttcttgctagcccccaaagggcctccaggcaacatggggggcccagtcagagagccggcactctcagttgccctctggttgagttggggggcagctctgggggccgtggcttgtgccatggctctgctgacccaacaaacagagctgcagagcctcaggagagaggtgagccggctgcaggggacaggaggcccctcccagaatggggaagggtatccctggcagagtctcccggagcagagttccgatgccctggaagcctgggagagtggggagagatcccggaaaaggagagcagtgctcacccaaaaacagaagaagcagcactctgtcctgcacctggttcccattaacgccacctccaaggatgactccgatgtgacagaggtgatgtggcaaccagctcttaggcgtgggagaggcctacaggcccaaggatatggtgtccgaatccaggatgctggagtttatctgctgtatagccaggtcctgtttcaagacgtgactttcaccatgggtcaggtggtgtctcgagaaggccaaggaaggcaggagactctattccgatgtataagaagtatgccctcccacccggaccgggcctacaacagctgctatagcgcaggtgtcttccatttacaccaagggggatattctgagtgtcataattccccgggcaagggcgaaacttaacctctctccacatggaacctttcctggggtttgtgaaactgtggattgtgttataaaaagtggctcccagcttggaagaccagggtgggtacatactggagacagccaagagctgagtatataaaggagagggaatgtgcaggaacagaggcgtcttcctgggtttggctccccgttcctcacttttcccttttcattcccaccccctagactttgattttacggatatcttgcttctgttccccatggagctccgaattcttgcgtgtgtgtagatgaggggcgggggacgggcgccaggcattgtccagacctggtcggggcccactggaagcatccagaacagcaccaccatctta

SEQ ID NO: 354062 - DNA, 497 bp, Homo Sapiens
atgcttccagtgggccccgaccaggtctggacaatgcctggcgcccgtcccccgcccctcatctacacacacgcaagaattcggagctccatggggaacagaagcaagatatccgtaaaatcaaagtcctggtcttccaagctgggagccactttttataacacaatcacagtttcacaaaccccaggaaggttccatgtggagagaggttaagtctcgcccttgcccggggaattatgacactcacaatatccccttggtgtaaatggaagacacctgcgctatagcagctgttggaggcacggtcccgggtgggagggcatacctcttatacatcggaatagagtctcctgccttccttggccttctcgagacaccacctgacccatggtgaaagtcacgtcttgaaacaagaacctgctatacagcagataaactccagcatcctggattcggacaccatatgcttgggcctgtaggcctctcccacgcctaag

SEQ ID NO: 354063 - DNA, 1563 bp, Homo Sapiens
  misc_feature (528)..(528): n is a, c, g, or t
  misc_feature (1480)..(1522): n is a, c, g, or t
atcagcgtcaccagcagcaccgccagcttagccttcatgtgcaggctcgagcccaggtacacggtgaacgatggccacagcctgccaccagtggtagatggtgaagatgaagtcctgtctctccttgtcttcgtacaagattcccaggagtgtgctgagtccagtcttgttcagggcactgcccacaccccaaagggcagctgccacatagaggatccagctgtgttgcaggacccgaggcacaggagcccagaaaaagaggatgaaggtcgagcagacaggtgcacccctgctccggccaccaggggcaccgggcgtggcagccacaggcccagcaggcccaggagtgaggcggctgaggcagcccaggctgtaagccacgaggaggtaagccagccgctccagccccaccgagcacacgccatagcccaaggcgataccagtgcaggcaaagagcacctcgaagccgctgtagataaagaaaggcacgaggtggcgcaggcggtagtcacgcacgtgcttgaaggngcagctggaagatggtggccccagccaacgctgcgcagatcgatctcctccgtgggccggtaagcggctccgcacaaacccgagcaccaagcagcatggccaaggaaggccacgtgccatgagcacgctctccaccacaatgaggtttccgctccgcgggagcgtccgcagaaccgtcttgttgaagccgctgaggatcccgtggctgttggtgccgcagctctgcacattgtacagcgtgtggttcaggtcatacaggtagtggttcaggaaataaatcatgggcagctgggcgcaggcgaagctcagatggaagaagctgtagaagatggcttggaagaccaggagatagggcgcgtgggagccccgcggaggccgctgcttcatcccctgcccatcctgctccttgtagtgggagtactcatggtacttctgcgccatcctggtgatgtagttgcccatggaagcccaaagaggcacgatggccatgcccagggccacagccgagggcacaagcgtgtagtagcgctcccagtagttggtggagacaaagagggcgtagatgcccacagcgaggaacatcatccacttcgttccaaaaaacctgatgagcacaggtgtgtagagcagggcggcgatgggagtcacgttgatgcccatcagcattttgctgtcgatgtcgggcagccccatgttgccatacttcacctcgcggtaggtctcgtcgtagtgcaggatcagctgcatctgcaggaggcccaggtagacgccgtaggtgagcatgcccccggcgctggcagccagcacgttcttgagcacgcccaggcgcttgcggcggtagtagcggcgctcctcctcctcctcgttgtagttggggtacgcgcccaccagctcgtccagctgcgagccacgcacgccgctcgcacccgcgatcgcgccccgaacccgtgtnnnnnnnnnnnnnnnnnnnnnnnnnnnnnnnnnnnnnnnnnnnggggagcctggcccacagggacgcccgcgcctcgcactccg

SEQ ID NO: 354064 - DNA, 936 bp, Homo Sapiens
ggtaccggtccggaattcccgggatggaagtggccgggcggtcgcagggactccggggcgaccgccgcgagtccgcagtagttcgggccatggaggcggagccgccgctctacccgatggcgggggctgcggggccgcagggcgacgaggacctgctcggggtcccggacgggcccgaggccccgctggacgagctggtgggcgcgtaccccaactacaacgaggaggaggaggagcgccgctactaccgccgcaagcgcctgggcgtgctcaagaacgtgctggctgccagcgccgggggcatgctcacctacggcgtctacctgggcctcctgcagatgcagctgatcctgcactacgacgagacctaccgcgaggtgaagtatggcaacatggggctgcccgacatcgacagcaaaatgctgatgggcatcaacgtgactcccatcgccgccctgctctacacacctgtgctcatcaggttttttggaacgaagtggatgatgttcctcgctgtgggcatctacgccctctttgtctccaccaactactgggagcgctactacacgcttgtgccctcggctgtggccctgggcatggccatcgtgcctctttgggcttccatgggcaactacatcaccaggatggcgcagaagtaccatgagtactcccactacaaggagcaggatgggcaggggatgaagcagcggcctccgcggggctcccacgcgccctatctcctggtcttccaagccatcttctacagcttcttccattctgagcttcgccttgcgcccagcttgcccatgatttatttccttgaaccactacctgtatgaccttgaaccacacgctgtacaatgttgcagagctgcgggaaccaacagccacggggatcctcaggcgggttccacaagacggttctggggacgctcg

SEQ ID NO: 354065 - DNA, 368 bp, Homo Sapiens
gcggccgccggaaaagcgcttcggccacatccagcagcagtagcagccgcaaggaccgggactcgaaggcccaccgcagccggactaagtcgtccaaggagccgccttcggcctacaaggaaccgcccaaggcctaccgggaggacaagaccgagcctaaggcctacaggcggcggcggtccctcagcccactgggaggccgggacgacagcccggtgtcccacagggcctctcagagcctgaggagccgcaagtcccccagcccggaaggaggtggcagcagcccctattctcggcggctgccgcgctccccgagcccctacagtcgccgccgctcccccagctacagccgccacagctcctacgag

SEQ ID NO: 354066 - DNA, 1914 bp, Homo Sapiens
gatccgccccgcggcgcattgtgggatctgtcggcttgtcaggtggtggaggaaaaggcgctccgtcatggggatccagacgagccccgtcctgctggcctccctgggggtggggctggtcactctgctcggcctggctgtgggctcctacttggttcggaggtcccgccggcctcaggtcactctcctggaccccaatgaaaagtacctgctacgactgctagacaagacgactgtgagccacaacaccaagaggttccgctttgccctgcccaccgcccaccacactctggggctgcctgtgggcaaacatatctacctctccacccgaattgatggcagcctggtcatcaggccatacactcctgtcaccagtgatgaggatcaaggctatgtggatcttgtcatcaaggtctacctgaagggtgtgcaccccaaatttcctgagggagggaagatgtctcagtacctggatagcctgaaggttggggatgtggtggagtttcgggggccaagcgggttgctcacttacactggaaaagggcattttaacattcagcccaacaagaaatctccaccagaaccccgagtggcgaagaaactgggaatgattgccggcgggacaggaatcaccccaatgctacagctgatccgggccatcctgaaagtccctgaagatccaacccagtgctttctgctttttgccaaccagacagaaaaggatatcatcttgcgggaggacttagaggaactgcaggcccgctatcccaatcgctttaagctctggttcactctggatcatcccccaaaagattgggcctacagcaagggctttgtgactgccgacatgatccgggaacacctgcccgctccaggggatgatgtgctggtactgctttgtgggccacccccaatggtgcagctggcctgccatcccaacttggacaaactgggctactcacaaaagatgcgattcacctactgagcatcctccagcttccctggtgctgttcgctgcagttgttccccatcagtactcaagcactataagccttagattcctttcctcagagtttcaggttttttcagttacatctagagctgaaatctggatagtacctgcaggaacaatattcctgtagccatggaagagggccaaggctcagtcactccttggatggcctcctaaatctccccgtggcaacaggtccaggagaggcccatggagcagtctcttccatggagtaagaaggaagggagcatgtacgcttggtccaagattggctagttccttgatagcatcttactctcaccttctttgtgtctgtgatgaaaggaacagtctgtgcaatgggttttacttaaacttcactgttcaacctatgagcaaatctgtatgtgtgagtataagttgagcatagcatacttccagaggtggtcttatggagatggcaagaaaggaggaaatgatttcttcagatctcaaaggagtctgaaatatcatatttctgtgtgtgtctctctcagcccctgcccaggctagagggaaacagctactgataatcgaaaactgctgtttgtggcaggaacccctggctgtgcaaataaatggggctgaggcccctgtgtgatatttgaaaggttgttgtgtctggcggcccttgtttccaaatcccccaaggaccctatgggagaagggttttgccaccatggcaactctccccaggggtgtccaaagaaacctttgaaaaagtttgtacccatgtggctgaaatggtgagcctgccagcaaaactcgagggatcctgtctcaccagctggtttcacccaagaaccaggagcttccgccttctcccctggaaagctctcccaggtggggggggaaaggagaaaccccctttttgaagaggggac

SEQ ID NO: 354067 - DNA, 667 bp, Homo Sapiens
tccgacccgccccgcggcgcattgtgggatctgtcggcttgtcagtgtggtggaggaaaaggcgctccgtcatggggatccagacgagccccgtcctgctggcctccctgggggtggggctggtcactctgctcggcctggctgtgggctcctacttggttcggaggtcccgccggcctcaggtcactctcctggaccccaatgaaaagtacctgctacgactgctagacaagacgactgtgagccacaacaccaagaggttccgctttgccctgcccaccgcccaccacactctggggctgcctgtggctccttgggaccacagcaggaagcaagacatcttgttctctcaaatctctttgagtattttgagggatgcagcacatcacagacaacccttatgtagctctctgcacggtccccaggcaaacatatctacctctccacccgaattgatggcagcctggtcatcaggccatacactcctgtcaccagtgatgaggatcaaggctatgtggatcttgtcatcaaggtctacctgaagggtgtgcaccccaaattacctgagggagggaagatgtctcagtacctggatagcctgaagggttgggaatgtggtggagttacggagtgccaagcgggtagctcagttaaactggaaaagggg

SEQ ID NO: 354068 - DNA, 853 bp, Homo Sapiens
  misc_feature (117)..(117): n is a, c, g, or t
  misc_feature (147)..(147): n is a, c, g, or t
aaggatccagctggaggaaccaggcaagctggatggcactgaagaggaaaagccaactgagggggctggcaggaaacacaccggtgagaaagtcattccagaaacgtgagagatgcnttttccaggagcgcaggccagagaggtagntctcctgcagcacaggggcactgagttccacttcagccccgtccgaggtcagcgagggtcggaagcccacggcctggtgcgcttcagccttgtcacgctggagccctgagtcgggcagagtcatacttcaggaccccagcccctccgccctcagactcaggagtccaggcccccagcccctcctcctccttcatacccaggagtccaggccccagcccctcctccctcagacccaggagtccaggcccccagcccctcctccctcagacccagaagcccaggccccagcccctcctccctcagacccaggaatccaggcccttagccctcttgtttctcagcctccaggatcccatctcccagcttcccctggctctgacctgttctccttccaggattcccacaggctggggcagcacattgaggacgcactgctggatgtggcctccctggtccaggcgggacagcattttaagcccccgtttcagagggtcagggaagggagaactccaggcacaggtgtggatttctctcccgccagactggggcctccaaggcctcaatgacatccaccgacttctgactccttccagcaggcagctggcctctccaaggaataagggtgaaattgccacagctggctgacacaggacaggggcaactggtttggcaaccccacatccaggccaataaagatgtgtgagct

SEQ ID NO: 354069 - DNA, 1482 bp, Homo Sapiens
  misc_feature (23)..(23): n is a, c, g, or t
  misc_feature (36)..(36): n is a, c, g, or t
  misc_feature (92)..(92): n is a, c, g, or t
  misc_feature (157)..(157): n is a, c, g, or t
  misc_feature (159)..(159): n is a, c, g, or t
  misc_feature (161)..(161): n is a, c, g, or t
  misc_feature (273)..(281): n is a, c, g, or t
  misc_feature (885)..(906): n is a, c, g, or t
ttgagaaaggatgcgtcacagangaagtcagttgtnggggggcggcaaggcagaaggcggagaggcaacgggacaacgggagcagacaaaangggagagggtcagtggggtggggataagaggaaagggcgtggtcagaggaggggcgtggtccgangnanaagaggagagggacgtgggtgtgggtggtgagacgagtgaggggcgtggccagatagggcgtggtcaggagaagggcgtggttagggagaaggaggcccggatttacgggtnnnnnnnnngccagggatgcagggagtgaagtggagccaagggccggaactgcagatctctgtcctgcacatgtgatgggctcctgtcctcaggtccattcggagcagtggcagctgtccaccagccagatccctgttcagcaaatgcatctgtttgacgtccacaattacccggactatgtttcctcaggcggtggattcgggcctgctgatgaccatggttatggtgtttcttatatcttcatgggggatggcatgatcaccttccacatctccagcaaaaaatcaagcacaaaaacggattcccacaggctggggcagcacattgaggacgcactgctggatgtggcctccctgttccaggcgggacagcattttaagcgccggttcagagggtcagggaaggagaactccaggcacaggtgtggatttctctcccgccagactggggcctccaaggcctcaatgacatccaccgacttctgactccttccagcaggcagctggcctctccaaggaataagggtgaaattgccacagctggctgacacaggacaggggcaactggtttggcaaccccacatccaggccaataaagatgtgtgagctgggnnnnnnnnnnnnnnnnnnnnnngggggggccgtctaagagttatccctcggggggccaaagtttaacgcggtacccaagtttttctggtacaaggtgggtcccctaataagtggagtcggtatatttataaagctaaggacactgggccgccgtttcaacacaggtcgtggactggggaaacagtgggtacgttgggagactctttgggagaaggagaccctttactttctgggggggtggccattatttggggaccaaattacctatacaggaggatttcaaaggtctctatagggtacattttaacacattgtttaaaggtggtaataacgtgcgtggttaaaacataggtgtgccatatagtgcctgcgcgtgattggagaaagtttgggcgcgtaacgcggggagatatgtgaacttataggtggacacagatttattgtagttaccaccagggagcttggtgtgtagaaaaaagcaagcgacagaacagcaacaagcgaggcacaccacgacgctagacagaagagacgtgaaagaaaacgaacagagcggagcggagcgagacacgagaacggcagcaagcaaaagggaccg

SEQ ID NO: 354070 - DNA, 2145 bp, Homo Sapiens
  misc_feature (2095)..(2095): n is a, c, g, or t
gggaaggaaaacataacaacggctaggtacgaggccgggtggcgaattcggcacgaggacaggaatcggggtttctgggtgacggtgatctcggggtgggcaggactccaaaggcccgtcgacccggtggtggactccttgcactgggattggacatatgcaagcgggagatttggggccggcgctcaaaatcggggggcgggggtggactcgggttttggacccccaggatccgatcagcggacccttgattcaacgtgaggtcccgaattggaaggttccttccctcaaaaactccgggtctacaaaccaggaccctcaagacccttcagggctccagcgtgacatggctgaagcgcaccaggccgtgggcttccgaccctcgctgacctcggacggggctgaagtggaactcagtgcccctgtgctgcaggagatctacctctctggcctgtaccgccaccgcctgaaccgccaggagatacccccgactttgctgatgggaatgcgccccttatgctctgcccagtacgagaagatcttcaacaccacgcggattccaaggggtccaaaaagactacatccgccacctccatgacagccaacacgtggctgtcttccaccggggccgattcttccgcatggggacccactcccgaaacagcctgctttcccccgagagccctggagcagcagtttcagagaatcctggatgatccctcaccggcctgcccccacgaggaacatctggcagctctgacagctgctcccaggggcacgtgggcccaggtgcggacatccctgaagacccaggcagcggaggccctggaggcggtggaaggggccgctttctttgtgtcactggatgctgagcccgcggggctcaccagggaggacccggcagcgtcgttggatgcctacgcccatgctctgcttggccggccggggccatgatcgctggttttgacaaaatccttcaccctaatcgtcttctctaacgggaagctgggcctcagcgtggagcactcctgggccgactgccccatctcaggacacatgtgggagttcactctggctacagaatgctttcagctgggctactcaacagacggccactgcaaggggcacccggaccccacactacccccagccccagcggctgcaatgggaccttccagaccagatccactcctccatctctctagccctgaggggagccaagatcttgtctgaaaatgtcgactgccatgtcgttccattctccctatttggcaagagcttcatccgacgctgccacctctcttcagacagcttcatccagatcgccttgcaactggcccacttccgggacaggggtcaattctgcctgacttatgagtcggccatgactcgcttattcctggaaggccggacggagacggtgcggtcttgcacgagggaggcctgcaactttgtcagggccatggaggacaaagagaagacggacccacagtgcctcgccctgttccgcgtggcagtggacaagcaccaggctctgctgaaggcagccatgagcgggcagggagttgaccgccacctgtttgcgctgtacatcgtgtcccgattcctccacctgcagtcgcccttcctgacccaggtccattcggagcagtggcagctgtccaccagccagatccctgttcagcaaatgcatctgtttgacgtccacaattacccggactatgtttcctcaggcggtggattcgggcctgctgatgaccatggttatggtgtttcttatatcttcatgggggatggcatgatcaccttccacatctccagcaaaaaatcaagcacaaaaacggattcccacaggctggggcagcacattgaggacgcactgctggatgtggcctccctgttccaggcgggacagcattttaagcgccggttcagagggtcagggaaggagaactccaggcacaggtgtggatttctctcccgccagactggggcctccaaggcctcaatgacatccaccgacttctgactccttccagcaggcagctggcctctccaaggaataagggtgaaattgccacagtctggctgacancaggacaggggcaactggtttggcaaccccacatccaggccaataaagat

SEQ ID NO: 354071 - DNA, 660 bp, Homo Sapiens
  misc_feature (30)..(30): n is a, c, g, or t
  misc_feature (162)..(278): n is a, c, g, or t
tagacattcagccaatgcctgacagagctnggatataaacacctcagctccctctccctcagggaagactttgaggcgtgtgctccagcagctgcccacagtgggggtaggcatggagacacacccactgtggcccatcttcccttacccatctcactcccnnnnnnnnnnnnnnnnnnnnnnnnnnnnnnnnnnnnnnnnnnnnnnnnnnnnnnnnnnnnnnnnnnnnnnnnnnnnnnnnnnnnnnnnnnnnnnnnnnnnnnnnnnnnnnnnnnnnntggactgccctccatgtggctgccagatggtaccctgctggtgggcagtctggtctaaagggtccatgatggctttactcacatgcctggcatcttgacagggacagctggaaggcaaggttcagctgggactgtccacagagctcctccctgtggcctttccagcatggtggtctcagggtagctggacttcctgcatgacagctcagggctcccagagctactgtcccaagagatagaaggtggaaactgccagtctcttaggctaggaccagaaaccagcacccctgcacccacagccttttggtagtgatgaaataaacataaggtttttattttattcattcgtaagtgggttaatacatttcaacaattgtgtacc

SEQ ID NO: 354072 - DNA, 1123 bp, Homo Sapiens
  misc_feature (996)..(1005): n is a, c, g, or t
aatttccgggatgggacacgagagagaggaatcggggtttctgggtgacggtgatctcggggtgggcaggactccaaaggcccgtcgacccggtggtggactccttgcactgggattggacatatgcaagcgggagatttggggccggcgctcaaaatcggggggcgggggtggactcgggtttggaccccaggatccgatcagcggacccttgattcaacgtgaggtcccgaattgacgtccttccctcaaaacctccgggtctacaaaccaggaccctcaagacccttcagggctccagcgtgacatggctgaagcgcaccaggccgtgggcttccgaccctcgctgacctcggacggggctgaagtggaactcagtgcccctgtgctgcaggagatctacctctctggcctgcgctcctggaaaaggcatctctcacgtttctggaatgactttctcaccggtgtgtttcctgccagccccctcagttggcttttcctcttcagtgccatccagcttgcctggttcctccagctggatccttccttaggactgatggagaagatcaaagagttgctgcctgactggggtggacaacaccacgggctccggggggtcctggcagccgcgctgtttgcctcgtgtttgtggggagccctgatcttcacactgcacgtggccctgaggctgcttctgtcctaccacggctggcttcttgagccccacggagccatgtcctcccccaacaagacctggctggccctggtccgcatcttctctggccgccacccgatgctgttcagttaccagcgctccctgccacgccagcccgtgccctctgtgcaggacaccgtgcgcaagtacctggagtcggtcccggcccatcctctccgaacgaggacttctaactgggaccgcggttcctggcgcaaggaattccctgagggttgccaggcgtcgcctgctggcagtgggaacctgcggccccaggtccnnnnnnnnnnatcaattttgtttaaaaaaacggttggctaagcaacaactgttcacaacacctacacccaaattccgctacatcgctgaggcacccgcttttcacacgtgtaggacatctcggcgcca

SEQ ID NO: 354073 - DNA, 787 bp, Homo Sapiens
cggggtttctgggtgacggtgatctcggggtgggcaggactccaaaggcccgtcgacccggtggtggactccttgcactgggattggacatatgcaagcgggagatttggggccggcgctcaaaatcggggggcgggggtggactcgggtttggaccccaggatccgatcagcggacccttgattcaacgtgggctccagcgtgacatggctgaagcgcaccaggccgtgggcttccgaccctcgctgacctcggacggggctgaagtggaactcagtgcccctgtgctgcaggagatctacctctctggcctgcgctcctggaaaaggcatctctcacgtttctggaatgactttctcaccggtgtgtttcctgccagccccctcagttggcttttcctcttcagtgccatccagcttgcctggttcctccagctggatccttccttaggactgatggagaagatcaaagagttgctgcctgactggggtggacaacaccacgggctccggggggtcctggcagccgcgctgtttgcctcgtgtttgtggggagccctgatcttcacactgcacgtggccctgaggctgcttctgtcctaccacggctggcttcttgagccccacggagccatgtcctcccccaccaagacctggctggccctggtccgcatcttctctggccgcacccgatgctgttcagttaccagcgctccctgccacgccagcccgtgcctctgtgcaggacaccgtgcgcaagtacctggagtcggtcggccatcctctcg

SEQ ID NO: 354074 - DNA, 753 bp, Homo Sapiens
gcgagagaaggagcgccacacgaagcagctgctcattgaccccgaggacgacgtccgcgacaacatcctcaagtatgacgaggaaggcggtggcgaggaggaccaggactacgacctcagccagctgcagcagccggaagccatggggcacgtgccaagcaaagcccctggcgtgcgtcgcgtggatgagcggccggtgggtgctgagccccagtacccgatcaggcccatggtgccgcacccaggcgacatcggtgacttcatcaatgagggactccggctgctgacaacgaccccacggcacccccctatgactccctgctggtcttcgactacgaggggagcggctccaccgcaggctccgtcagctccctgaactcatccagttccggggaccaagactacgattacctcaacgactgggggcccagattcaagaagctggcggacatgtatggaggtggtgaagaggattgactgacctcgcatcttcggaccgaagtgagagccgtgctcggacgccggaggagcaggactgagcagaggcggccggtcttcccgactccctgcggctgtgtccttagtgctgttaggaggccccccaatccccacgttgagctgtctagcatgagcacccacccccacagcgccctgcacccggccgctgcccagcaccgcgctggctggcactgaaggacagcaagaggcactctgtcttcacttgaatttcctagaacagaagcactgttttta

SEQ ID NO: 354075 - DNA, 578 bp, Homo Sapiens
ttagatgtaataaagatattgccacactctatccatatgtttatacatcaaatttttactgagtacatacatcatgagacaaaataaacttcctgtcacaaaaggtgcttgaccaaaactcaagaatcacctttcagggatactgttaaaagtgttcccacatcagctaggagttagctctagagggcttttaagatctttggccatcccgaaattctatgcttgaaacacgttttctcatagaaacgctcctaccaaaggccagtgagagaactatcactttgtgaagaatttcagaatgcccactagctctcctgtagccctaaaaggtaatgagagtctacctgttcagactgagagctccggctgccttgttgctacagaagcagtaagtgcatgtaaaggacgccatatttctaagacaaaagcagtaacaatgactcaaggatgatgcctaatagacgatttaacctataactttgctaattgtcatattttcaaaacagccctatgggaagggtacacaaatgtctggggagtatttcctgctttttagcacccagggaactacaaccagg

SEQ ID NO: 354076 - DNA, 2660 bp, Homo Sapiens
  misc_feature (69)..(120): n is a, c, g, or t
gggtccggaattcccgggatgcgggagcgaggggcgccggctggggtgtgtgctcctggtgagtgacannnnnnnnnnnnnnnnnnnnnnnnnnnnnnnnnnnnnnnnnnnnnnnnnnnnagtgtccctgcgtggggcggccgagccggagttgtgtcagtgaaggaatccagtccgggggccgagctggctgcgccctccgccaagcgccggcagcgcggggcgagctccggacggcgcgcggcccaggcagcggctcccgctcggcccgccctccgagccgcaggggccgccaccgccgcggcgcctcccctggcgaccgcgcccccgggccccggctccggcccgggacggaggagccggcgctcgacacagagagctcttcagaaaccaggctgctttcaggaacattgctgtggattcccagggcctattccactagaagcaagatggctgaactcaatactcatgtgaatgtcaaggaaaagatctatgcagttagatcagttgttcccaacaaaagcaataatgaaatagtcctggtgctccaacagtttgattttaatgtggataaagccgtgcaagcctttgtggatggcagtgcaattcaagttctaaaagaatggaatatgacaggaaaaaagaagaacaataaaagaaaaagaagcaagtccaagcagcatcaaggcaacaaagatgctaaagacaaggtggagaggcctgaggcagggcccctgcagccgcagccaccacagattcaaaacggccccatgaatggctgcgagaaggacagctcgtccacagattctgctaacgaaaaaccagcccttatccctcgtgagaaaaagatctcgatacttgaggaaccttcaaaggcacttcgtggggtcacagaaggcaacagactactgcaacagaaactatccttagatgggaaccccaaacctatacatggaacaacagagaggtcagatggcctacagtggtcagctgagcagccttgtaacccaagcaagcctaaggcaaaaacatctcctgttaagtccaatacccctgcagctcatcttgaaataaagccagatgagttggcaaagaaaagaggcccaaatattgagaaatcagtgaaggatttgcaacgctgcaccgtttctctaactagatatcgcgtcatgattaaggaagaagtggatagttccgtgaagaagatcaaagctgcctttgctgaattacacaactgcatcattgacaaagaagtttcattaatggcagaaatggataaagttaaagaagaagccatggaaatcctgactgctcgtcagaagaaagcagaagaactaaagagactcactgaccttgccagtcagatggcagagatgcagctggccgaactcagggcagaaattaagcactttgtcagcgagcgtaaatatgacgaggagctcgggaaagctgcccggttttcctgtgacatcgaacagctgaaggcccaaatcatgctctgcggagaaattacacatccaaagaacaactattcctcaagaactccctgcagctccctgctgcctctgctgaatgcgcacgcagcaacctctgggaaacagagtaacttttcccgaaaatcatccactcacaataagccctctgaaggcaaagcggcaaaccccaaaatggtgagcagtctccccagcaccgccgacccctctcaccagaccatgccggccaacaagcagaatggatcttctaaccaaagacggagatttaatccacagtatcataacaacaggctaaatgggcctgccaagtcgcagggcagtgggaatgaagccgagccactgggaaagggcaacagccgccacgaacacagaagacagccgcacaacggcttccggcccaaaaacaaaggcggtgccaaaaatcaagaggcttccttggggatgaagacccccgaggccccggcccattctgaaaagccccggcgaaaggcagcacgctgcagacacctcggaggccaggcccttccggggtagtgtcggtagggtttcacagtgcaatctctgccccacgagaatagaagtttccacagatgcagcagttctctcagtcccggctgtgacgttggtggcctgagctaggaggaaaaagagcagttttcactcagttttggttccctgcccgaggtgctgacccaattcgctgccaaaagagtgtcaatcagaatatacaaatcccgtatggttgtgtcatcctctcttaatcatttttactaattctaataatcagctctagcttgcttcataattttcatggctttgcttgatctgttgatgctttctctcatcaagactttgcagcattttagccaggcagtatttactcattattaggaaaatcaagatgtggctgaagatcagaggctcagttagcaacctgtgttgtagcagtgatgtcagtccattgattgtctttagagagttaatgttacaaaaaagaattcttaataatcagacaaacatgatctgctgaggacacatgcgcttttgtagaatttaacatctggtgtttttctgaaaaaatatatatacatatattgctttatttgaaacaaattaaaatatgctgcattttgaaagctcccctacaaaagtaaaaaaattaacttg

SEQ ID NO: 354077 - DNA, 546 bp, Homo Sapiens
  misc_feature (446)..(446): n is a, c, g, or t
  misc_feature (463)..(463): n is a, c, g, or t
  misc_feature (475)..(475): n is a, c, g, or t
  misc_feature (483)..(483): n is a, c, g, or t
atgaatggctgcgagaaggacagctcgtccacagattctgctaacgaaaaaccagcccttatccctcgtgagaaaaagatctcgatacttgaggaaccttcaaaggcacttcgtggggtcacagaaggcaacagactactgcaacagaaactatccttagatgggaaccccaaacctatacatggaacaacagagaggtcagatggcctacagtggtcagctgagcagccttgtaacccaagcaagcctaaggcaaaaacatctcctgttaagtccaatacccctgcagctcatcttgaaataaagccagatgagttgggcaaagaaaagaggcccaaatattgagaaattcagttgaaggattttgcaacgctggcaccgttttcttctaactaggatattcgcgttcatgatttaagggaaggaagttggatagtttcccttgnagggcggttccaaaggntgcccttttgcntggatttnacaccatcggcttcctttggaccaaggagtttcctttattgggccggacttgggttaaagttt

SEQ ID NO: 354078 - DNA, 2449 bp, Homo Sapiens
  misc_feature (132)..(190): n is a, c, g, or t
ggctaggtacgtgctggtgttaattggcgagggggccggagcatcgtgggcggcggcggtctgcggcgcgcggcgcattcgttcccccgcggcggtggcggtggcgcgcggggtctccagtgagcggggagnnnnnnnnnnnnnnnnnnnnnnnnnnnnnnnnnnnnnnnnnnnnnnnnnnnnnnnnnnncggtgggcgccgggcgcggggccgccatgtggagcggccgcagctccttcaccagcttggtggtgggcgtgttcgtggtctacgtggtgcacacctgctgggtcatgtacggcatcgtctacacccgcccgtgctccggcgacgccaactgcatccagccctacctggcgcggcggcccaagctgcagctgagcgtgtacaccacgacgaggtcccacctgggtgctgagaacaacatcgacctggtcttgaatgtggaagactttgatgtggagtccaaatttgaaaggacagttaatgtttctgtaccaaagaaaacgagaaacaatgggacgctgtatgcctacatcttcctccatcacgctggggtcctgccgtggcacgacgggaagcaggtgcacctggtcagtcctctgaccacctacatggtccccaagccagaagaaatcaacctgctcaccggggagtctgatacacagcagatcgaggcggagaagaagccgacgagtgccctggatgagccagtgtcccactggcgaccgcggctggcgctgaacgtgatggcggacaactttgtctttgacgggtcctccctgcctgccgatgtgcatcggtacatgaagatgatccagctggggaaaaccgtgcattacctgcccatcctgttcatcgaccagctcagcaaccgcgtgaaggacctgatggtcataaaccgctccaccaccgagctgcccctcaccgtgtcctacgacaaggtctcactggggcggctgcgcttctggatccacatgcaggacgccgtgtactccctgcagcagttcgggttttcagagaaagatgctgatgaggtgaaaggaatttttgtagataccaacttatacttcctggcgctgaccttctttgtcgcagcgttccatcttctctttgatttcctggcctttaaaaatgacatcagtttctggaagaagaagaagagcatgatcggcatgtccaccaaggcagtgctctggcgctgcttcagcaccgtggtcatctttctgttcctgctggacgagcagacgagcctgctggtgctggtcccggcgggtgttggagccgccattgagctgtggaaagtgaagaaggcattgaagatgactattttttggagaggcctgatgcccgaatttcagtttggcacttacagcgaatctgagaggaaaaccgaggagtacgatactcaggccatgaagtacttgtcatacctgctgtaccctctctgtgtcgggggtgctgtctattcactcctgaatatcaaatataagagctggtactcctggttaatcaacagcttcgtcaacggggtctatgcctttggtttcctcttcatgctgccccagctctttgtgaactacaagttgaagtcagtggcacatctgccctggaaggccttcacctacaaggctttcaacaccttcattgatgacgtctttgccttcatcatcaccatgcccacgtctcaccggctggcctgcttccgggacgacgtggtgtttctggtctacctgtaccagcggtggctttatcctgtggataaacgcagagtgaacgagtttggggagtcctacgaggagaaggccacgcgggcgccccacacggactgaaggccgcccgggctgccgccagccaagtgcaacttgaattgtcaatgagtatttttggaagcatttggaggaattcctagacattgcgttttctgtgttgccaaaatcccttcggacatttctcagacatctcccaagttcccatcacgtcagatttggagctggtagcgcttacgatgcccccacgtgtgaacatctgtcttggtcacagagctgggtgctgccggtcaccttgagctgtggtggctcccggcacacgagtgtccggggttcggccatgtcctcacgcgggcaggggtgggagccctcacaggcaagggggctgttggatttccatttcaggtggttttctaagtgctccttatgtgaatttcaaacacgtatggaattcattccgcatggactctgggatcaaaggctctttcctcttttgtttgagagttggttgttttaaagcttaatgtatgtttctattttaaaataaatttttctggctgtggcatttttcttgacctggtataatgaaagtatttcagatatttgagtttaacccttttccagaaagtaatacatgatatggatttatttatgcattaaaagagcaaatttaaagagc

SEQ ID NO: 354079 - DNA, 353 bp, Homo Sapiens
  misc_feature (43)..(43): n is a, c, g, or t
  misc_feature (179)..(179): n is a, c, g, or t
atttctgtgaccgtgagcagagcctgaaggagacgttagtagnagccagggagcttctcccagcagaatggggagcaccccaagccagccctggacaccggctatgagaccgagcaagacaccatcaccagcaaagtccccacggatagggaggactcacagaggatcgacgacctttntgccagggacaagccctttgacgtcaagtgtgagctgaagttcgctgactcagacgcagatggagactgaggccggctgtgcatccccgctggtgcctcggctgcgacgtgtccaggcgtggagagttttgtgtttctcctgttcagtatccgagtctcgtgcagtgctgcgta

SEQ ID NO: 354080 - DNA, 1002 bp, Homo Sapiens
tggttcccggggtccaggtcgggccggccggagggccaccccggcgtcgctcggtgttgctgtgtcgaccttcagccctggcacgtaggcccagcccggcgggcctgcttgggctcctcggctggagcgaagtcctaattcgccagtgcaccctgtcactgtccactgtggccaacgaggcccacgatgacctcgggtgaagaggcccacgtctcggggctcccgtccccgtcaggtctcatgtccccaaagccgcctgcctggaagccgcgaacgggactgggaaaatggcagcaatgcctcctccccagcgtcagtgcccgagtacacaggtccacggctgtacaaagaacccagcgccaagtccaacaagttcatcatccacaatgccctatcacactgctgcctggcgggcaaggtgaacgaaccgcagaagaatcgcattctggaggaaattgagaaaagcaaggccaaccacttcctgatcctctttcgcgactcgagctgccagttccgggcgctctacacgctgtcgggggagacagaggagctgtcgcggctggcagggtatgggccccggaccgtcacgcccgccatggtggaaggcatctacaagtacaactcggaccgcaagcgcttcacccagatccccgccaagaccatgtccatgagcgtcgatgccttcaccatccagggacacctctggcagggcaagaaacccaccactcccaagaagggcggcggcacccccaaatagccccacccgggcggtccacgggccgggccctgtgtgctgcggccgccatcccctggaggacagtcagtcggtattcctgggtcctgtctgtccccaaccgtgtctgggtggggctggagtctccaccctctgactttgagtccagtcctgctgtgggggctgagctgggaggttcagggactcagggctcagctcagtccccttgtctgtcctcccccacttcttgaataaaataatttaaagtg

SEQ ID NO: 354081 - DNA, 494 bp, Homo Sapiens
tcctgcttccatactgtcgcatgggctagatctcaggtgtggtgttgagccaccttaagatgagggctgcttcgcagtaaagtttccagcctgggcccctcttgggccttctggctggggaccctcagcctcctgatgctgttgcagggcaggtctgagagggtgcccagcagcacccggtgtcagggccaccttgttttccatttttgaacagcgctccctgtggtttgtgcccactgctcaatacagcctccgatcctcactcttgaaagctccatgataagcacagagatgggcagtgtgggtcagaaggtgggccgcttcctgtggaagagggaagtgtaggtgaatagatatcaaaacccctgatgtcattcttttgaggggttggattttcttttttctggcagacatttcagtacattcacatttctctcacatttgctgaatgtgagatcagaataaaggagatcggtgtttatttcgtaccttca

SEQ ID NO: 354082 - DNA, 343 bp, Homo Sapiens
  misc_feature (45)..(45): n is a, c, g, or t
actaaacccatgaatggtactttcccttgggatgctcctcatccnaggattctgagctgaagaatgcatggaggcatcaagagagaggccctcggctcgggctgctgtttcaaaggcatcttggcattccaacggtcgagttctcctgaacttggaatcttcacggtctctgtgcgtcccagaagtgctggttctctccctcaaaattctatacccaggactggggatgatatactcttttcctatgtcgatatccttcatcttctctgagtggaggttccagggctcacagactgttagtttcacatcagaattcctgcgcccctgctccaggacaaccgcg

SEQ ID NO: 354083 - DNA, 1116 bp, Homo Sapiens
  misc_feature (750)..(833): n is a, c, g, or t
gtcagttcatgttaacacacaaccgagaagcacagtcctgtgcagaactggagtcagttccatttcacccccacccaggaatcaagccagttccatttcgttctctggcaacactgccctgtcatccttccagctgttgccaaaatccatcgacccctttcaacagacctgaaggcatctctaagactgctacctagcccaaagctgagcacaacctctgcaacagaataagagtgttagagctggccgtggccgggcccctggagactgtcggaaaggatggttagaacttactggtccactgaagccagccagctgcgtgatcatcaggcacacgatggacaggatgagcctggtgcggcagaagatccacacaacccttcgcagggaagcagcgtctggcccaacttcattcagctcttcttgccacagtctctctagtcttctgcagttcacgtcagaagactcgtgcttggacagagaccacacgtcttccattgagagctcccccttcttgtgggccacacgggccagagaagaaagccacgaaaaagtcatacaggaaaaaagcccagcattgtccactgggtgctggtgtttggaagtagtccggatgggcttcagagcactcaagccatgatggtactttcccttgggatgctcctcatccaggattctgagctgagaatgcatggaggcatcaagagagaggccctcggctcgggctgctgtttccaaggcatcttggcnnnnnnnnnnnnnnnnnnnnnnnnnnnnnnnnnnnnnnnnnnnnnnnnnnnnnnnnnnnnnnnnnnnnnnnnnnnnnnnnnnnngtgagagtgcctcggtcgagttctcctgaacttggaatcttcacggtctctgtgcgtcccagaagtgctggttctctccctcacacttctatacccaggactggggatgatatactcttttcctatgtcgatatccttcatcttctctgagtggaggttccagggctcacagactgttagtttcacatcagaattcctgcgcccctgctccaggacaaccgcgccagccgctcaaccacgctcccgagcatgagccctgcagcaaaacaagcctttatagcgg

SEQ ID NO: 354084 - DNA, 1168 bp, Homo Sapiens
  misc_feature (799)..(812): n is a, c, g, or t
agttcgacggagtactctccacgtggggttaccacactggagagattttccttctctcttaatggaaaatccctccatgtggggttaccacatggagagattttccattaagagagaaggacaaacatttctgagagtgtcagccattcttggtagacacctctccactcctcatcccacctctacccatctccatgccacaccttatccagttagacacatacataccaatcattagaagaacaagtttagaaggtgtggaacttgtgcctggctggctgggtagtcagctgagcctgttgctgagcccggtggtctggattggagtatggccagggcaggagtacacagaatagaatttagactgtcccttgagtagaatccactgattttctgtggctccagtgagaacaaggctttgaaactgaacaagataacttctagaaatgaactgtactaatccctttccccagattgtatcatgagtagaatcaggttcacgtggtgcttcaaagccctgagaagaatatttctttggaccccaggcactaggggccacctgcctgggagtctccctgcctcactcctctaggcaggggagtgatgcttcaggacgtgacaggctgttctaacatgtgtctacctgagggctagttgaaggatccaggagtattttcttcttgggtgggccctgaacaaagccaaaaattgtagaaaccagtctagaaaaagtcctgctcatctgtggccactgccttctagccgtcctccaccttgcagaaagaatctagcctttggnnnnnnnnnnnnnnatcggggtcatttgctattcccctctgatattcaaccctatagaaggagcctggactctgatccctctgtacaggctggatggaaggggccctccacacttcctgggaggtcagagacaaactgtttcagagagtcagatggacttcccaagacttgttgagagatgtgacatggttcttggatttcctctgtagcagcctcctggacttcctgaggactcgacattgtccacagatgtactggccattacatgaaacaagaaaccaagcatctttgctgttgttaattattatatgtgccattgttacaggagattataggctagtctgtaataaattatcttatagcagcaaaa

SEQ ID NO: 354085 - DNA, 757 bp, Homo Sapiens
  misc_feature (187)..(187): n is a, c, g, or t
cagtccttgacctcgccctggacaccatcaagcaatacttccatgcaggaggcaatgggctgaagaaaaccttcctggagaagagcccagatctgcagtctctacgctatgccctgtctctgtacacacagactactgacactctcatcaagacctttgtgcgctcgcagaccacccaagggtctgngtgtggacgatcctcctgggagaagtctctattcaggtggacttgtttacacaccctggtactggggagcacaaggtcacagtgaaagtggtggctgccaatgacctcaagtggcagacagcgggtatgttccggcctttcgtggaggtgactatggttggcccacaccaaagtgataagaagaggaagttcacaaccaaatccaaaagcaacaactgggcccccaagtacaatgagacattccacttcctcctgggaaatgaggaggggcccgagtcctatgagttgcagatatgcgtgaaggattactgctttgcccgggaagatcgcgtgctagggctggctgtgatgcctctgagggatgtcacagccaagggcagctgtgcctgctggtgccccttgggccggaagatccatatggatgagacaggcctgaccattctccggattttatctcagaggagcaatgacgaggtggcccgagaatttgtgaaactcaaatcagagtctcgttccccggaggaggggagctgaacaccttcgactcctgtgccaatcaggcagcagcaa

SEQ ID NO: 354086 - DNA, 389 bp, Homo Sapiens
  misc_feature (204)..(235): n is a, c, g, or t
gggcagctgccaaattgatgtattatatattgtggtttctgtttcttgaaagaatttttttcggttatttttacatctaacaaagtaaaaaaattaaaaagagggtaagaaacgattccggtgggatgattttaacatgcaaaatgtccctgggggtttcttctttgcttgctttcttcctccttaccctaccccccacttccnnnnnnnnnnnnnnnnnnnnnnnnnnnnnnnntttctataaaacttgaaaatagcaaaaaccctcaactgttgtaaatcatgcaattaaagttgattacttataaatatgaactttggatcactgtatagactgttaaatttgatttcttattacctattgttaaataaactgtgtgagacagaca

SEQ ID NO: 354087 - DNA, 1242 bp, Homo Sapiens
aagggtagacgatatggctaggagcgaggctgggtggcgaatcggcacgaggccaccaccaagcgcgtcttgtacgtgggtggactggcagaggaagtggacgacaaagttcttcatgctgcgttcattccttttggagacatcacagatattcagattcctctggattatgaaacagaaaagcaccgaggatttgcttttgttgaatttgagttggcagaggatgctgcagcagctatcgacaacatgaatgaatctgagctttttggacgtacaattcgtgtcaatttggccaaaccaatgagaattaaggaaggctcttccaggccagtttggtcagatgatgactggttgaagaagttttctgggaagacgcttgaagagaataaagaggaagaagggtcagagcctcccaaagcagagacccaggagggagagcccattgctaaaaaggcccgctcaaatcctcaggtgtacatggacatcaagattgggaacaagccggctggccgcatccagatgctcctgcgttctgatgtcgtgcccatgacagcagagaatttccgctgcctgtgcactcatgaaaagggctttggctttaagggaagcagcttccaccgcatcatcccccagttcatgtgccagggcggtgatttcacaaaccacaatggcactgggggcaagtccatctatgggaagaagttcgatgatgaaaactttatcctcaagcatacgggaccaggtctactatccatggccaactctggcccaaacaccaatggctctcagttcttcctgacatgtgacaagacagactggctggatggcaagcatgtggtgtttggagaggtcaccgaaggcctaaatgtcttgcggcaaattcaggttgccccagataccaaggcatcaaaagccaggggatccagaaaaaacaaagatggccaagagagaaactgggggaaaagccaaaaggttgagagccacaccatctaggagcttcctgcctgcggtgcggcacagaaacaagaagagtcagcaattaccagccagccgaggtcctggaagctgacgtagagctcatgccgacggcagacctgccggccgtgggagccgtggacgtcatctgcagggacagaaggggcaaggtcttttctggggttcctactgtgtgcagctactatggggtaccagggtgggggatgccctatgagcacattgtcaaataaagaagtaccaggaaac

SEQ ID NO: 354088 - DNA, 1237 bp, Homo Sapiens
  misc_feature (69)..(69): n is a, c, g, or t
cgcgtcttgtacgtgggtggactggcagaggaagtggacgacaaagttcttcatgctgcgttcattccnttttggagacatcacagatattcagattcctctggattatgaaacagaaaagcaccgaggatttgcttttgttgaatttgagttggcagaggatgctgcagcagctatcgacaacatgaatgaatctgagctttttggacgtacaattcgtgtcaatttggccaaaccaatgagaattaaggaaggctcttccaggccagtttggtcagatgatgactggttgaagaagttttctgggaagacgcttgaagagaataaagaggaagaagggtcagagcctcccaaagcagagacccaggagggagagcccattgctaaaaaggcccgctcaaatcctcaggtgtacatggacatcaagattgggaacaagccggctggccgcatccagatgctcctgcgttctgatgtcgtgcccatgacagcagagaatttccgctgcctgtgcactcatgaaaagggctttggctttaagggaagcagcttccaccgcatcatcccccagttcatgtgccagggcggtgatttcacaaaccacaatggcactgggggcaagtccatctatgggaagaagttcgatgatgaaaactttatcctcaagcatacgggaccaggtctactatccatggccaactctggcccaaacaccaatggctctcagttcttcctgacatgtgacaagacagactggctggatggcaagcatgtggtgtttggagaggtcaccaaaggcctagatgtcttgcggcaaattgaggcccagggcagcaaggacgggaagccaaagcagaaggtgatcatcgccgactgtggggagtacgtgtgagggcggcactctctctgcttccccctccgctcttgaccctgcatatccaggaaggaactgccagcctcagaggaggcagcaccgagggtgcctgtttgaagcaagcagcatttgggatatgtgcccttcctcagggtctgcttggagcagctcctctgcaggcacagcctggactattcccaggcacagctgtgggcccaggagccagctcaggtgctcccctccaccatgggcaggctgtgcaaaaagccactggcttttctcagcatttgctgctgggcctctcctgggactaccagtgtggctcttacgtgttttctttgctaaaataaaccctagttctta

SEQ ID NO: 354089 - DNA, 145 bp, Homo Sapiens
gcggcccctactactactatacggctgcgagaagacgacagaaggggcaaggtcttttctggggttcctactgtgtgcagctactatggggtaccagggtgggggatgccctgatgagcacatttgtcaaataaatgaatgacac

SEQ ID NO: 354090 - DNA, 883 bp, Homo Sapiens; identical to SEQ ID NO: 174906

SEQ ID NO: 354091 - DNA, 510 bp, Homo Sapiens; identical to SEQ ID NO: 259940

SEQ ID NO: 354092 - DNA, 1589 bp, Homo Sapiens
  misc_feature (1395)..(1395): n is a, c, g, or t
  misc_feature (1452)..(1452): n is a, c, g, or t
  misc_feature (1486)..(1486): n is a, c, g, or t
  misc_feature (1549)..(1549): n is a, c, g, or t
  misc_feature (1561)..(1561): n is a, c, g, or t
  misc_feature (1571)..(1571): n is a, c, g, or t
cgcggggcggagggagcgtgactgcgctgcgcagggcgctaggaggcattgtcgccgctcaggcccttttgtgagaagcagaccagcctgggggctggcggcaggacacctgtgtctgcatgctgaagaagatgggtgaggccgtggccagagtagcaaggaaggtcaacgagacggtggagagcggctctgacactctggacctggccgagtgcaagctggtctcctttcccattggcatctacaaggtcctgcggaatgtctctggccagatccacctcatcaccctggctaacaacgagcttaagtccctcaccagcaagttcatgaccacattcagtcagctccgagagctccacctggaggggaacttcctacaccgcctccccagcgaggtcagtgccctgcagcacctcaaggccattgacctgtcccggaaccagttccaggacttccctgagcagcttaccgccctgccggcgctggagaccatcaacctggaggagaacgagatcgtagatgtgcccgtggagaagctggccgccatgccagccttgcgcagcatcaacctccgcttcaacccactcaacgccgaggtgcgcgtgatcgccccgccgctcatcaagtttgacatgctcatgtctccggaaggcgcaagagcccccctaccttaggccaccctcctcatgcccacccagcaagggacagaggccacaggcctgcgaaccctggaagggagggaggcccatgggaggccaagcctgggggctgggggcgggtgggccgagcagcacgtggtgggtggggtgcagctggtctggatagatagcttacagcagtagtgggctctggaatgcccaagggaagaggcaaggtggggcctgcagcctggactcggcactcacagctgctgtgcaaactcaggcagatctcctgccctctctgagccttgtcacttgaaaaaaacaggaccctttccctcctttgggctccctggaggtttttaagcagtacgtgcctccaagttacctccagatcagcaggcacaggtgggcattgcaaggtattttctgagcccctgcgggtttgaggccttgtttttagtgctgagagccagttgctgccctgagaagagaagacaacctccatctatttattgcttcctgagaactgacctggatgcggccctctgcagggccagttcttcagtcctgtggtccctggactggtgggaacctgaactaggagtcctgggagagctgtggtgggaatatgggctggcactgctgcagggcaagaacattcatgtaggagcccgaggaccagcaggctgggaatggggagcaagtcacgtcagctctgtcattccccacagttaacaaatttggcggggtnggaagtcctgagtgctccgtccctcttagcattcactcctgagctgcgggagaggtnggcccagagaacagcagagttcagttacacctgncagctcttgttttaaagtgatttagattgccaccctcaccattgtccagttccagcagcagcntgggttcttttnttcattggcntcctggggggcagaaggc

SEQ ID NO: 354093 - DNA, 316 bp, Homo Sapiens
  misc_feature (56)..(56): n is a, c, g, or t
  misc_feature (74)..(74): n is a, c, g, or t
  misc_feature (79)..(79): n is a, c, g, or t
  misc_feature (88)..(88): n is a, c, g, or t
  misc_feature (271)..(271): n is a, c, g, or t
atgccggccaccaccaggagctgggagaggcccagggcagatccccttcagccttngagggacctagccctggncacancttcatctnagacttgcggcccagagaactgaatgagaataaatgtccgtgaagcccctcagtccacaggatgtggtactggaagcccccactcaagaaggctccagtgaatgctggcacgttcagccaggatgcctccgtgaagctggagacctcttccctggggtcgggaggggaaactgctccaatccnagggactgccacatgggaggggacggagcgtgccacttccagggt

SEQ ID NO: 354094 - DNA, 916 bp, Homo Sapiens
  misc_feature (9)..(9): n is a, c, g, or t
  misc_feature (51)..(60): n is a, c, g, or t
  misc_feature (185)..(198): n is a, c, g, or t
  misc_feature (583)..(583): n is a, c, g, or t
  misc_feature (686)..(686): n is a, c, g, or t
  misc_feature (689)..(689): n is a, c, g, or t
  misc_feature (719)..(719): n is a, c, g, or t
  misc_feature (806)..(806): n is a, c, g, or t
  misc_feature (812)..(813): n is a, c, g, or t
  misc_feature (822)..(822): n is a, c, g, or t
  misc_feature (824)..(824): n is a, c, g, or t
  misc_feature (835)..(835): n is a, c, g, or t
  misc_feature (841)..(841): n is a, c, g, or t
  misc_feature (843)..(844): n is a, c, g, or t
  misc_feature (850)..(850): n is a, c, g, or t
  misc_feature (856)..(856): n is a, c, g, or t
  misc_feature (858)..(858): n is a, c, g, or t
  misc_feature (865)..(865): n is a, c, g, or t
  misc_feature (877)..(877): n is a, c, g, or t
  misc_feature (879)..(880): n is a, c, g, or t
  misc_feature (886)..(886): n is a, c, g, or t
atgcaagtnttggtaacttcccacttgaactaaataacatggggttagagnnnnnnnnnntaccaggcaagctgtctccattgaacaagtccttggcaatgggcaggtcccaagggactcacagcttctggcagcaagtgtgtcattcacacacatcattctggctggagagtgcaatgtgtcannnnnnnnnnnnnngtaattattttattaagtatttagttggaaatttcacactggcattaacaggtctagcataagtggcctaggcagtcatcccaggctccaaaatgaagatgtgcaaaagagatgccactgggaatagaaacactgagttggttcagttaggtcatcccctgcagacatgtcatcgagcaggctgactcccacccctcagccatgccatgggtatgagaagccccttataatgaaagctgccagccctttcgtccttgtttcagagggtgggtcaggtggttggggtgagaacttgctcacggtgcacccaacaagacctgcaggtgcatataagtttagtcccaactgcagggccagaccaaacacttcctgggaagtgtgtggngggctgtgctagaccttcctgagtttctggctaaatcatcagccctgtttggtgcagtctcatgtctctgtggttcccaagctgcatgatcagagccagtganaanacaggatcagtgacccacagctttgggggnaaaacagccccactgttaacttccctcctgcaaacctgggtccccaggccataaggtgggcacactggtgcttacagactgggtggngagccnnaccttccangncttgatcccancctgcnannaaggtngggatnanaagcaancccccttccccnannctgttnttttaaaaactcaattttgtttttaacctt

SEQ ID NO: 354095 - DNA, 1151 bp, Homo Sapiens
  misc_feature (2)..(2): n is a, c, g, or t
  misc_feature (1008)..(1008): n is a, c, g, or t
  misc_feature (1026)..(1026): n is a, c, g, or t
  misc_feature (1054)..(1054): n is a, c, g, or t
  misc_feature (1060)..(1060): n is a, c, g, or t
  misc_feature (1073)..(1073): n is a, c, g, or t
  misc_feature (1095)..(1095): n is a, c, g, or t
  misc_feature (1098)..(1098): n is a, c, g, or t
  misc_feature (1100)..(1100): n is a, c, g, or t
  misc_feature (1107)..(1107): n is a, c, g, or t
  misc_feature (1113)..(1113): n is a, c, g, or t
  misc_feature (1117)..(1118): n is a, c, g, or t
  misc_feature (1122)..(1122): n is a, c, g, or t
  misc_feature (1132)..(1132): n is a, c, g, or t
  misc_feature (1145)..(1145): n is a, c, g, or t
gnaaagggaggagctcgggagcgggagcagcggctctggcggtcgtggcggtcggagatccgagagctctgcttctctgaaaagcgtgtggctttctggacttgtttcaggccacccacgagccagcgggaaaggattgccagccagagaaagacgaactccgaagtcccaatgcacagatcagcccccagtcaaaccaccaagaggagccgatcgccattttccactactcgtcgtagttgggacgacagcgagagttcgggaaccaacctgaatattgataatgaggactattccaggtatccgccaagagagtacagagcttcgggtagcagaagaggaatggcctatggacatattgactcttatggggcagatgatagtgaggaggagggggctgggcctgttgagcgaccgccagtgagagggaaaactggcaagtttaaagatgataagctgtatgacccagagaaaggggcaaggtctttggctgggccacctccacatttctctagttttagccgtgatgtgagagaggagcgagacaagttagacccagtccctgcagcaagatgctcagctagcagagctgacttcctgccacaaagtagtgtggcctcacagtcgtcttctgaaggcaagctggctacaaaaggtgacagctcggagagggagagaagggagcaaaatttacctgcacgtcccagcagggctcctgtgagtatttgtggtggtggggaaaacacctcaaagagtgcagaggaacctgtggtcaggcccaaaatcagaaacctggcaagtccaaactgcgtgaaaccaaaaattttttttgatactgatgatgatgacgatatgccacacagtacttccaggtggagggataccgccaatgacaatgagggccactcggatggcctggcaagaagagggagaggcgagagttcaagtggctatcccgagccaaagtaccctgaagacaaacgggaagcgaggagtgaccaagtgaancatgaaaaggtgccgagngacgacgcacatggccgaccctgacctntggacnccagtgatgattntacaaaaatgcgacgagactcnganantgaaaanagtggnttgnnctcngcgtcgaaanatcaaagcgaaanaaaacc

SEQ ID NO: 354096 - DNA, 1081 bp, Homo Sapiens
  misc_feature (907)..(908): n is a, c, g, or t
  misc_feature (974)..(974): n is a, c, g, or t
  misc_feature (1010)..(1010): n is a, c, g, or t
  misc_feature (1013)..(1013): n is a, c, g, or t
  misc_feature (1028)..(1028): n is a, c, g, or t
  misc_feature (1031)..(1031): n is a, c, g, or t
  misc_feature (1035)..(1035): n is a, c, g, or t
  misc_feature (1041)..(1041): n is a, c, g, or t
  misc_feature (1051)..(1051): n is a, c, g, or t
  misc_feature (1055)..(1055): n is a, c, g, or t
  misc_feature (1060)..(1060): n is a, c, g, or t
  misc_feature (1073)..(1074): n is a, c, g, or t
ggatctcgggaccgggagcagcggcactggcggtcgtggcggtcggagatccgatgaactctgcttctctgaaaagcgtgtggctttctggacttggtctacacctgacagtcactggaatgctactccaggccttagaagaaagtgaaactaattttaaaggccccttattctttctgttacctgcctgctgaagtgaaaataaatctccctgctcctttattctaaactgattttactttcccatctcaaaaacgtgtgcagggagcaggagccctcctacccgagccccaactgtattggaaaccctcctaagtcagagtgatgggtcaggaatctagcaagcctgtatggcccaatccaacaggagggtatcagtccaatacaggtaggaggtatggaagaaggcatgcttatgtcagtttcaggccacccacgagccagcgggaaaggattgccagccagagaaagacgaactccgaagtcccaatgcacagatcagcccccagtcaaaccaccaagaggagccgatcgccattttccactactcgtcgtagttgggacgacagcgagagttcgggaaccaacctgaatattgataatgaggactattccaggtatccgccaagagagatacagagcttcgggtagcagaagaggaatggcctatggacatattgactcttatggggcagatgatagtgaggaggagggggctgggcctgttgagcgaccgccagtgagagggaaaactggcaagtttaaagatgataagctgtatgacccagagaaaggggcaaggtctttggctgggccacctccacatttctctagttttagccgtgatgtgagagaggagcgagacaagttagacccagtccctgcagcaagatgctcagctagcagnntgacttctgccacaaagtagtgtggcctcacagtcgtcttctgaaggcagctggctacaaaggtgncagctcgagagggagagaaggagcaaatttactgcncgnccacaaggctctgtnatntttntgtggngggaaaaccncaanagtcngaggaactttgtnngcccaaa

SEQ ID NO: 354097 - DNA, 501 bp, Homo Sapiens
  misc_feature (394)..(394): n is a, c, g, or t
  misc_feature (441)..(441): n is a, c, g, or t
  misc_feature (451)..(451): n is a, c, g, or t
  misc_feature (461)..(461): n is a, c, g, or t
  misc_feature (474)..(474): n is a, c, g, or t
gcggtcgtggcggtcggagatccgagagctctgcttctctgaaaagcgtgtggctttctggacttggtctacacctgacagtcactggaatgctactccaggccttagaagaaagtgaaactaattttaaaggccccttattctttctgttacctgcctgctgaagtgaaaataaatctccctgctcctttattctaaactgattttactttcccatctcaaaaacgtgtgcagggagcaggagccctcctacccgagccccagctgtattgggaaaccctcctaagtcagagtgatggggtcagggaatctaggcaagcctgtatgggccccaatccaacagggaggggtattcagtccaattacaggtagggaggtatgggaaggaagggcntgtttttgttcagtttttcagggccaccccacggaggccagccgggnaaagggtttngccagccagnggaaaggacgganttccgagttcccctttgcacagtttca

SEQ ID NO: 354098 - DNA, 609 bp, Homo Sapiens
  misc_feature (106)..(125): n is a, c, g, or t
  misc_feature (235)..(297): n is a, c, g, or t
  misc_feature (332)..(453): n is a, c, g, or t
gaaagcataaacttaaaatgcattttatcaggaaaataagtaggaagatctctaagggattatgaagccacatttgggaacccactgattttgtttgacctctgcnnnnnnnnnnnnnnnnnnnnggatgagtatagagagggagagtgagttgcctaaagctacacacccagtcagagttacaggccagtgccccaggatttgtttcttttttattgttttgagatggagtctnnnnnnnnnnnnnnnnnnnnnnnnnnnnnnnnnnnnnnnnnnnnnnnnnnnnnnnnnnnnnnnagttcaagtgattctccttcctcagcctcccggcnnnnnnnnnnnnnnnnnnnnnnnnnnnnnnnnnnnnnnnnnnnnnnnnnnnnnnnnnnnnnnnnnnnnnnnnnnnnnnnnnnnnnnnnnnnnnnnnnnnnnnnnnnnnnnnnnnnnnnnnnnatgagccaccgtgcctggccaccccaggaatatttgataacatcaacatcaaatcattcctgcctgccctcatgcagggacttctcacttagaaagttctatagacccaatgggcaggacaggaagatagagaagaaaacaccatctgtaatcaac

SEQ ID NO: 354099 - DNA, 1946 bp, Homo Sapiens
tggctggtacggtccggactttttggatatcgtcgaccacgcgtcggtgacccggaggctgtggagatcgtgggcatccggacaagatccccttcaagcgcccctgcacttatggagtccccaagctgaagcggatcctggaggagcgccatagtatccacttcatcattaagaggatgtttgatgagcgaattttcacagggaacaagtttaccaaagacaccacgaagctggagccagccagcccgccagaggacacctctgcagaggtctctagggccaccgtccttgaccttgctgggaatgctcggtcagacaagggcagcatgtctgaagactgtgggccaggaacctccggggagctgggcgggctgaggccgatcacaaattgagccagaggatctggacatcattcaggtcaccgtcccagacccctcgccaacctctgaggaacatgacagactcgatgcctgggcacctgccatcggaggattctggttatgggatggagatgctgacagacaaaggtctgagtgaggacagcgcggcccgaggagaggcccgtggaggacagccacggtgacgtgatccggcccctgcggaagcaggtggagctgctcttcaacacacgatacgccaaggccattggcatcttcggagcccgtcaaggtgccgtactccaagtttctgatggcacccggaggagctgtttgtggtgggactgcctgaaggcatctccctccgcaggcccaactgcttcgggatcgccaagctccggaagattctggaggccagcaacagcatccagtttgtcatcaagaggcccgagctgctcactgagggagtcaaagagcccatcatggatagtcaaggaactgcctcctcacttggcttctctccccctgccctgcccccagagagggattccggggaccctctggtggacgagagcctgaagagacagggctttcaagaaaattatgacgcgaggctctcacggatcgacatcgccaacacactaagggagcaggtccaggaccttttcaataagaaatacggggaagccttgggcatcaagtacccggtccaggtcccctacaagcggatcaagagtaaccccggctccgtgatcatcgaggggctgcccccaggaatcccgttccgaaagccctgtaccttcggctcccagaacctggagaggattcttgctgtggctgacaagatcaagttcacagtcaccaggcctttccaaggactcatcccaaagcctgatgaagatgacgccaacagactcggggagaaggtgatcctgcgggagcagatgtaaggaactcttcaacgagaaatacggtgaggccctgggcctgaaccggccggtgctggtcccttataaactaatccgggacagcccagacgccgtggaggtcacgggtctgcctgatgacatccccttccggaaccccaacacgtacgacatccaccggctggagaagatcctgaaggcccgagagcatgtccgcatggtcatcattaaccagctccaaccctttgcagaaatctgcaatgatgccaaggtgccagccaaagacagcagcattcccaagcgcaagagaaagcgggtctcggaaggaaattccgtctcctcttcctcctcgtcttcctcttcctcgtcctctaacccggattcagtggcatcggccaaccagatctcactcgtgcaatggccaatgtacatggtggactatgccggcctgaacgtgcagctcccgggacctcttaattactagacctcagtactgaatcaggacctcactcagaaagactaaaggaaatgtaatttatgtacaaaatgtatattcggatatgtatcgatgccttttagtttttccaatgatttttacactatattcctgccaccaaggcctttttaaactaagtaaaaaaag

SEQ ID NO: 354100 - DNA, 433 bp, Homo Sapiens; identical to SEQ ID NO: 264544

SEQ ID NO: 354101 - DNA, 1198 bp, Homo Sapiens
ccaatatccaagtacgttgtggaggtgcaggtggctgtgggtgcaggagacccactgtggatagacgtggacaggcctgagtagacaagcaccatcatccgtggcctcaacgccagcacgcgctacctcttccgcatgcggaccagcattcaggggctcggggactggagcaacacagtagaagagtccaccctgggcaacgggctgcaggctgagggcccagtccaagagagccgggcagctgaagagggcctggatcagcagctgatcctggcggtggtgggctccgtgtctgccacctgcctcaccatcctggccgcccttttaaccctggtgtgcatccgcagaagctgcctgcatcggagacgcaccttcacctaccagtcaggctcgggcgaggagaccatcctgcagttcagctcagggaccttgacacttacccggcggccaaaactgcagcccgagcccctgagctacccagtgctagagtgggaggacatcacctttgaggacctcatcggggaggggaacttcggccaggtcatccgggccatgatcaagaaggacgggctgaagatgaacgcagccatcaaaatgctgaaagagtatgcctctgaaaatgaccatcgtgacttgcgggagaactggaagttctgtgcaaattggggcatcaccccaacatcatcaacctcctgggggcctgtaagaaccgaggttacttgtatatcgctattgaatatgccccctacggaacctgctagattttctgcggaaaagccgggtcctagagactgacccagcttttgctcgagagcatgggacagcctctacccttagctcccggcagctgctgcgtttcgccagtgatgcggccaatggcatgcagtacctgagtgagaagcagttcatccacagggacctggctgcccggaatgtgctggtcggagagaacctgggcctccaagatttgcagacttcggccttttctcggggagaggaggtttatgtgaagaagacgatggggcgtctccctgtgcgctggaatggccattgagttccctgaaactacaagtgtctataccaccaaagagtgactgtctggtccttatggagtccttctctgggagatagttgagccctggaaggtacaccctaactgtgggcatgacctgtgacgagctctatgaaaagctggccc

SEQ ID NO: 354102 - DNA, 206 bp, Homo Sapiens
  misc_feature (51)..(51): n is a, c, g, or t
  misc_feature (128)..(128): n is a, c, g, or t
ggcctcagctgtcctatgcattgtgaaatgtttaaaagcacccccggtgcnttcccaccagatgctggtagcacctaaccatccccagtgacaaccaaaactgcctccagacattgccaaatgtcccntgggggtaaggttgccacagtaaatacaggacatctagttaacatgcacggtctgaaattcagcttgaactggctgcc

SEQ ID NO: 354103 - DNA, 411 bp, Homo Sapiens
  misc_feature (27)..(27): n is a, c, g, or t
  misc_feature (46)..(46): n is a, c, g, or t
  misc_feature (53)..(53): n is a, c, g, or t
  misc_feature (61)..(61): n is a, c, g, or t
  misc_feature (65)..(65): n is a, c, g, or t
cttaataatagaccacatgcctggctnaaaatgaaagggttttgcncctgtgnaagaaggnaagntggatatggagaacagcttgtgatctctgccacaacagaggagtacctttgcataggtttcttcgccatttttatggcttcacctaagaattctcttttcctactctccttttcctctcacactgatcatccttttcttactgatttttagccacacttcttatggggaactcactacacttcccaaaaccatctgtagcagtgcttggctctaagaatttgtgtcaaaatcaaatgggagccacagggatgggcccagctcaacacgtggctcacgttaaatgcctcacaaatgttggcttccttcccttgagtcaggcattgcaaaaatgttgcggtgccctag

SEQ ID NO: 354104 - DNA, 1109 bp, Homo Sapiens
acctgtgtggtcaaaagacccgtaaaacaccttggcaatccaaccccaaaggcagttactgaggtgaactgtaggaaaaaagtgtataaatcttggaagcaggagttcaagtgggcggttgtacataaatcaaaggtggctgctgtgcagtttcctcttccccaaatcagatattcacttaagtggaatcgactgtatctttttacacaacatagagaaaaaaacagatacgtgaaacagtgaggtgtgcagatgtatcaccaacatataatgactaccaacaatacaacacgcagagagagaaacaagtattaggaaaatggtttaatattggagacagaagcaaaaaactgcatcacacaataacatacattacaaaaataagtttgactgtttcaactacacggttatgttcacaatgaggacagaagaatcagaaaaaactttgatctaaacagcaaaaaagcaaaccctaaagttttaactaatacatttatccacttaaagtgactgagtacttctaaatctaattaccttattgtgtaactgcacaatacagaataaaaagtgaaacttaccgctgttattttaagacaaaattctaatgctagatataagcaaagggaaaaaagaaatcaagccaaagtttttaattctcaaaagaaaagcaactttctttctatcaatcaatcaatcaatcaacccgaaatcaaacttgaaatcagtcattgtcaggggcccaccagagcaagccacaaaaatttccattgtttttttaatctccagtataaaaagttccactggtacaaaatgcataagtacaatcagttgtagaaataggaaagcctgcgtattttttttgtggctcaaattccatcaaacaacaaaatccaaatgcatcaataaaacaaacaatactcaaatggtcttacagtttccactaggttgcattaactttggcttttctcagacaatatttaaaaactattttgtaattctaaacaaaatgattattaatctacaaacatcaattctcacagcacaaaaaaacaaatacattttttgtatgacattattcaaaaaggtaatgaaactacaggtttttttaa

SEQ ID NO: 354105 - DNA, 480 bp, Homo Sapiens
  misc_feature (33)..(33): n is a, c, g, or t
  misc_feature (90)..(241): n is a, c, g, or t
agttaagcaagccagccctgcatttccaaaccnttcccagaagtctaaccttactttgatctgatgacatgggctttttaaaagattacnnnnnnnnnnnnnnnnnnnnnnnnnnnnnnnnnnnnnnnnnnnnnnnnnnnnnnnnnnnnnnnnnnnnnnnnnnnnnnnnnnnnnnnnnnnnnnnnnnnnnnnnnnnnnnnnnnnnnnnnnnnnnnnnnnnnnnnnnnnnnnnnnnnnnnnnatgccaccatgcccagctgacaatggctttatatacataatatttcctcagcaacaatttatggtcttatttggcacctgtaaaaccctcttcactgaattatgcctgttttaaaggtttggtatttactccaagtcacctgcctttagccatggagtatttcaagtttctttcagaatgagaatttggagggtgctcatagaaatataaaacaaggctgggcatggcggcttacacct

SEQ ID NO: 354106 - DNA, 430 bp, Homo Sapiens
ctgcttctcagtcaccaaaagcaccagctaaaattgtatatagactgattaggggacttccaacctaagattgtcctggaaacttaattcttatcttggctcatctcttcaaaacagatgcctctttcgttggtgacctcagatacactgttcagaagtactcaaagtattccttttttctcacatttgagagtcactctagcattttaatgagttaagcaagccagccctgcatttccaaacccttcccagaagtctaaccttactttgatctgatgacatggggctttttaaaagattactattttttttgggaggtgggggtctcactatgtttgcccagggtgggaatataatgggccatttcacagggcacagttaggggtgcactacttgccctggaactccagggggttcaaggccatcttcc

SEQ ID NO: 354107 - DNA, 784 bp, Homo Sapiens
  misc_feature (37)..(37): n is a, c, g, or t
  misc_feature (192)..(192): n is a, c, g, or t
aggaaacgggaattccggtcaataaaaaaccaccccntggcccctctccgaaaactccgaagtttgaaagctggagctgaagaacagcaggtaatctgtggaagaccagcagtctgccctctgcagtggccctaggacactagtggacaactgcctttaaaaaaccacagcagccttttctactgtgttggnctgcagagcccaggaacgctggcctctgcgtttcttagaaatatccctgtgcaaatatcaaggggtcatcctgtagaaaggggtctccatctggggactcgggagggagagacactgagggggcaggtccggcctggcccagtaggctgaagggcagagggtggggctggggcttcacatttcaatctttggagagaatactgagaggaggaggcaggcaagttcctgccggcaaggctggctgcccagtgtgccctgcctgtgggcgtaggtggcaggcatacttggggtgggctcagcaggtggaggtctgctttcggtagagctggatcaggggcaccaggcactcaggtagccctgtctgcagcaggaaggggtggtctaggagctcctgggctgtggctctctcttgggggtcccgcaccagatccgctccaggaagtctcgcagcactggggagaccttgtgagagtttttcagcttgggtggggggctgtcccggagcctcttcatggcttgcactggggagtcactgaagtacggtggctccccatctaccatctcaatcaccatgatgcccagagaccagata

SEQ ID NO: 354108 - DNA, 795 bp, Homo Sapiens
agcggcttctgcgacggcgcggacctggagcttccgcgcggtggcttcactctcctgtaaaacgctagagcggcgagttgttacctgcgtcctctgacctgagagcgaaggggaaagcggcgagatgactgaccgctacaccatccatagccagctggagcacctgcagtccaagtacatcggcacgggccacgccgacaccaccaagtgggagtggctggtgaaccaacaccgcgactcgtactgctcctacatgggccacttcgaccttctcaactacttcgccattgcggagaatgagagcaaagcgcgagtccgcttcaacttgatggaaaagatgcttcagccttgtggaccgccagccgacaagcccgaggagaactgagactctgccttaccaccgcagtgcggggcacctctcccagcgtttctccggtttgccaatcctcttaagtattcctgtctccaaaggaccggctctccatggctcctgcgcctcgtgctttccgcgtacagaagtgcttgcccggggagtcccgcctgacctgccttcatgtggacccttagaacagcactgggagaccagcaggactcctgagaactgtgctggtggagaggtcctagagccggcgagcgtttgagaagagggcatggcgctggagtgagatgggatttggcgtctcgtttttggctaattgattgtcattggctttttccataaagtttagaaatcgttcaaaaaaaaccaaaaagctctccagcgctggatccggccataagggcctgaatccttca

SEQ ID NO: 354109 - DNA, 1447 bp, Homo Sapiens
  misc_feature (53)..(89): n is a, c, g, or t
ggaactgataactcactatagggcgaactggaggttcacgcggtggcggccgnnnnnnnnnnnnnnnnnnnnnnnnnnnnnnnnnnnnnatcaggccaaatcggccgagctcgaattcgtcgagagcgggagatgtacgaacttccggttctccgggcagctgccactgctgtagcttctgccacctgccacgaccgggcctctccctggcgtttggtcacctctgcttcattctccaccgcgcctatggtccctcttggagccagcgtggcgggcctggcggctcccgggtggtgagagagcggtccgggaacgatgaaggcctcgcagtgctgctgctgtctcagccacctcttggcttccgtcctcctcctgctgttgctgcctgaactaagcgggcccctggcagtcctgctgcaggcagccgaggccgcgccaggtcttgggcctcctgaccctagaccacggacattaccgccgctgccaccgggccctacccctgcccagcagccgggccgtggtctggctgaagctgcggggccgcggggctccgagggaggcaatggcagcaaccctgtggccgggcttgagacggacgatcacggagggaaggccggggaaggctcggtgggtggcggccttgctgtgagccccaaccctggcgacaagcccatgacccagcgggccctgaccgtgttgatggtggtgagcggcgcggtgctggtgtacttcgtggtcaggacggtcaggatgagaagaagaaaccgaaagactaggagatatggagttttggacactaacatagaaaatatggaattgacacctttagaacaggatgatgaggatgatgacaacacgttgtttgatgccaatcatcctcgaagataagaatgtgccttttgatgaaagaactttatctttctacaatgaagagtggaatttctatgtttaaggaataagaagccactatatcaatgttgggggggtatttaagttacatatattttaacaacctttaatttgctgttgcaataaataccgtatccttttattatatctttatatgtatagaagtactctattaatgggctcagagatgttggggataaagtatactgtaataatttatctgtttgaaaattactataaaacggtgttttctgatcggtttttgtttcctgcttaccatatgattgtaaattgttttatgtattaatcagttaatgctaattatttttgctgatgtcatatgttaaagagctataaattccaacaaccaactggtgtgtaaaaataatttaaaatttcctttactgaaaggtatttcccatttttgtggggaaaagaagccaaatttattactttgtgttggggtttttaaaatattaagaaatgtctaagttattgtttgcaaaacaataaatatgattttaaattctcaaaaaaa

SEQ ID NO: 354110 - DNA, 644 bp, Homo Sapiens
  misc_feature (22)..(22): n is a, c, g, or t
  misc_feature (35)..(35): n is a, c, g, or t
  misc_feature (38)..(38): n is a, c, g, or t
  misc_feature (43)..(43): n is a, c, g, or t
  misc_feature (50)..(50): n is a, c, g, or t
  misc_feature (56)..(56): n is a, c, g, or t
  misc_feature (73)..(73): n is a, c, g, or t
  misc_feature (175)..(175): n is a, c, g, or t
  misc_feature (274)..(274): n is a, c, g, or t
  misc_feature (287)..(287): n is a, c, g, or t
gcttaaaagttcgaattcctcnagcactgtggccnacnggttncattccntgtttncagcatgctgtgtcaancactcagtattttgaagtattcaattattggtaggctcttcctattcccaaaatgtgctgaattgtctattgatggattttcagatcttttcatgagactgnaaatgtagctgggtggcacctacctaggttgctacgtagtgagtagctttctcttgggtatagtaagcctcagcagctttcacttttatctactttacntgtggaaataaancagtcattttgttctgaaagaataagatagctttctgtagagaaggaattcctacctctaaaagctgccttgagaactcagaactggcagttttctgaggtgatttttaaatttcagtattagggagagtccagcatttgctgacacagattctacataactaatgtatgatagcaaatgcaaaactattataatgtggtgtatcttgcgcatacacaggttagaacaagtagactctggcagcagatctccagagacccaagtttaggttctcatagtgtatttgaagtagttatactcctggcttaagtagtttagtgcctgggagaatccattactgaaaagcatttaacttaa

SEQ ID NO: 354111 - DNA, 1101 bp, Homo Sapiens
  misc_feature (715)..(730): n is a, c, g, or t
  misc_feature (854)..(869): n is a, c, g, or t
gaattcccgggatgggtgacctccagcgagtcactggagcctgcagaatctcatttgagaagttggataagatctctgcccccaccgcccaggccccaggggagctgtgcagactgactctcttctgaagagtcccttggaaatgttttggcggtggcaagagaaagagctttgcttgttcttcagaaagacttgccggagtcagacactgaggactccagagcatctggaggaagcccaagggccacctcccctgagaagccttccttcgccagcctgaataaaatggacctctatacacacacctgtctcagtggtggcagtggcaggccatctggagcggctgctgctgtcacaccagctgcagcagggaggcacggctggggctgcatgttccatggaactggcaggagctggggacaggcaggagcctctcccattctaagtcggggtggcagctccctgcatgccgctgcagctgcccaagccacggctgtggacccaggcatccctgtgctctcggagcctgggagcaggtgggaaccccaccctcccaggtgcagctgcagccgcccaaaccacagctgcagaccggggcctcccgctccacggagcaggctggagtcctgccccacatcccacatagctgcaccggccctaactgccactgcggacccacgcatctctgcccctccttggggggccctgtcaaggnnnnnnnnnnnnnnnnagggcctgcgcaatgccttggcgctaacggcctggcctttttcctcgcctgttccgcaccctgctttccaactattgcgcgccaacgattgtgtgcgccccgccttgggcgcttcgcctttatnnnnnnnnnnnnnnnntgagcgccgcctccgtcttggcctctcggccccgtattcccccttatcgccgctcgccgtgccccgggctctgtttgctataattttttccccgccctacacgccggtgctgctcctttatgctcgccgcggaatgccacgccccccgcccgcttgtcgatatcccctcacccctccgcgatcgctacgttgtgcttctactccccgtgcgcttcgcactctccccgccccg

SEQ ID NO: 354112 - DNA, 841 bp, Homo Sapiens
  misc_feature (21)..(21): n is a, c, g, or t
  misc_feature (45)..(45): n is a, c, g, or t
  misc_feature (55)..(55): n is a, c, g, or t
cccaagacaggggtacccggnaaccccaagacaggggtacccggnaacgcgcgtnaggaggaggccgctgctaggggaatacccccagccggggtcgtctcgcgggcagtggtggtcagaaggcttttctagcctggatgccacacccaccgggacactcccatggcgccggctgtttcgtttttgctgcccagctatgtcgcggctgcggcccagtcgagcgctcccatgttgtcacctggcgctgtggagccgcgggtggagtcgtagctttccgagccaccgccctctctagacatcaggttgaaggagggaattgtcaaccagccgcttgccacggaaccggcctcccccttttaaatgaagcacacaacttccgagcatttcgcggagacccttgaagaggaggcccaggtcccggtggggctggaccctgcccgccacccgcgcttcgtgtggtcgctcccccaaccaggcgggaccggagcctcctatcaaaccggacgatgacagacagactcttttaaccttagatgagaaatggacaaaatggagcttgtgattctgccctaactttcgggagtggcctattctgtggcttcaacctagaaatttcttttccttgtcatgtgtaggactttactcctttctgaaggggcaggatgggaaggggattaacctgtcctagagacagactgaggagcactaaagaagagcagctcatgtccattcaccccgggttaacaatgcagtttttaccctaatgattctccagtggggcagggccaggaatgacgtccttatggcatgattccaaactttaagttatgagaaatgtcca

SEQ ID NO: 354113 - DNA, 434 bp, Homo Sapiens
gtagagataggggtcttgctatgttgcccaggctgatttcaaactcctggtctcaagcgatcttcgtgcctcgcccttccaaagtactggcattaccggcataagtcactgtgcctgccccatcccctgaaacttctaacgctagagacttctaaggtgagcaggtggcccctgggacaggaatgcaataataaaatagaaaagacggcaaactctgtatactctttttgggccttgggagggtgagcctagcaccaggttgtgctggtgggggctggagggaggccagtgaaggcaccaggtaagactggacaggagggcttctcccaggaggtctcctgatcagtatcttcctctttcatcctacattgtgtgaccttgagtgactctttccctctctgtgcctcgatatttatttccccacatgtatgaac

SEQ ID NO: 354114 - DNA, 258 bp, Homo Sapiens
atgagccaccacgcccggcacaaaatttaaaaatttaaaggtcattatgcttctggtatcatcttggcaacagctttcagaaagtctacacaagttgtgttcacagattctgccttggtttgtgtgttgcttgacccctacaaagaaatcctaaaaatcatttgggcgtctcctccttatggagccagtgttgcttttcattcagtggctggtgcttccttaaatattagtcattctgaggttatgcaaatatctgtg

SEQ ID NO: 354115 - DNA, 1407 bp, Homo Sapiens
cggggtcctcttgtagcggccacgttgatctgcgatacgcgtgtttgcccagtgagtggccccggactgctacgtgggactgcggtgaatgaacccagaaggtggagaggaaccgttctcggtgcacagaggcggctctgcagcccggtgagggcgcctgctgctcccgggcagtgctttccccaagtagtccgatggctgcggctgcgccgaagcgccctactcaggagcaacttggcgaggttcagactcttggagccagaagctacatgacccctaaacgggcacagtgacttttgaagacgtggctgtgaaatttacccaggaggaatggaatctccttagtgaggctcagagatgcctgtaccgtgatgtgactctggagaacctggcacttatgtcctccctggcagggcactgtgacctttgaagatgtggctgtgaacttttcccaggaggagtggtgtcttcttagtgaggctcagaggtgcttgtaccgtgatgtgatgctagagaacctggctctcatatcctcgctgggttgttggtgtggatcaaaagatgaggaggcaccttgtaagcagagaatttctgtacaaagagagtctcagagcaggactcctagggcaggtgtttctcctaagaaggctcacccctgtgaaatgtgtggcctcatcttggaggatgtttttcactttgctgaccaccaggaaactcatcacaagcagaagctgaacaggagtggagcatgtggaaaaaacttggatgacactgcataccttcatcagcaccagaagcagcatattggagagaaattctacagaaagagtgtcagagaagcatcgtttgtaaagaaacgtaagctcagggtgtcacaggagccatttgtcttccgcgagtttgggaaggacgttctgcccagttcaggattgtgccaagaagaagctgctgtagagaagacagacagtgaaactatgcatggcccaccctttcaggagggaaaaactaattacagttgtggaaaacgcacaaaagccttcagcaccaaacactcagttattccacaccagaaacttttcactagagatggatgttatgtgtgcagtgatggtggaaaatcctttagcagatatgtcaagcttcagtaatcatcagcgagatcacactgcaaaaggaccttatgattgtggagagtgtgggaaatcttatagtcaaaagagcagccttattaaacatcagcgagtccacactggagaagggccttatgagtgtagagaatgtgggaaatcttttggtcaaaagggtaacctcattcaacatcagcaaggtcacactggagagagagcttatccctgtgaggagtgcgggaaatcttttagtcagaagggcagccttattagccatcag

SEQ ID NO: 354116 - DNA, 656 bp, Homo Sapiens
  misc_feature (196)..(262): n is a, c, g, or t
ggcacgaggagcagttgtcctccgctgcacagaggctactctggagctctgtgacggcgcccagcgtgacccactcctgggccaggatacggaccgtcgtgcccatatctcctggctggtcgccctatcctcccgactctgcttaaaaccacgtggttcgatggctgccgcggctacgctgaggctctccgctcannnnnnnnnnnnnnnnnnnnnnnnnnnnnnnnnnnnnnnnnnnnnnnnnnnnnnnnnnnnnnnnnnnacaggagatattttgatacagggcacagtgacttttgaagatgtggctgtgaactttacctgggaggaatggaatctccttagtgaggctcagagatgcctgtaccgtgatgtgacgctggagaacctggcacttatatcctccctggatcctgcactggatggatcagcggacaacacacagaccggtaatctgggtcaatcagttctgccatcccacccagaacagaaaacagcatgaaaaactcactttaaccccctatgaatccatctccaaccagactgatcagcactccccacttcccaagcccctacccgccaaattttgaaaactctgatcccagaatgctcagggagactgatttgaataataaaactcctgtctcccgaacagc

SEQ ID NO: 354117 - DNA, 438 bp, Homo Sapiens
cagttgtcctccgctgcacagaggctactctggagctctgtgacggcgcccagcgtgacccactcctgggccaggatacggaccgtcgtgcccatatctcctggctggtcgccctatcctcccgactctgcttaaaaccacgtggttcgatggctgccgcggctacgctgaggctctccgctcagatcctgcactggatggatcagcggacaacacacagaccggtaatctgggtcaatcagttctgccatcccacccagaacagaaaacagcatgaaaaactcactttaaccccctatgaatccatctccaaccagactgatcagcactccccacttcccaagcccctacccgccaaattttgaaaactctgatcccagaatgctcagggagactgatttgaataataaaactcctgtctcccgaacagcaaaaaaa

SEQ ID NO: 354118 - DNA, 948 bp, Homo Sapiens
gtagcgaggcctgggtggcgaattcggcacgagggaaatcttttagtcagaagggcagccttattagccatcagcttgttcacactggagaagggccttatgagtgtagagaatgtgggaaatcttttggtcaaaagggtaacctcattcaacatcagcaaggtcacactggagagagagcttatcactgtggggaatgtgggaaatcttttcgtcagaagttctgctttattaaccatcagcgtgttcacactggagaaaggccttacaagtgtggagaatgtgggaaatcttttggtcaaaagggcaacctcgttcaccatcagcgaggtcatactggagaaaggccctatgagtgcaaggaatgtgggaaatcatttaggtacagatcccacctcactgaacaccagagacttcacactggggaaagaccttacaattgtagggaatgtgggaaattatttaacaggaagtatcatcttctggttcatgagagagttcacactggagaaaggccatatgcgtgtgaggtatgtgggaaattatttggcaataagcacagcgtgactatacatcagaggattcacactggagaaaggccgtatgaatgcagtgaatgtgggaaatcatttctttccagctctgcgcttcatgttcataaaagagttcattctggacaaaagccttataagtgcagtgaatgtggaaaatccttttctgaatgttccagtctcattaaacacaggagaattcacactggagaaaggccttatgaatgcaccaaatgtggaaaaacatttcagcgaagctctaccctccttcatcatcagagttcacacaggagaaaggccttatgagtgcagtgaatatgggaaatcgtttgctgaagcatcccgtctcgttaaacacaggagagttcatactggagaaaggccttatgagtgctgt

SEQ ID NO: 354119 - DNA, 906 bp, Homo Sapiens
taccgggatatgtcgacccacgccgtcgccggacgccgcgagctgacccgctctgctgttgggcgatgtatttttaattgcacgaaaaatttattaaattggaaaatcttgcgtttttcaatggcgctggccccgggtcagcgggcgattttctctgcatcaagatgggctttgccgtttccagtagtgggcaccagtggtggcctgattgtcagtcttctcccggcatttttaaggccatggagccgagtcgctgcttgtaggcgaataccctacagagcggcttggctttttaaattactgttattattttgggcagagaacagtcggtctggtgcaccccgtcctcgctgcagaagaggctgcgagtccgaggtgggtctctcggaaggtgaaattccttctggggtgagcgagccccggccccgcgcgcagtccagcggccccgcgtgtgtgccctcgccctgccggagccgggaacaatggaggctgtgattgacgaaggaatgcagcgcgctcggaggcctcttccagaccatcatcagcgacatgaaggggagctatccaggtatgggaagatttcataaacaaagcaggaaagctgcagtcccagcttcggacaacagtagtagcagcagctgccttcttggacgcctttcagaaagtggccgacatggccaccaacacacgtggtgggaccaggaagattggatctgctctcaccaggatgtgcatgaggcacagaagcattgaagccaagctgaggcagttttcgagcgctttaattggatcgtctgataaacccacttcaagaacttacaagaagccttcgaccaagcgtgcagttctccacagtgggtgcctgtctcctgggtttactaagcttgtagaatgggggaacccact

SEQ ID NO: 354120 - DNA, 851 bp, Homo Sapiens
ttgcgatgttaggaagctaccgaggccacatgttcggcacctaaatgtgaaacagtgcaccatatccataaacacaacaagattgccatccttgacattgagccccagaccctgaaaatcgttcggacagcagaactttcgcctttcattgtgttcattgcacctactgaccagggcactcagacagaagccctgcagcagctgcagaaggactctgaggccatccgcagccagtacgctcactactttgacctctcactggtcaataatggtgttgatgaaacccttaagaaattacaagaagccttcgaccaagcgtgcagttctccacagtgggtgcctgtctcctgggtttactaagcttgtagaatgggggaacccactgtatgcccctctccagcatttggaattccacccgccttgctttaagacaaacagggctgctccaactagttttgtgtcagcttccagctctctgcagctatcctaattcagccagtaaggttcagtcttcttgctcaggctcctgaagggttgattctcctgatagatggggccccactgatctggatttgaaaaggatttctagaaattgggggtaagaagtactaccaaaatgtaactgctaatcaagggtgatgcacagcaaaagcaatggaccccatccctctaaagcctgccctcctttgccttcaactgtatatgctgggtatttcatttgtctttttattttggagaaagcgtttttaactgcaactttctataatgccaaaatgacacatctgtgcaatagaatgatgtctgctctagggaaaccttcaaaagcaataaaaatgctgtgttgaaatgcc

SEQ ID NO: 354121 - DNA, 252 bp, Homo Sapiens
cacacggtagatttcataaacaaagcaggaaagctgcagtcccagcttcggacaacagtagtagcagcagctgccttcttggacgcctttcagaaagtggctgacatggccatcaacacacgtggtaagcagatggaggctgactcccagtgttaactgcattctgcacgtggactcttccccttgggtggctgcacaagaagatgcagcttaagttatcagagctgagctgactcgtattttcccattttt

SEQ ID NO: 354122 - DNA, 435 bp, Homo Sapiens
ggcctgctcccaactagttttgtggtcaagcttcccaagctcctctgcagcctatccctaatatcagcccagtaaggttcaagtccttcttgcctcaggctcctgaagggttgattctcctgatagatggggccccactgatctggatttgaaaaggatttctagaaattgggggtaagaagtactaccaaaatgtaactgctaatcaagggtgatgcacagcaaaagcaatggaccccatccctctaaagcctgccctcctttgccttcaactgtatatgctgggtatttcatttgtctttttattttggagaaagcgtttttaactgcaactttctataatgccaaaatgacacatctgtgcaatagaatgatgtctgctctagggaaaccttcaaaagcaataaaaatgctgtgttgaaatgccaaaaaaaa

SEQ ID NO: 354123 - DNA, 285 bp, Homo Sapiens
gttgccttgggatgccagtaatagcatttatttctggtctagaaagaatctgttctgttactaaacaattttaaaattgtactttgggatcactcagctgatcccaacagtaaagttactgcccccctttcaaaatagtctcacattccatacaattagcctaaacttatacctcaagttcaaagtatactactttagaccttaatgtggatgagcactaaatataaggcaatagctacatatacacttccattttaaacaaacattttgagaatgatagtgatt

SEQ ID NO: 354124 - DNA, 681 bp, Homo Sapiens
  misc_feature (649)..(649): n is a, c, g, or t
tttctcaccctccatttctgaaaaggtgaactatggggcttctgggaacaggaaactcttgaacgactagattcttggctcatccaactgattgtgggtcaagtccctggcttggggccttatgtttgatactctctcatgtcaaatgtttgaactttgggcatgtgccctatggaagcttagtcacaagaggcactagctaatctacagattcctatccaatgccacattttaataaatcaccggaagcgggagaatgtagctcttatcttcggtgacctctgcatgttaactctgtttctgtgttaaaggcaatgcaggagtgtggattaagcaccagactgtattctcattcaaccatgaccgtgcgcattaaaatcagtttgtaagggagacactgactccagccaagaaacctgagccccttttttttaggttcatattcaaagtcaaatgaactggatgaaagtcagtaccaatggctgtgctcattaaatagacctgattctttgtttccctcgtcaattaaacaaaggccaagaaagagagaagatgagaggggaagggtgggatttgcgttgacaggatttttttaaaaggtgtttgccattttgggaattaaagtcccctacagttagggtcttaactngaaggggatcggtgctagggctttttgggtcc

SEQ ID NO: 354125 - DNA, 337 bp, Homo Sapiens
  misc_feature (20)..(20): n is a, c, g, or t
cctcagccttcgcgtgagtnactttgtggctgtgcccggtgctgacgtgcacgtggccgcgctctgcccgcctcctgtctgcactgctcgccccctttgggccctggcctcattggtctccctgcactcacagttggttgcttttcgtgactgattttgggttgggaaatcagataagtaactgttcattcgtagcccctcctgaacactcctgggaattaacaaccctgaccttaatacttggactctccccagccactgccttcagggcagctgatgtcccccagttgggttttgccagacccaaagtgatgatcgcatatctgttccctcaagt

SEQ ID NO: 354126 - DNA, 906 bp, Homo Sapiens
tccaacctgggccctgatccttaactccccttgtggtacagactggtgttgccggccacagcaaccagaagaccctggaaggcatcagtctgaagcgaccagaaagggcagtcagtgcccagaagaaggtgctggcgggattacgcctcaaggacattcgagcggggggccaggggtgccggttgattggggtctgccggcaactccgagcggcccacaccctgcactagggccagcacgcagggcagcacgggcactcaggccttgacccaggaagaatgaccgtaagaagcgaggtggcaggtggctcaagaagggcaggaaagtgacattcgaggcacagcatgccagtgccagcacaaaggccagtgctaagaaggccacagaatgcaactgtcctgccactggggccacatggtgccacagagaggccagcagggctgtgcccaccatgcccagcacctgcaccacccggatggggacctgctcgtcctttcctggggccagcctcctccagagggtcaccaccagcagacccaggttccccagagccacaagcacagagacgtaagaggggaggctccaaccctctggaagctctttgaccaccacaggtagctccacccagatcccattgaccgcagcccaggagcccatgccgaagagagccaccagcaggtgggtcagcaccggacgggcgggcgtgggtgctgccattcagcccaagctgggcccttccaggtcagggcaaaggtcacagccagttcttttcccacctagggccagacacgctttggctctcctgggaagtgaagacttcttctagccgtggcggttccgggcccgcccccggcacggacgcgtgggtcgacgatatgcccgaaaacttccgggacacggtaccag

SEQ ID NO: 354127 - DNA, 2728 bp, Homo Sapiens
  misc_feature (2196)..(2215): n is a, c, g, or t
  misc_feature (2224)..(2262): n is a, c, g, or t
  misc_feature (2309)..(2381): n is a, c, g, or t
  misc_feature (2420)..(2428): n is a, c, g, or t
  misc_feature (2435)..(2567): n is a, c, g, or t
  misc_feature (2609)..(2609): n is a, c, g, or t
cggtccggaattcccgggatgcccggaaccgccacgggtgagtcgggtcgtggctgctgccgggtcctgcgcgctccggactgaggtggcgtccctgggccggacggcggtgtcccggcgtggcgggaagccggcactggagcgggagcgcactgggcgcgggaccgggaggcgcagggaccggacggctcccgagtcgcccacctgacggtaccgagagggcggcgcccctccgagcagagccgtcccggccactcccctgggatctgacttggctcttgcggtcgcgggcaccgtgaagccctggggtgtgcgtggctcctcctggtaggcgccctttcccggcgtccggcttggggtggtggtggcgttgactccagccccgcctctccctggagaggagggctccactcgctccttcggcctcctcccctggggccgcagcgactcgggccggcttcctgcttccctgcctgccggcggtcccgctggctagaagaagtcttcacttcccaggagagccaaagcgtgtctggccctaggtgggaaaagaactggctgtgacctttgccctgacctggaagggcccagccttgggctgaatggcagcacccacgcccgcccgtccggtgctgacccacctgctggtggctctcttcggcatgggctcctgggctgcggtcaatgggatctgggtggagctacctgtggtggtcaaagagcttccagagggttggagcctcccctcttacgtctctgtgcttgtggctctggggaacctgggtctgctggtggtgaccctctggaggaggctggccccaggaaaggacgagcaggtccccatccgggtggtgcaggtgctgggcatggtgggcacagccctgctggcctctctgtggcaccatgtggccccagtggcaggacagttgcattctgtggccttcttagcactggcctttgtgctggcactggcatgctgtgcctcgaatgtcactttcctgcccttcttgagccacctgccacctcgcttcttacggtcattcttcctgggtcaaggcctgagtgccctgctgccctgcgtgctggccctagtgcagggtgtgggccgcctcgagtgcccgccagcccccatcaacggcacccctggccccccgctcgacttccttgagcgttttcccgccagcaccttcttctgggcactgactgcccttctggtcgcttcagctgctgccttccagggtcttctgctgctgttgccgccaccaccatctgtacccacaggggagttaggatcaggcctccaggtgggagccccaggagcagaggaagaggtggaagagtcctcaccactgcaagagccaccaagccaggcagcaggcaccacccctggtccagaccctaaggcctatcagcttctatcagcccgcagtgcctgcctgctgggcctgttggccgccaccaacgcgctgaccaatggcgtgctgcctgccgtgcagagcttttcctgcttaccctacgggcgtctggcctaccacctggctgtggtgctgggcagtgctgccaatcccctggcctgcttcctggccatgggtgtgctgtgcaggtccttggcagggctgggcggcctctctctgctgggcgtgttctgtgggggctacctgatggcgctggcagtcctgagcccctgcccgcccctggtgggcacctcggcgggggtggtcctcgtggtgctgtcgtgggtgctgtgtcttggcgtgttctcctacgtgaaggtggcagccagctccctgctgcatggcgggggccggccggcattgctggcagccggcgtggccatccaggtgggctctctgctcggcgctgttgctatgttccccccgaccagcatctatcacgtgttccacagcagaaaggactgtgcagacccctgtgactcctgagcctgggcaggtggggaccccgctccccaacacctgtctttccctcaatgctgccaccatgcctgagtgcctgcagcccaggaggcccgcacaccggtacactcgtggacacctacacactccataggagatcctggctttccagggtgggcaagggcaaggagcaggcttggagccagggaccagtgggggctgtagggtaagcccctgagcctgggacctacatgtggtttgcgtaataaaacatttgtatttnnnnnnnnnnnnnnnnnnnnctcgaggcnnnnnnnnnnnnnnnnnnnnnnnnnnnnnnnnnnnnnnncatggtcatagctgtttcctgacccagctttcttgtacaaagtggtnnnnnnnnnnnnnnnnnnnnnnnnnnnnnnnnnnnnnnnnnnnnnnnnnnnnnnnnnnnnnnnnnnnnnnnnntgcagtacccgggaaatttacccgcctaatgagcgggcnnnnnnnnngtgatcnnnnnnnnnnnnnnnnnnnnnnnnnnnnnnnnnnnnnnnnnnnnnnnnnnnnnnnnnnnnnnnnnnnnnnnnnnnnnnnnnnnnnnnnnnnnnnnnnnnnnnnnnnnnnnnnnnnnnnnnnnnnnnnnnnnnnctccaggcagagcggcagataccaaatactgggtcttcttangggtaaccggtaagttagggccaaccacttccaagaacttctggtagcaaccgccctacataacctcggcttctgctaaatccctggttacccagggggctgcctgtccaattgggcaa

SEQ ID NO: 354128 - DNA, 1528 bp, Homo Sapiens
  misc_feature (97)..(97): n is a, c, g, or t
  misc_feature (106)..(106): n is a, c, g, or t
  misc_feature (112)..(112): n is a, c, g, or t
  misc_feature (138)..(138): n is a, c, g, or t
  misc_feature (203)..(203): n is a, c, g, or t
ttgggatagaggacagccgtgcggacagtaggggtggtagtggtgaggaccgggggtttacgaggtgcgggggggtgcgccgggcgtcggaacaaantgcgtcccntctggnccccaacgtttggggcggggaactgngctgccccgcccgtatcgcccctcggtcgcattttgttgggggttttgggggcggtgtaaggggnggtttgagagaacggcgggggggcaaagattttatgtttgtgtttggagcggttttccaccagcatgtgttagagaaatgtcactgcgatggcgggtcggtatggcccagggattgcggccccccgagaggctccggggatatgaacgcccgcacggcgtctccccaaaggtctaccacttgttggggcaaaaaacggcctcggtcgggaggtgaggtccccccgaaaagacaagactggtctcgaaagggtaagtatgtgatgtgtcacgcccattattttctttttgtggctcagttgtgcacaaaattttcccccacaaaggacgaaggttcttgtttgttagtaccaaaatgacccccgcggcggggcccgagattttgatatgtgaaggcgcaaattttttatgagaagcgatgggagggagttttgatggtagcgtgatacctctctaaaggtgggcccaggggaacagggtacggttgcgccctccacagccgcgatgaggtaagcgaaaggtttcgagcacagccaattccccttgggccctctgacccccataagaaggtgcagtaagcccccgccactccgggcagtttgtggccaacgcaaaaaaatgtgctcccagacctatcccaaatgtgggggtgggagggaacggccccaattgagaacccaccagtttagccctttcggggaagacaggctctgtggtatccacttttccaggatcgcttcataaaaccctcaccacatcaagagatgctatgatgtctatttttgcgactagggaaaatgagggtaggcaaacccagaggctccaggaaagcagcgatcttgtctgtaagctcaccactgcataccagcacctagcacaatgcctagcacgaggtaaatttgctcaataaaatggaggttggtcgaataagatacaaggaagtcaagcaattgtcctagataagtaattgtccttacatagtacgtggtctgagtctaacacatatagctcagagtccagacttaaatttactccctttcctcacaattagtggtggtcccatgacccaaggtccgggtaccactcaaacaggaatcctgatatccacgtttcctcattctccacagtgctgattcctaggcaattcctcagctcccagttcccacgggcaagctcctggagtccccactcccgcccctagaccccagttgtcgggaatccaagttccacaccctcagcgggtgacatcccgggaattccggacccggtaccattcccgtggtctttatttttaagggagtagactaaatagaatactgatataata

SEQ ID NO: 354129 - DNA, 2120 bp, Homo Sapiens
atccgtttgttctggaatgaagttcggccttttgactggccatgtaaaaacaaccgacggctgcagagaattcctgtggtcaaaactggaacccattaaggtggacacttccagactggagcacctgtttgagtctaaatccaaggaactgtctgtctcaaagaaaactgctgcagatggaaaaaggcaagagatcattgttctggattccaagaggagtaatgccatcaatattggtctgacggtgctgccccctccaaggacgattaagatcgccattttgaattttgatgagtatgccttaaacaaagaaggaatcgagaaaattctaacgatgattcccaccgatgaggagaagcagaaaatccaggaagctcagctggccaaccctgaaatccccctgggcagtgcagagcagttcctcctcaccctgtcctccatcagcgagctctctgcacgacttcacctctgggcattcaaaatggattatgaaactacagaaaaggaagtagcagaaccactcctggacctgaaggaaggaatagaccagttggagaacaataaaaccttgggctttatcctgtctactctcttagccattgggaactttctaaatggaactaatgccaaagcgtttgagttaagctacctcgagaaggttccagaagtcaaagacacagtgcacaagcagtcgcttctccaccatgtgtgcaccatggtggtagaaaacttcccagacagctccgatctgtactcggagatcggggccatcaccaggtcagccaaggttgactttgatcaacttcaggataatttatgtcagatggagagaagatgcaaagcttcatgggatcacctcaaggcaattgcaaaacatgaaatgaaaccagttttaaaacaacggatgtcagagttcctgaaagactgtgcagagcgaattataattttaaagattgtccatagaaggataatcaacagattccactcctttttactctttatgggccatccaccttatgcaattcgggaagtgaacataaacaaattctgcaggattatttagtgaaattgcacctagagtatcgcacaaccagggaaagggttttgcagcagaaacagaaacgggccaaccacagagagagaaataagaccagagggaagatgatcaccgattctggcaagttctccggcagttctccggcgcccccaagccagccgcagggtctgagctatgcggaggacgcggctgagcacgagaacatgaaggctgtgctgaaaacctcgtccccctccgtggaggacgccacccccgcgctgggcgtccgcacacgcagccgagcaagccgaggatccactagttcctggactatgggaactgatgactcgcccaatgtcacagatgatgcagctgatgagatcatggaccgcatcgtcaagtcagccacccaagtgcccagtcagcgagtggtgccgagggagaggaaacgatcccgggccaaccggaaatctttgcgaagaaccctgaagagcggcctgaccccagaagaagccagagccctgggcttggttggcacctcggagttgcagctgtgacactcataggttactcccaggagtgtgctgagcagaaggcaagctcttgctggatgaaacccctccaggtggggttggggagacttgatattcacatccaacagtttgaaaagggagagctcaattcccagcgtcaccccatggcttgtgttgcctgctacgcattgacttggatctccaggagtcccctgcacataccttctccatcgtgtcagctgtgtttctcttgattccgtgacacccggtttattagttcaaaagtgtgacaccttttctgggcaaggaacagcccctttaaggagcaaatcacttctgtcacagttattatggtaatatgaggcaatctgattagcttcacagactgagtctccacaacaccaaaatatccagatgtaaaccccaaacttgtacacaaaagaaagcacagattgtttacctgttgtggattttagatgtaacaaatgtttatacaaatacatacatgtacaccatgtttcaaatactaaataaatagagtttaatgccag

SEQ ID NO: 354130 - DNA, 626 bp, Homo Sapiens; identical to SEQ ID NO: 252397

SEQ ID NO: 354131 - DNA, 448 bp, Homo Sapiens
tgttatgcaagtgtcgggattacaggtgtgagctactccacccagcccacagaaggcttttcatacttgcttagcagcctcctgcatcctacgccaacacctggcactcacaacctgtgggctgctctcatccatgatcatctctccccaggcctgctgttcctcgagaaaggaagttgtaatgggcagaattctagtacagcccccaagagaaccactcccttatatctgctccctgtatcatctcttcttgagtgtgtgcagagcttgtgatttggccaaggggaaggaattttgcaaatgtgattatggtcacacttgctttgttaagcacatttgctcagctgactttgagttcatccaaaggaggatgatcttaggtgggccagacctaatcaggtgagtcttttaaagatgaagtttcagagattcaacccttagcctccaa

SEQ ID NO: 354132 - DNA, 1064 bp, Homo Sapiens
cctgggtggcgaattcggcacgagggagaggaggccctgaggagggagtgcgtgggggccaccctccagccatccagagcctcatcaacctgctggcagacaacaggtacctcactgctgaagagactgacaagatcatcaactacctgcgagagcggaaggagcggctgatgaggagcagcaccgactctctgcctggtgagctacgtggcagggccgaggcccgatttcccgccaaccactcggggcgacctcgggtgcctcgctgaagacacagccaagctcccaaccgctccagagcggccaagtgctcccctctgctacacccactccatctgcaccccccacctcccagcaagagcttcaggccaaaatcctcagcctcttcaatagtggcacagtgacggccaatagcagctctgcatccccctcggttgctgccggaaacaccccaaaccagaatttttccacagcagcaaacagccagcctcaacaaagatcacaggcttctggcaatcagcctccaagcattttgggacagggaggatctgctcagaacatgggccccagacctggggctccttcccaagggctttttggccagccttccagtcgcctggcacctgctagcaacatgactagccagaggcctgtgtcttccacaggtatcaactttgacaatccaagtgtacagaaagctctggataccctgaatccagagtggccctgctctctccccacctggttagccagaccacacgcacagatgggggcagcccacaggccccccatggggatcttaaccagaggcatttactggaagctaaaactctttcaacttcttccccaagtccccttcattcccctgggcctccctcccactttacttggttctaaaataaaacctggtttggaaaggatggtttctcctgccgcttccccaggcccgggaatccagaggggccttccattttttcaaccaacctgggctcctcccttttctggccccaaagggcttggggtggccttatttccctttacacaagttttttaacctggccatt

SEQ ID NO: 354133 - DNA, 983 bp, Homo Sapiens
ggcgaattcggcacgagggagaggaggccctgaggagggagtgcgtgggggccaccctccagccatccagagcctcatcaacctgctggcagacaacaggtacctcactgctgaagagactgacaagatcatcaactacctgcgagagcggaaggagcggctgatgaggagcagcaccgactctctgcctggtgagctacgtggcagggccgaggcccgatttcccgccaaccactcggggcgacctcgggtgcctcgctgaagacacagccaagctcccaaccgctccagagcggccaagtgctcccctctgctacacccactccatctgcaccccccacctcccagcaagagcttcaggccaaaatcctcagcctcttcaatagtggcaccgtgacggccaatagcagctctgcatccccctcggttgctgccggaaacaccccaaaccagaatttttccacagcagcaaacagccagcctcaacaaagatcacaggcttctggcaatcagcctccaagcattttgggacagggaggatctgctcagaacatgggccccagacctggggctccttcccaagggctttttggccagccttccagtcgcctggcacctgctagcaacatgactagccagaggcctgtgtcttccacaggtatcaactttgacaatccaagtgtacagaaggctctggataccctgatccagagtggccctgctctctcccacctggttagccagaccacagcacagatggggcagccacaggcccccatgggatcttaccagaagcattactgaagctaaatctttcaactctccccagtcccctcatcccctggcctcctcccacttacttgttctaaataaagctgtttggaggatgttctctgcgctcccaggcccggcatcgagtgtcatcaatttctaccacctgctctctcttctgcccaaggctgtgttgcttattccttacaaag

SEQ ID NO: 354134 - DNA, 962 bp, Homo Sapiens
  misc_feature (886)..(886): n is a, c, g, or t
  misc_feature (895)..(895): n is a, c, g, or t
  misc_feature (923)..(923): n is a, c, g, or t
  misc_feature (952)..(952): n is a, c, g, or t
gatagaagagcggggtcggggccggctgaccaggaacctgggcgagcagcggcgggggcccgagggattctgaaggaagatttccattaggtaatttgtttaatcagtgcaagcgaaattaagggaaaatggatgtagaaaatgagcagatactgaatgtaaaccctgcagatcctgataacttaagtgactctctcttttccggtgatgaagaaaatgctgggactgaggaagtaaagaatgaaataaatggaaattggatttcagcatcctccattaacgaagctagaattaatgccaaggcaaaaaggcgactaaggaaaaactcatcccgggactctggcagaggcgattcggtcagcgacagtgggagtgacgcccttagaagtggattaactgtgccaaccagtccaaagggaaggttgctggataggcgatccagatctgggaacacggaaggggactaccaaagaaaggtggtgcaggaggcaaaggtgtctggggtacacctggacaggtgtatgatgtggaggaggtggatgtgaaagatcctaactatgatgatgaccaggagaactgtgtttatgaaactgtagttttgcctttggatgaaagggcatttgagaagactttaacaccaatcatacaggaatattttgagcatggagatactaatgaagttgcggaaatgttaagagatttaaatcttggtgaaatgaaaagtggagtaccagtgttggcagtatccttagcattggaggggaaggctagtcatagagagatgacatctaagcttctttctgacctttgtgggacagtaatgagcacaactgatgtggaaaatcatttgataaattgttgaagatctactgaatagcactggatntctagagcncacagttggtgggcagtttattctaaantgttgagatggatttatgtatactatatnatagtaaaag

SEQ ID NO: 354135 - DNA, 1162 bp, Homo Sapiens
  misc_feature (1069)..(1069): n is a, c, g, or t
  misc_feature (1074)..(1074): n is a, c, g, or t
  misc_feature (1084)..(1084): n is a, c, g, or t
  misc_feature (1088)..(1089): n is a, c, g, or t
  misc_feature (1095)..(1095): n is a, c, g, or t
  misc_feature (1102)..(1103): n is a, c, g, or t
  misc_feature (1112)..(1112): n is a, c, g, or t
  misc_feature (1120)..(1120): n is a, c, g, or t
  misc_feature (1131)..(1131): n is a, c, g, or t
  misc_feature (1134)..(1134): n is a, c, g, or t
  misc_feature (1145)..(1145): n is a, c, g, or t
  misc_feature (1151)..(1151): n is a, c, g, or t
  misc_feature (1159)..(1159): n is a, c, g, or t
atcaggccaaatcggccgagctcgaattcgtcgagagcggagtgactctccgaggcggcggcagagacagaagagcggggtcggggccggctgaccaggaacctgggcgagcagcggcgggggccagagggattctgaaggaagatttccattaggtaatttgtttaatcagtgcaagcgaaattaagggaaaatggatgtagaaaatgagcagatactgaatgtaaaccctgcagatcctgataacttaagtgactctctcttttccggtgatgaagaaaatgctgggactgaggaagtaaagaatgaaataaatggaaattggatttcagcatcctccattaacgaagctagaattaatgccaaggcaaaaaggcgactaaggaaaaactcatcccgggactctggcagaggcgattcggtcagcgacagtgggagtgacgcccttagaagtggattaactgtgccaaccagtccaaagggaaggttgctggataggcgatccagatctgggaaaggaaggggactaccaaagaaaggtggtgcaggaggcaaaggtgtctggggtacacctggacaggtgtatgatgtggaggaggtggatgtgaaagatcctaactatgatgatgaccaggagaactgtgtttatgaaactgtagttttgcctttggatgaaagggcatttgagaagactttaacaccaatcatacaggaatattttgagcatggagatactaatgaagttgcggaaatgttaagagatttaaatcttggtgaaatgaaaagtggagtaccagtgttggcagtatccttagcattggaggggaaggctagtcatagagagatgacatctaagcttctttctgacctttgtgggacagtaatgagcacaactgatgtggaaaaatcatttgataaattgttgaaagatctacctgaattagcactggatactcctagagcaccacagttggtgggccagtttattgctagagctgttggagatggaattttatgtaatacctatattggatagttacaaaggactgtagattgtgtgcggctaganctgcnctggataagntacnngctctnagttttnnaaggggaancgtaaaanatttgtggggnctnggggggcgcancttcancccctttnaaa

SEQ ID NO: 354136 - DNA, 718 bp, Homo Sapiens
  misc_feature (557)..(557): n is a, c, g, or t
  misc_feature (595)..(595): n is a, c, g, or t
  misc_feature (612)..(612): n is a, c, g, or t
  misc_feature (617)..(617): n is a, c, g, or t
  misc_feature (642)..(642): n is a, c, g, or t
  misc_feature (682)..(682): n is a, c, g, or t
  misc_feature (706)..(706): n is a, c, g, or t
cacaaacacacatctaactcacaaagtgctggaagagagaaagcaatgctctttccagaggaggaacacggaaaaatcagccttgtgggtgaacaggaggagagtcacattcgccagcaggcagcaccctgtgcaggcagtgggagaaatctgagcttcagcagcgtccggagcaggatttgcacgaagtctcccgtttcaagttttatgtctcctggagtcctggggaaggcacccagcccacccacagctcccttctcagagccctaagaattgatgagaaagcccctcactaccacatgcaggacacgcagaaacttcagatgagtggactggtcacgtgatacagcaatgacaaaaacttcagtattggcattcattccagctgatggcattccaggagcttttaatgaattaaagccacatttgcctgaagaagccagcgaagttactaactggttcaaaaacgattatgtgcatgatgggcagtattgttgcagttcaatcaccagtattgcttccaccagatttgtggtctatatatgtgtgcatatggnatagatttccacagacccacaacacggaagcatggcanagaagatgggaaaaaanggggnatactcatgtagttgtatactaaancatagaagaattttgaaaagagcagtgtcacatggaaaanaaatgtgaacatattctccaaggncagccatgtcgt

SEQ ID NO: 354137 - DNA, 581 bp, Homo Sapiens
  misc_feature (36)..(36): n is a, c, g, or t
  misc_feature (43)..(43): n is a, c, g, or t
ctttccttcaaagtcagcctgcatggtggtctgagnccttccnccctacagcctctcccctttatctttcacggtaatcacccctcattactcgtacttctaactccatcttgaaagctgcttcctggaagatccaaacggacacaaggagggactgaaggattagaatgagggaagtaacccatgcactgcttatttgagatggggaaccgaaggactttggcagttcctacacagagacagatggcagagatgacaaggtttctcagagaatgcgtgagtaactggaatggcttttcctgatgacccagacagcctgctcaagagcacactgttgcagctgccctccttggatggaactatggaatgatttttattcttctacttcccaggtgaatgggaaaccaaggacacagtcagcatttaacaaaaaggaatctgcatctcagtcagaactgtattgcatttgcttctctctggattaccttgaagttactccccttccctcaataataatggcattatgaaaaaaattggaattgatcaaatgaagtaaagagtaaacagaggaaagactaccc

SEQ ID NO: 354138 - DNA, 620 bp, Homo Sapiens
  misc_feature (252)..(252): n is a, c, g, or t
aaaaaaccaccttttcattgccctcctttctaatccaagatcatatttttaaaaggtaggtttctgatatgccatgaaatatttctgtgaatctgtgtttttgaccaaggaaacagctgagatattaaaccatgtggttgttccacggttcatctggctaccgttctgggtcccctctgaccacctcaaaaagaaaatgaaattgggagattaaatcaagccttgacctccctcttttaatgaggaactttncacgttgacttcctatcctcaggatattcttcagtttcatactgcctgaggagaaaggaacaagctgcagacactgtaactggtctccagatgtgtgtatatgcgtgtaaaacttcacaccgtgtgtgttgtgttcaatgttgtgtcaatctacaaactgactcaaacaacagtttaacgatagagaagacagtgataatggcaaaaaaaacacccaaccacctttttccgtcaaagtgcttgctatggctttcatagctgggacaagtaacattaagtattcaggagcaaagtgttcttgaaagaaaatggtgtgttgatctcataagaaaatgtacaaccaataaaagacattttaaaaaacgtaa

SEQ ID NO: 354139 - DNA, 1492 bp, Homo Sapiens
cacacaacctgggtgacaggaaagctagcctaaaatgaaatgtttggagccaccaagccaacaggcaaagaaaacaaaggaatgctgtcccacaaacaggtatttttaaatacatcctgaggccttattgaagttatcacttgatgctcatatatttccatatagaaaaacacagttagatatacaccccctactccttctttccttcttcagctcacaagcaaagagttcccaaaggccagaatttaaatttaatattcacctcaagagcatggaaacattccacccacatgctttacaggtctttactttataaacttctaatgagtttcatgctctacagttcagcctgcctcattcacaaagagacaatgcggcaatccgtaaagaagagatgattccaaccagaaaaagctgcacctggcaggaaagatgggagcctcaatgagggaatccactgaatagcattcattcttttattttaaactctccagagacactactttgaagtgctggaggtgggttttgaaagacaggggtgcataggacctctccgatatcctttcagaatatttcaggtaccaagaagaggtagcaagctcctaactagcttatggaactacctcattctagcatcagggcattttccacttgcccaaaggctctctttgcaataaacatggtttgaaaataactttagggtgcaacaggcaaacaatcaatcatatatacaaataacatgtgtctatcacaaaatttacagaaggtaagaaaacgtgttgttgtgtttccttacaaagtccatattaataaacggaagcagcattttcagctatgaaactgaagcacaaagaaagctgaagaaatccacctcttttattaaaaattcttgtaaagttcaattccataaagaaattctagtgtctcatcaagattttcacaaaatatatagaaaactgttcatgtatttaaataatctgaaactacattcctaacacctctttcagctttaaatgactcaattcgatgattcagtatcataggaagtatgtcctagttgtgtaagcaaattacacaaaaaatacttttcctctaaaaatacctattattctattaaaacatcatttcagttcatatagaaaatcagtccactcagaaaataaatttgagacttaaagaataaatcaaacacagaggtaatacaggagataaacacaattttcttaatcaaacctcctcaagtggcttttatgcagattggccaagaacactataaactgctgcccaatgtaaatttttggcacatatagttttctaaaacagttgctgtgaaaccccagctattaaatttgctctagtggcaaacagaacactgtcagaattcaccagactctttatgtgtgtgtacaaggcacctgatatgactcagctggtgtttaagcattcccttgtgtgtagttcatgacagatacaccaccatagcttccccgct

SEQ ID NO: 354140 - DNA, 904 bp, Homo Sapiens
gggtgttaatggaatttctcagtgacaacaacgaagcagcagctgctgatgtcttggagttggttcgtgaagccattcagcgctttgataacctgagaatgcttattgttgagaagatgcttgaagtctttcatgctattaaatctgtcaagatttaccgaggagcattatggatcctgggagaatactgtagtaccaaggaagacattcagagtgtgatgactgagatccgcaggtcccttggagagatcccaattgtagagtcagaaataaagaaagaagctggtgaattaaaacctgaagaagaaataactgtagggccagttcagaaattggttactgaaatgggtacctatgcaactcagagtgcccttagcagttctagacccaccaagaaagaggaagacagacctcccttgagaggattccttctggatggagatttctttgttgctgcctcccttgccacaactctgaccaagattgcattgcgctatgtagctttggttcaggagaagaaaaagcaaaattcttttgttgctgaggctatgttgctcatggctactatcctgcatttgggaaaatcctctcttcctaagaagccaattactgatgatgatgtggatcgaatttccctgtgcctcaaggtcttgtctgaatgttcacctttaatgaatgacattttcaataaggaatgcagacagtccctttctcacatgttatctgctaaactagaagaagagaaattatcccaaaagaaagaatctgaaaagaggaatgtgacagtacagcctgatgaccccatttccttcatgcaactaactgctaaggaatggaaatgaactgccaagggaaggtcagttttcagctgagtttactgggcagcaatggggttaacacacag

SEQ ID NO: 354141 - DNA, 386 bp, Homo Sapiens
  misc_feature (133)..(133): n is a, c, g, or t
  misc_feature (291)..(291): n is a, c, g, or t
  misc_feature (337)..(337): n is a, c, g, or t
  misc_feature (349)..(349): n is a, c, g, or t
  misc_feature (360)..(360): n is a, c, g, or t
cggggcgttgaatggcccagcagctccagcggcaggtggaacaggcgcgatggctggatgaggtgaaacgcacactggccccctcagcccgaaggggcaccttggctgtcatgcgaggactgttggtcgcggntgccagtgtagcccctagccctgctgtggataaagcccaggccgagctgcaggaactgctgaccattgctgaacgctgggaggagaaagcccacctctgcctggaggccaggcagaagcatccaccagccacacttgaggccataatccgtgaagcgnaaaacatccctgttcacctgcccaacatccaggctctcaaggaggntcttgctaaggnccgggcctggnttactgatgttgatgagatccaaaat

SEQ ID NO: 354142 - DNA, 359 bp, Homo Sapiens
gcggccgccatggcagtaccttccgcgagctgcacctgctcatggccagtctggactgaggaaagcagtgggcaggggcgctcggcagcccacagggcctggcctcagcccccactcctgctccttgtgcacccactggcccatgagcctctgcctggcccctgctgctgtcctgtggccgtcctggaggaggtgatgctggtccctggccacctctacagccctgaactcttgagacaactctctccagcaatagctgcccagctttgcccaactgttgcttcttggggcagcgaactgagccctggggctgctgctgtaatttataaggcaaattttattaaatttgtaactattcc

SEQ ID NO: 354143 - DNA, 1057 bp, Homo Sapiens
  misc_feature (11)..(11): n is a, c, g, or t
  misc_feature (49)..(59): n is a, c, g, or t
  misc_feature (65)..(65): n is a, c, g, or t
  misc_feature (94)..(94): n is a, c, g, or t
  misc_feature (107)..(107): n is a, c, g, or t
  misc_feature (144)..(144): n is a, c, g, or t
  misc_feature (515)..(528): n is a, c, g, or t
gcccccatagntttctaacttgaacagccatttttgtttcatgtctttnnnnnnnnnnngtctanagctgttacctatggggagtggttgaaangagagctagtgancacagaaggatgtggaatgtcttcttgacatcattgngtattgctggtaatcaagttggtaacgactacttctagcagctcttaccactatgacttaagtggtcctggaaggcagtaagtggaggtttgcagcattcctgccttcatgagggcttctaccactgaccactttgcacgtacctggctcccagatttacttaggtaccccacgagttgtccacataagcagcttcatctttaccttgccagagttgacaattatgggatactctagtctacttatacttgtgttcccatctgtctgccatcctctgaaggccaggacccagtcatacatccttagaaaccaaagtatgggttttgttttctcttggaatgtcaggtcttaaggcatttaattgagggacnnnnnnnnnnnnnngccgatatagtagctagctacttaagcatccatgggtattgctccatatcaaagcagatttgcaggacagaaagagtaaattagccttcagtcttggtttacagcttccaaggagagccttggccacctgaaatgttaactcggtcccttcctgtctctagttcatcagcacctgcagatgcctgactcttgttagccttactattcaatacagtccttagattcacggtatgcctcttcctatccaggcacctattctgaatcaccatgttgctctgcagctagagttgataggagaaaatccatttgggtagatggcctatgaatttgtagtagactttcaaaatgagtgatttgttagcttggtacttttaagtttgtggtacagatcctccaaacccatactctgagcaattaactgccttgaacatagagaaaaattaaggcctcacaggatgagtctccattctctgtaaatgcttattttatcatagtctttagcctctactatgagtaaaatgttctcttc

SEQ ID NO: 354144 - DNA, 222 bp, Homo Sapiens
ctgggtgcccgagctccaaaaacctccaatgggaatacataatgaaatgttgggttactttagggcaaaaggttaagcctacaaaagctttctaattgggaaatctcttccatgaaagcatacagaaatttgctgactctttcttttcctaatagctatttgctttctttggaaaaaatcttcagtcaaacacaaaagccaactacctagcaaagctcaaat

SEQ ID NO: 354145 - DNA, 1069 bp, Homo Sapiens
  misc_feature (11)..(11): n is a, c, g, or t
  misc_feature (13)..(13): n is a, c, g, or t
  misc_feature (20)..(20): n is a, c, g, or t
ggatgaacccncntgagccnccggagtggaccccgccaggcccgagtcgcgcctgcagacacagcatctactcagcgtgggtcacctctgtgaacatcactgactgcaagcctccctcaatttctggtgcagcccatcagggacccacagcgcctgggaggatggtgcggatcttggccaatggggaaatcgtgcaggacgacgaccccccgagtgaggaccactacccagccaccaagaggtagcattcctcgacagagcttcttcaataggggccatggtgctcccccagggggtcctggcccccgccagcagcaggcaggtgccaggctgggtgctgctcagtcccccttcaatgacctcaaaccggcagctggtgaaacatgggctttccgcagtggcatctcggcaaccatgctgtggagccggtgacctccatcctgctcctcttcctgctcatgatgcttggtgttcgtggcctcctcctggttggccttgtctacctggtgtcccacctgagtcagcggtgacctctgagggctgataggggtgggtttgttgagagggacttgctgggccttggtgtgagagcaggcatatttggaggggatctggtggtgccttgaaggtatgatcagagaggggaccacaggtgtgtgtttcccctttgtgttaagcgtgaggcagagggagacgttagtccagcatttccaaagtgtgggtgggtccgttggttcccgagatacttttaggtggtatggggcctgcattaagtggcacaaaatcagagcaagaaagcgatgcccttcccaattctctcaatccttttatgccgagaagatctcagctggatgccaacatgttccgatgcctgtggaagacatgccgacgtctcctctgcctagggagcaggacttgggcttagggcaggtggaaaaaattccagacttttttagcactgtttttgttttaatggtatatttttattggctactttattgtttaggacaagtggtagtggcattctatttattgtgaccttttcaataaatagatttaagtaaaaatg

SEQ ID NO: 354146 - DNA, 393 bp, Homo Sapiens
aggtggactatgagaggcaataattcgaaattatatcgtggaaatgcttcaacctctaccaagacctacttcaaaaggaaaatcttgtgttgagtagcagttaaaaatggaataagatatcagaccttcaaccaaatagttcttaatagctcaaaactactataggatagcaattttattcccaaattattctagaactgaatatctgaaactcagtgaccaaaagccagtcaaccaatcttccacagcctaatacacacacataaaatatacctctggcattacattataacttcccccatcaaacaaaacaggaagagtgggttatgttgggctgatagtgtaagatggtctgtcaatgtagcgtttccgttatattctggattttgagtt

SEQ ID NO: 354147 - DNA, 1330 bp, Homo Sapiens
  misc_feature (44)..(44): n is a, c, g, or t
  misc_feature (1060)..(1068): n is a, c, g, or t
cgccgtccgctccgtccgcccttagacctgttgcccagcatccntgcagttcgcggtacagtctctagtagagcgcgtgtatagaggcagagaggagtgaagtccacagttcctctcctccaagaggtagaaggggcgcggggaaacgacctggtatcggttttccgcttgctgatcaagagctccctttaatgccgcacgcaggccggcgcccctcactgataaacgattggggctgggcctcggcctggagggcgttcgtcctctcagtgccctcagctcgtaaaggaggaaaccgaggcgtggggttgggcgagaacccaggggtcctcctgcacccccgccgccctgagacccgttgcccagcatccctgcagttcgcggtacagtctctagtagagcgcgtgtatagaggcagagaggagtgaagtccacagttcctctcctccaagagcctgccgaccatgcccgcgggcgtgcccatgtccacctacctgaaaatgttcgcagccagtctcctggccatgtgcgcaggggcagaagtggtgcacaggtactaccgaccggacctgacaatacctgaaattccaccaaagcgtggagaactcaaaacggagcttttgggactgaaagaaagaaaacacaaacctcaagtttctcaacaggaggaacttaaataactatgccaagaattctgtgaataatataagtcttaaatatgtatttcttaatttattgcatcaaactacttgtccttaagcacttagtctaatgctaactgcaagaggaggtgctcagtggatgtttagccgatacgttgaaatttaattacggtttgattgatatttcttgaaaactgccaaagcacatatcatcaaaccatttcatgaatatggtttggaagatgtttagtcttgaatataacgcgaaatagaatatttgtaagtctactaatatggggttgtctttatttcatataaattaagaaattatttaaaactatgaactagtttcattaattgaatttgctaagtggagttatttctcattgctaaactgnnnnnnnnncaaattctagatctctgctaacttttagtaaatgaacactaaagtggtgagcctttgataatgccacttttgtggattcaaaaatcattcgcctcatcccctttcctagaatgaaaggctgggggccttgccccccttttgcgttgaaggaatagacctgtccctttaaagccacgtttttgccttagggaggacagacgccctccccccatgggacccctgtattgtctggttccgggcttccttaaaggcctgttacacc

SEQ ID NO: 354148 - DNA, 1756 bp, Homo Sapiens
aaaggagacagaggagacagaagacattttattctcacatgttagggtgacaatgacaactcccaagttccaaaggttcaaataaaaatagcattttacaaattaaaaaaaatacaatttatatacacagtggaattagctaacatcatacaaacaaacagtgcaaacagaaaaaaggaagctgcgactgcggcaatggccaaggtccgcagagctgtggtgcaatactgcacatcaatactgcagggctggcgaggccaccttgggcctctcgaaaggctttcctgtcacccagggtcatgtcagtgcataattctgcatcacaaatgccatacagtggactgggtcctgaaagtgtcccttccagctgggaactgttaagttaatcaaggtcaggagcaaatcatccctcagcacaaggtcccaaagccagggccgggggcccattggccccactccctgatcacctcgcctaggggccatggaacaccaagctggagatgaaacacaaaacaccacttcttaccacccgtaggctccccatccacagatctgctttactgaggcgactgatcactgggtgatggggctgctaatgggtgagatgctgaaaaggctggtttctaatggacagaaatggaaggagcgagggtcacagttgatttgtcatgagtggagaagttgctgtctttgggctcatctggaaagcgcagatgcagagagaggagaaaaggaaaccacgtgcctttgcatggggcctgggtttggggcctccttggcagccgtccagtcagtttaggggagggaggtatttgcattctactgtctatctctgggctaaactgatgggaacaaaatatctggtgacttaaacacaacaggatgtgcacgagggatgaattccaataacattcaccggggcagcctcagggcaggcggctgctgatccagccctcgagaggccggggtcctcctgcagggcgttagctctgccagctccaggaaggggcggggagaggggacaaagtgtctgtgacaggtgatcacaccattctcctgacttggacaattggcttccttcttaataaaaggaagaaataacgtgatcaagctctgaacactgccataaaacacagcagcagctggccaaatagtaacatttaaataagaattgcctttttggtccttgtgatgtcctgcgctatttcctgggagtattatccccatttcataagtcaggtgcattctgggaagcagaaacatttagaagtcaaagcaattttggtcagggagataagaaaatggggaaaatggaggggccacaatcagctagaaaagaccttgaagcagccccatctctggagtggaattattccctagagtgtgctgagcgcaagatctggaccagcagagccaggactgatgctcaccccagggtgaaaggcagacttggccaaggaggtcgcccagggctgggcctgagagctgtgctgccagggccaggtgccgaggcccgtgggcaacctccacggttttaaaaaaaactaaacgtaaatgaaggccatcttgagccaaagcacgtctgccccagggatgcctgctgggactaataccatgtagaaggtgggggaagataagcatgaatgcccaatgcccagatgctcactttgggtgcctagtcagagggggcgggccagcctggagaagaatgacgtcactgaacgacagggtgcgcttcccatgcttcatgtgaaac

SEQ ID NO: 354149 - DNA, 1547 bp, Homo Sapiens
  misc_feature (11)..(11): n is a, c, g, or t
gccccgtggtncatcacatgggcacaccttgactttgatgatggacgtgttggacaggggagggttcccagagtctgtgacgatgatggggacgtcatacatcccggcctccaggtacaggatgcgcaagctgagttgggcatagtcaccgttcaggcgggtgatggtccagttcttccgcacggccgccgggacaaagggcagctcgaagacgtaggggccgatgttggggtcgacgtcagcgtcggccgccgtgatgttgatggcgttcaggttgggcctctcgcagatctgcgcctccttgggcagcagctcaggggcgttgtcgttgatgtcaatgagatagatctggagggtcccggtgccgctggccgggggtatcccattgtcagctgccaggaaggtggcctcgtagacgttgtttttggtgtagagggactcacggtccagcactgccgccgtggtgatctggccgttggtggcattgatgtgcagccagctcgctgggtctgacagctttgagtatctcacagcctgctgcatgaaccggtcagggtccacagctgaaaacgtggtcagcacggtgccggggggcacgccctcctccaggcggatcagcttgtggtttgaggggaagtagggagcctcgttgatgtccatgatggagatggtcaccccgtgccggtggaccggaaggacatctggattccgctggccaagggcgccttggttggacaccatcaccgtcaacagtgaaaagctctgttgagctcgtagtcgactgccgttcaccacggtgaccatgccctcgttggttacgggatctgtgcggacgctgaagtgcccggatggatccccactgatgatgcggtaaacggcattccagtttggagagtggggctgatctcggtccatcaccgtgaggtttgcgaccacggtctccacgcggttttcggggacctcccctgcaaacgtgctggcggtaaattctggcgggttgtcattcacatctgtcaccgtgatgatggctgtggctgtgtttgagaggccatagttgagatttcctgtccatatctgtggcctgaacgatgactgtgtactgctgaactttctctcggtccaggccagccgccactgtgacgatatctccagtctcgctgttgatggtgaacatattctgggacgggctctgtggggtctgggtcacgatccggtaccgcaccatcccgttggccgtggtgctgtcgtcagcatcgttggccgtgacggtcatcacgtaggtgcctggcttggagccctcgtccacggagccgttgtagacctggttgatgaactcagggcggttgtcattcatgtcgatgacgtagatgtacaggtcgatggggttctccaccttgttgccattcatgtccacagcgtgggctcggaggtggtaagaggcgtgctcctcccggtccatgggccttgtgacgtacatccgcccggacatggagtcaatgctgaagacctccatggggggctggtcggcgcccactcccgatccctta

SEQ ID NO: 354150 - DNA, 1203 bp, Homo Sapiens
  misc_feature (1079)..(1079): n is a, c, g, or t
caactgcgaggcggggggtgcgcgcgaagacccccgcaggctgcgcttccggaagtaacccctgacgcatcccggaatccagagcgcccactacggcctttggccaggccccctgggcgcgttccgggagctcaggcctgcggcgctgggagaagcacgctggccaacaagttgggtggtgggcacgcggcccaggggtcaggggccgccaggcggcgggcggcggggctgcggctcttacctgccgaggaggcgccggctctgcggtgcggagttgcgccggacttcccagcttggccagtggctccgcaggctgccggctccacccctcagattcatttggattcaaggttggctctcaacagtgccagctgcactgtcatcctaaagtacttctgtggaagagaacatggtggtgtcactgttgtaccagtgatgacacaaaatcccagatctacctgacgggcctgcgagggttgaagattgtgaagcaatagcctaagggactggctggcttcgagcagggcatcggaaccaggcctcctggcactggcctgggtagagccagggcgagcaccagctgacccccagtggaaccctgtgacagtcctgccagggcccaggccatcccaaccgacttccatctcatggaccctccagcggagaagccgggagaggctggcggactgcagatcacaccccagctgctgaagtcacgcacaggcgagttctccctggagtccatcctgctactgaagctgcgtggcttgggactggctgacctgggctgcctgggagagtgcctgggcctggagtggctggacctatcaggcaacgcgctcacccacctgggcccgctggcctccttgcgccagctagctgtgctcaatgtctccaacaatcggctgacgggcctggagccactggccacctgtgagaacttgcagagtctcaatgccgcaggcaacctactggccaccccggggccagcctgcagtgtctggctggggctaccggtgcctggagtaccctgcggctccgagaccctttggccccggctcagcaacccgctcttgtgncaccctcctactggctgcagtccggagctgttgcctgccttgaagtcctcgcggtacgggggatgggcatgggtaggtcacccgttgccggcctgggagtccttgtccgcccgccgccagcccg

SEQ ID NO: 354151 - DNA, 3040 bp, Homo Sapiens
  misc_feature (72)..(131): n is a, c, g, or t
cccagcgcccacggaaaggcgttggtcgggccgatatacgcaactggccaaaggggatgtctccaaagcgannnnnnnnnnnnnnnnnnnnnnnnnnnnnnnnnnnnnnnnnnnnnnnnnnnnnnnnnnnntttttttttgctgggtagctactatgtgcaatttattcacgatacaacatatgactgcctactatgctccaggcattacacaaagttctgaggatatacaggctaattaagtgcaacaagaatacttagaattcgtacaaagcagtagactgtgctatgagagccggtaatgagggtcctaggttagaggggaaaagaagacttcccagaggacgtgatatccaagacaaggcctgatgataaacaggactggccaggtaaggaggggaagagagagccaggcagagaaaacagcatgtgtgaagacgactcacaggcaaaactactgttatgggtgcctcacatacagatcctcagtgatcatcaatccagaccaactctattctttcctttgtggttgttattccttccaatttatttagattttattgtttagtgaaaatgggcctctagtaaagtgtccagtcacaggtgaaggccaatatcagagttttaaaatgggaacagagcctaattatttgaaaaggagactcctaagatgaggagcaggtggtactaagcctgccaatggcctcagtcccttggcaacatcaagtcaaagcaaatgcctgagtacaggccttttgccagcagcaagtattttctgagagccacccaccggcccagagcagaagcaggaagagaatgaacatgtctgagtgttcccctggaaggctgggccttacaaggacaggcttctgtcagcatggtgacagtcttctgtgtagatgggggagggagagaagtcccaatgtgccacccatgggatccagcagaaactgggctctggagtattgctggccccagtggactttcatccaaggagttctttggtcttcactgccagatgcctgtccagttctgccactgtgtcatcggccatttggctgatctgtttctctattagcctaatggtgtcctctgagactgtatccttggatttcttcagcttgttcattgagttggtgcgaaccttccgtaaagagtctttggccttgttggtgttctgtttggccagtttcaccagcatttctctgtgctctctggttacttggggaatgggtacccgaattagcgtcccttccacttctgggttcagattcattccactttctcttatagccttgatagctgcagctgtacactctgggaagctggccatattcaccaaaatcagctgtggcgacttcatggagatctggctaatctggtttaaagcaagcttcccgtcagcagttaccacagcaatcttgtcaagggatcctggtgaggtccttatattgagagtcttattgaaattatccttgagagcttctatcacagacttcatttcttcattcacctcttccaagttgattatatcctcaaccaaggcagcattaatattcactctggtttgggactgtcctttccctttggctttggctttcttggtagcaaaatggcggactggtacagctgaataggccatgtattgcctatggccatgttgtctttcatgcactgtcttcagtgtaacttctgaaacgggtctgatagaggctgcaagataattgcgaaaggtagggtggaccatgcggaagcactttaatcccaaggccatgactgaagacaatccttggaaacatccacagctatcgcccaggttactaaggaaagactcgtgcgacggcggcgaccgcagctgcgcggacgtcgtgacgtcacgaagccaggaggcggcgcaggcgtaacgcgtcacgggcggcctggcagctggcggcattgaggcggacgcgtctagaggtccgtctgaccgcggcgtcgggacctggtttccgggcatgagctgagagcaccacgccgaggccacgagtatttcatagacattgatggaagcagaaaccaaaactcttcccctggagaatgcatccatcctttcagagggctctctgcaggaaggacaccgattatggattggcaacctggaccccaaaattaccgaataccacctcctcaagctcctccagaagtttggcaaggtaaagcagtttgacttcctcttccacaagtcaggtgctttggagggacagcctcgaggctactgttttgttaactttgaaactaagcaggaagcagagcaagccatccagtgtctcaatggcaagttggccctgtccaagaagctggtggtgcgatgggcacatgctcaagtaaagagatatgatcataacaagaatgataagattcttccaatcagtctcgagccatcctcaagcactgagcctactcagtctaacctaagtgtcactgcaaagataaaagccattgaagcaaaactgaaaatgatggcggaaaatcctgatgcagagtatccagcagcgcctgtttattcctactttaagccaccagataaaaaaaggactactccatattctagaacagcatggaaatctcgaagatgatggttgtgaattactgtagcagcaaaagcaaattggtctccacacctaaaatcgtctgcctgtgtactttgtagatgtgaatggtactattcaacggagcacaatcacatgttagcatttggtaacataatgtttttggatgttcttatggatgtttcttccctaaactatgtatggaattgagcatcatccagaataaatagcgttgtatcccaaattgtgatttgaaccctgggatgctctaattggcctggttgggttgggattgtaactcccagaaacattctatagtgtgcccagagcaaaaggcaaataccccaaatattattttaaatcaggaaactaaaaatatttaacatctatttaaaaaattgagcattttttctaccgctcctgtggcctttttccaccttaaaggaaaaggta

SEQ ID NO: 354152 - DNA, 942 bp, Homo Sapiens
cacgagtctttccttagtaacctgggcgatagctgtggatgtttccaaggattgtcttcagtcatggcctgggattaaagtgcttccgcatggtccaccctacctttcgcaattatcttgcagcctctatcagacccgtttcagaagttacactgaagacagtgcatgaaagacaacatggccataggcaatacatggcctattcagctgtaccagtccgccattttgctaccaagaaagccaaagccaaagggaaaggacagtcccaaaccagagtgaatattaatgctgccttggttgaggatataatcaacttggaagaggtgaatgaagaaatgaagtctgtgatagaagctctcaaggataatttcaataagactctcaatataaggacctcaccaggatcccttgacaagattgctgtggtaactgctgacgggaagcttgctttaaaccagattagccagatctccatgaagtcgccacagctgattttggtgaatatggccagcttcccagaggtaagatggccttgctaaaatctctctccgtggtctctttctggaatggacggagactgggtcatatcaggaggaagttgttccttcagcttaggatgaaacaagagagaagacataataaagagaacttcaaggataaggcaaagctcttttcctgttgccagattccttttctgttaaactcagatgctacagaggctaggtaagtgtttgaatacccaaaagggtcccatctaagaaaaacaatactggagatgcagtgatgggtgcttggccagcgtgaaacaggctcgggtgagctggagagcctgtcccttgtggtgagtggaatgccttctgcccagctcctgctgatcattgccaggcacaatgtaggcctggtaatcagtgttactgaatactacgattatttccaacaagc

SEQ ID NO: 354153 - DNA, 991 bp, Homo Sapiens
  misc_feature (856)..(856): n is a, c, g, or t
  misc_feature (936)..(936): n is a, c, g, or t
aattctcgggattgcggtcgccgccgtcgcacgagtctttccttagtaacctgggcgatagctgatgagacggaagtcctgagagtttgaccgatttaaggtcacgtgcctaggaagtgctggaaccaagactcggagttttctctaagtttagtgcctttattttgttttaaaccacactgttgcatttccccccattttggaaagctttatagttggaaagaatgaaaacctgatctgaccccttcattttatggttgaaacaaaatctacgtaggagaaatcacttggtacaagtcacaagtcagtggtagagctgccgcaaatgctttttgaatacgtgtgattatgaatctaaatggcagatggcagggagtgataagtggatgtttccaaggattgtcttcagtcatggccttgggattaaagtgcttccgcatggtccaccctacctttcgcaattatcttgcagcctctatcagacccgtttcagaagttacactgaagacagtgcatgaaagacaacatggccataggcaatacatggcctattcagctgtaccagtccgccattttgctaccaagaaagccaaagccaaagggaaaggacagtcccaaaccagagtgaatattaatgctgccttgggtgaggatataatcaacttggaaagaagtgaatgaagaaatgaagtctgtgatagaagctctcaagggataatttcaaaaagactctcaatataaggacctcaccaggatcccttgacaagattgctgtggtaactgctgacgggaagcttgctttaaccagattagccagatctccatgaagtcgccacagcttgattttggtgaatantggccaggcttcccagagtgtacagctggcagctatcaaggctaattaaaagaaagtgggaatgaaatctgaaaccccanaaagtgggaaggggaccgggctaatttcggggtacccccatttccccaaagtaaa

SEQ ID NO: 354154 - DNA, 434 bp, Homo Sapiens
gcaaatgtcatgttctgtttaattatcactccttgaccattatgttaatttctttccctaacaaggtgacgcattgttttaagtaacaatgaccaactcatctactcttcttccaaattgtgtaaattgaagggtaaaatgtgggaaaacgctaaatttgaatgctaaatttgaacatttcacacaacaataatttgaaatgcttctttgcaatattatggcgtttcggaacagataaaaatacttcattttcagacatttggtcaacaaatacttcttggacgtttatatgcaaagcaatgcatgtaacattttcattactttgcaagtgtgcttatcagtaaaagaattttgttttaaattctagccttcgtttaaatgtattttagttaccacattgggaagaaaataaaatattactatgtacggaatgt

SEQ ID NO: 354155 - DNA, 472 bp, Homo Sapiens
  misc_feature (31)..(31): n is a, c, g, or t
acacagccctggtcgccaccagcgttcctcncaggacacccttgactgcgctctcctgtgacgatgccactgcagcccgcaccttgtcactgctgggccaagaagccttcactaggagtgggatccaggctcctctcccacagaaagcggtgacttcacctcatggagcccgggaagctgctcgcctcggcagccataggagcgaacactgctgctctctcgctggcccctggtgaggacaggaagcctgaacccgggtgatggctgaacgctgcccagcgtgtcttctggctggggccctccgtcctgccccttctccgcagggccctgtggctctggcagccccaggccatggcgttgccagcctccctgtgacagagcctggtgaacagtgagcctggctcccacgcaagtggcactttaagccctgcatcctcggttgagagtaaaaggcttttctcccttaaaaaaa

SEQ ID NO: 354156 - DNA, 1165 bp, Homo Sapiens
  misc_feature (531)..(553): n is a, c, g, or t
  misc_feature (1006)..(1068): n is a, c, g, or t
ccgctacggacgcccccagcagcgggagggacggcagcagcagcatcacgaggagctgagtgcgacccccacccccctggggctgcaggagaccatcgcagagtttttgtacattgcccggccgctgctgcacttgctcagcctgggcctgtggggtcagaggtcgtggaaacactggctcttggctggtgttgtggacgtgaccagcctgagcctcctgagtgacagaaagggcctgacccggagggagcggcgggagctgcggcgccggaccatcctgctgctctactacctgctgcgctctcctttctacgaccgcttctccgagggccaggatcctcttcctgctccagttgctggccgaccacgtccctggcgttggcctggtcacaaggccgctcatggattacttgcccacctggcagaaaatctacttctacagttggggctgacagacctcccggaaggagggtgtggggaggggtggggcagggagcccctcttccctaataaaactgactccggcagcgnnnnnnnnnnnnnnnnnnnnnnngggggggccgtcttaaagttttccctcgaggggcccaagtttacgcgttacccggtttttttgttccaagggggtccctatagggagtcgtatatataagactaggaaccgggcgcgcgttttaaccaacgcgtcgtgacggggaaaaactggtctagtctggggaactcttgtgtgagggaaccctaacttcgtgtggggggtgaccatattggggaccaaacttacctctaagaggattttaaagatcctagggataaactataacaactttcacgggtggtactagagggtgttcaacccctaaggctggtgattagtgcactggccggcttggaagaagctttgggataacccggcgagttatgcattttgctgggcgaactcttctttttagcccgccgggggatccggcttcgtccaaacaaaaagcgggcaacgaagtacacaagnnnnnnnnnnnnnnnnnnnnnnnnnnnnnnnnnnnnnnnnnnnnnnnnnnnnnnnnnnnnnnngacaccgaacgaaaacgacagcagggaaagcacacagaagaatgagaagagaacaaagcagaagtgacagaggcggagcaagcgacacagcagacag

SEQ ID NO: 354157 - DNA, 888 bp, Homo Sapiens
gccccttctgtcacctcaggaggctcagcctggtcacgtcccacaacaccagcccagagccagggtttccacgacctctgaccccacaggcccaggctgagcaagtgcagcagcggccgggcaatgtacaaaaactctgcgatggtctcctgcagccccagggggttggggtcgcactcagctcctcgtgatgctgctgctgccgtccctcccgctgctggggagctccccagtgcctggagtgcagggacggcgtgttctggagggttcgcaccacccggtttgaccgcttccccacgtaggactgctcatggttgccagggctgtggtcaccatccgggggctgtgcctgggtctctctgtccagtggaacgatagggggtgaagtctggaggccagccttgaaccagagcagcaggagcatccgcagtacagccttggccagctggatgagggcgatgacaagccagcggcccacttcaccccacaccttggcagctcccatctccatgaacacctccacgcactccagcacgctcagccatgtcagcagcttctgctgggacagcgacacaggcaactttttccgaagctccttccgtaggatcccgtcattgagcagcacaagcaggttagaggcagagtacaccagctctgacagctcgtgcgaatcggcgaatcgacctgccagcaggtaactgaagccccgcactgctgtctccagctgggccgtggcggccgggtgacgagtcacgtactcctggtagcggaggcccaggagccgcagcttctccatcctgccctcggcaccgacagacccacagaaggaccgcctcgtgccgaattcgacaacacagcctcgtacctagcctaagtcgcttccacatt

SEQ ID NO: 354158 - DNA, 892 bp, Homo Sapiens
caacccggtaaacggaagagctgggtgctgacggcgctgggcgggtcaggtgcggagagcgtgctaaccaatgacttgagggagtagggggccgggtttgggccctcagttgctaagggctacccgagtgggaagcggttcaagagatggggtgaagggtggttcaccggttcttcaagtcctcagccttctggcccgcggaagttaagcaaccaagaggcgggcctaagaccggaagcaggaaggagggcgcaggaagcagggcgccgcagcctgtcgtacggtccttctgtgggtctgtcggtgccgagggcaggatggagaagctgcggctcctgggcctccgctaccaggagtacgtgactcgtcacccggccgccacggcccagctggagacagcagtgcggggcttcagttacctgctggcaggtcgattcgccgattcgcacgagctgtcagagctggtgtactctgcctctaacctgcttgtgctgctcaatgacgggatcctacggaaggagcttcggaaaaagttgcctgtgtcgctgtcccagcagaagctgctgacatggctgagcgtgctggagtgcgtggacggtgttcatggacgcatgggagctgccaaggtgtggggtgaagtgggccgctggcttgtcatcgccctcatccagctggccaaggctgtactgcggatgctcctgctgctctggttcaagggctgtgctccagacttcagcccctatcgtgccactggacagagagacccaggcaacaggcccgggatggtgaccacaggcctggcaaccatgagcagtcctacgtggggaagcggtcaaaccgggtggtgcgaaccctccagaacacgccgtccctgcactcaaggcactgggga

SEQ ID NO: 354159 - DNA, 550 bp, Homo Sapiens
ggtcgagaactactaatttcatgctatttctttctctctccctttgttgttatttgatttgggggaagggagtgaggcttgtgcagatttgagctatctgaagacatgaacagaagtcaaataccagccatatcagtagagccttccattcaaaagtgaacacacttggtagctgaaccatatctgagcagcgtgattctgttgtcttgcatatgttattctctcaggctgtggatctttgttacagctctaggaaactgtagaaatacaatgctatgtagcttttccaccccatggtctctagtgctgcctatcaacttgtccccttttttcccaataacctgtcttccaggtggtacagttagctgtcactcagctgacaccatgatgtggcagcagagagggaaacctacaagtggtttgcctcattgcctttgccacatctgaagttctcagcagcactaccttagacttcatgagctaataggaaactttttatggtgtaaatgctgtaagactttgtacatacttcagttgttatgaaatcttt

SEQ ID NO: 354160 - DNA, 1045 bp, Homo Sapiens
  misc_feature (24)..(24): n is a, c, g, or t
  misc_feature (26)..(26): n is a, c, g, or t
  misc_feature (34)..(34): n is a, c, g, or t
  misc_feature (759)..(767): n is a, c, g, or t
ctctcaccattagcaaccttgcangngatgggtntttcttctatggccacatgtctctgtggctctttccttcccccttctcttccactgttaaggactcatgtgcttacttagtcctgaatggagacaccgtcatcatccacatgagcccactgtcctaatccatacaggctgctacaaggaaatgcattagaccaggtagcttataaacaacagaactttgtttctcacagtcctggaggctgagaagtgcaagatccaaggtgccggcagtcttgggtgtctggtgaaggcctgctttctcatagaggcttccttcttgctgtgtcttcacatggggagaggaacaaacaagctcccttgtgcctttaataaggtgctaatcccagtcatgagggcagagtctcatgtaaggcttaacctcctaatacatcaccttgagggttaggattttaacacatgaacattgacggaacacaacgttcattccatagcaccagggtagtctcctcatgtcaaggtctttacctgaatcacatgcatgatgtaccattttcatgtaaggttctaggaatctgtggacatctttggggggggccattatttgtgctgatcacatattacatatattttaatattctagactagtatgaaaacaatgccacttccattgctttatatacgtatctatatacacattgtctaatgctataattaaaaaaaagttgtagacacaaatatacccattttaaaaaaaannnnnnnnngctattttacttcatactgccaactcctttttcctgaaactgcttcaactctggaattcttttttgctattagttttattttattgaaatattcatgaatgagcatacacttgtatatggatttaaaattcacagtaatgttctcatgagttcatctgtgaataacattttatagacaaaatgtctgcactaagacaagagaaagatctataattcctttgttctaaggtaccgccattcattgttattattttaaaataggagtgttgactgatgtt

SEQ ID NO: 354161 - DNA, 1532 bp, Homo Sapiens
  misc_feature (410)..(410): n is a, c, g, or t
  misc_feature (417)..(452): n is a, c, g, or t
  misc_feature (1010)..(1010): n is a, c, g, or t
  misc_feature (1486)..(1486): n is a, c, g, or t
aaagaatgtataaaaacacaaaaagctaaaacatgcctggagaggaaaagcaaaaggaagcagcctcgacgattctgggtaaagcaccctgtcaaatctaagaacacaaatgtaaggcccatcaatgggacatcgttagttaacattaagagcaaaaagcagccctgatgtgattatgatagtgcaccccatcactatcaccatcaaaagagactaccaatctcccaaagtagtcacggttgcattggcatagtgtcttggattttcaataaacaatacaggtgaaaagagagagatacagatgaaaccaggttgaccatagctgataagtgatgcagctaggtgatggacacatggggtccaaggaccatcctctccacttctgtgcatgtctgaaaatgtccataacncagagcnnnnnnnnnnnnnnnnnnnnnnnnnnnnnnnnnnnngcagacttgcacatctgtatcttcccattagactaaaatggggaaagtcgtaagactttaaaggcaaaatgtgcagcatatagcattcttctgcatgtacaaagccacacctagaacaaaaaaataaagcatccaaagtaacattattccgtttctggtttgtctctgtggcttataaaatctactaatgataagattggacaaaactttgggaacatcctcaactaggcatcctatttgttcataaccccttcaattctcattttccaagctagggaggtccctcccatactctatcactgagagacaggcatgctccccctgcggcttctcaagccatttctgtctgattttgcaggcccactccataccagtatcatgcctactcgacggttttgctccaaatcccccacctagcacacccttgctacagctttaagccaaggactctcttgaggaacttagaatgaggcctccctaacaaaagagaaggtagggaagaacaggtgtagatacagtccttcttacccaccctcagggataagagagggaaaggcnccagctctgcttttacacccactggaaataacccggagatccaaaacagattctgcccatcccaatccccatcccccaggagaagcttgagatgctccatattggagactaaagcccactcctggggctatttgaggtagaagcaaagagagcaaaggactgctgaaagtgggaaagctggggattgaggtccagatggccagaggctaccacaaaggaggaaacagcaggaggcacttgggtcttaggaagcattaaaacaaagtcaaaacaagagtaaacactagtctatgacatggctgccttggggtttataactcaagcagatgctaggcatgaaaaggattttcaacttcagaactgtagagcaagcgcaggagacaggttcagggtttgccagcagatccacttggccttctggtttcctcaactctctttcaacctagtatgtgtgcgcagtgccaagttctcagctncctccccagctgtatgtagaaaaatgtggtttttcagttgttttct

SEQ ID NO: 354162 - DNA, 1156 bp, Homo Sapiens
  misc_feature (722)..(747): n is a, c, g, or t
  misc_feature (749)..(762): n is a, c, g, or t
  misc_feature (771)..(772): n is a, c, g, or t
ggtccggaattctcgggatcagaagtggagaggatggtccttggaccccatgtgtccatcacctagctgcatcacttatcagctatggtcaacctggtttcatctgtatctctctcttttcacctgtattgtttattgaaaatccaagacactatgccaatgcaaccgtgactactttgggagattggtagtctcttttgatggtgatagtgatggggtgcactatcataatcacatcaggtctgctttttgcttttaatgtaaactaatgaagttccagagatgggccttagaaatgtgttttaagaattaacaaggagtctcaaaaagaaatgagagggatgcttcctttcccttgcatctacaaaacaagagagagactgttctgttgtaaaactctttcaaaaattctgatatggtaaggtacttgagacccttcaccagaatgtcaatctttttttctgtgtaacatggaaacttgtgtgaccattagcattgttatcagcttgtactggtctcataactctggttttggaagaataatttggaaattgttgctgtgttctgtgaaaataacctccccaaaataattagtaactggttgttctacttggtaatttgacaccctgttaataacgcaattatttctgtgttcttaaacagtataaatagttgtaagtttgcatgcatgatggaaaaataaaaacctgtatctctgtttnnnnnnnnnnnnnnnnnnnnnnnnnncnnnnnnnnnnnnnnaaaaaaacnnaaaagggggccgctttaatatccccctcgagggggccaagactttacggaaccccagttttttgtgaacaaaggggccccataaagggaggcccttttttaacttaggccttggcccccccttttttacaactcccgggcctgggaaaactgctaactctggggaaccttttggaaaggaaccttccctcttgtggggggggccaaaattcgggcacaccccccctccgaaatttttaacagccccaacggcgaatataaaattttttacgggataaacgggggtaaaacaaccgcgaataactctcgctccctaaaaagatttttctctttctggggtcgttttttctacaattgtttaccacccgcgccgggggctcccaac

SEQ ID NO: 354163 - DNA, 250 bp, Homo Sapiens
  misc_feature (57)..(57): n is a, c, g, or t
  misc_feature (62)..(62): n is a, c, g, or t
tggccaggaaagtagatcacctgtgtgtgaggcggccacacccctcataccagcatnaagtnagtagcttcccaggagtgaccaaatgagtccaggcactgccggaagccagagtggcatcccgctgaactctagctaggagctcattcgggggctgcaaactcgaactcaagagtctcaaacccagaccgccactcctaccacccacacgccccatgatttcagcagcaccaagtttcctgtattaaat

SEQ ID NO: 354164 - DNA, 1630 bp, Homo Sapiens
  misc_feature (291)..(585): n is a, c, g, or t
ctgcttatcttgccccatccccgttagtccaaactcaagaggcagcatggagcgtggtctgcttccccactactcacggctctgcaatgtgggcaccaaggggccaacccttgcctttgccggaaaccctggagaacggtgacgtgaaatccacctgttttcctcatccccaagcaaacagaaccctgctgtaagttaatgaaaagtatagaaaaaccctgctgtaagttatgagaagtatagaaaaccatgctgtaagttaatgaaaagtatggaaaacagtctacttcnnnnnnnnnnnnnnnnnnnnnnnnnnnnnnnnnnnnnnnnnnnnnnnnnnnnnnnnnnnnnnnnnnnnnnnnnnnnnnnnnnnnnnnnnnnnnnnnnnnnnnnnnnnnnnnnnnnnnnnnnnnnnnnnnnnnnnnnnnnnnnnnnnnnnnnnnnnnnnnnnnnnnnnnnnnnnnnnnnnnnnnnnnnnnnnnnnnnnnnnnnnnnnnnnnnnnnnnnnnnnnnnnnnnnnnnnnnnnnnnnnnnnnnnnnnnnnnnnnnnnnnnnnnnnnnnnnnnnnnnnnnnnnnnnnnnnnncaaagcagtctgctttgtgcagtgttttcagtaataatccaactgtgaaaacccaactgtgaagacttagggagagagagctgctaccttagcgggtactcagcaggcagccggggagtggtaggcacctgagagctcctgatggtaaccaggcagacttcggagaaggaagcgcggggccctgctgcctgggatcccagcagtggagccggctttttggagcaggaggcactgagggggtgttcaggctttccccccatgtttccccattcagggaaggggttgtacaaaagaggaacgcactgtccagtaacgctgcggcgccgtgggcagctctgagcgtggcggtgattggcagcaagtgtgtgagacttggctgtgaaccctgcagccagctctcaggtcagggtgcaggtgccctcagcacactcagcatcccaggaaaggggcggcctcgccccacctccctcccacggccacataccacaggtcccaggggtgcctccggtattgaggctgccttgcctccctttgtccgcactgtccctgtccccttgtgccacctgtgcagacttgagaatggagctcactgtggtgttcatgccggggcctgtctagctcctcaccccacgatttgaccagtgccacaccacgggaccttgtgtgacctcgggcctgcgtcctctggaaaacagctgtggagtggtgtgatgaggacaggtgccttggaaagcatcaggaccttgtgagcacgaggcagctgccagcactccacgttcccgccatgctctcctcaccgtgtgggcatccacctggccagcgccggctccgcagtgccccttcctctggtcgctcccgcgcagcatgcgaaaggtgttattctgcccgcgttctgcctttttcccacaccgggcccggaggagccacttgtttcgggggtcgttcgggacgtggtggatttgcagggtgacatcgcaaggtgtttgagaatgacacttgaggatgtttgaaatattgtgggagaggggagagcaacctggactcc

SEQ ID NO: 354165 - DNA, 902 bp, Homo Sapiens
  misc_feature (673)..(685): n is a, c, g, or t
  misc_feature (765)..(765): n is a, c, g, or t
tccagccacgtagagatttgggaaaagagtatttccaatagagtgaacagatttcaaatatgcgtgcattagagaatgattttttcaattctcccccaagaaaaactgttcggtttggtggaactgtgacagaagtcttgctgaagtacaaaaagggtgaaacaaatgactttgagttgttgaagaaccaggctgttagatccagacataaaggatgaccagatcatcaactggctgctagaattccgttcttctgtcatgtacttgacaaaagactttgagcaacttatcagtattatattgagattgccttggttgaatagaagtcaaacagtagtggaagagtatttggcttttcttggtaatcttgtatcagcatagactgttttcctcagaccgtgtctcagcatgattgcttcccattttgtgcctccccgagtgatcattaaggaaggcgatgtagatgtttcagattctgatgatgaagatgataatcttcctgcaaattttgacacatatcacagagccttgcaaataatagcaagatatgtaccatcatgagtatactttttccctattttgaatgtttaattctcaagaaaaatggtaatcaattaggtaaaaattataaaaaggttaatagtatttaaagctttgagtcctacattggcannnnnnnnnnnnngggatcccacctggagggaaacaattacattcctaacaaaaaagtggggaatttccaatttttccaattttaatcccccnttaaaatgggtttttccaaaaagtccggtatgccaaatttctctcccccaaattttttggtatggggaggggttgggaaatttttgggtttttaatccttccaacacagaatatgccctatcccccaaaattttttc

SEQ ID NO: 354166 - DNA, 1889 bp, Homo Sapiens
  misc_feature (84)..(84): n is a, c, g, or t
  misc_feature (162)..(209): n is a, c, g, or t
  misc_feature (1507)..(1528): n is a, c, g, or t
ggactccccctgcctttccctctcctggcctgtaaccctctggggattgggatgggggccggccgttcttcgcaagccccgatnggagggggaggctctgagccgatcctgccttcgcaccccccgcgccccgtcagtccctagcccagcttgccccgtccnnnnnnnnnnnnnnnnnnnnnnnnnnnnnnnnnnnnnnnnnnnnnnnnaagatggccgaaacgggctccccgtcttaacgatttggcgtctccctcgaccaccacctctttgtgcagcagcccccgggcagaccctgttccgagggcaacgctccccagtccccccacccccgaccccggaatcatgcatcggactacacggatcaaaatcacagagctgaacccccacctcatgtgtgccctctgcggggggtacttcatcgacgccaccactatcgtggagtgcctgcattccttctgcaaaacctgcatcgtgcgctacctggagaccaacaaatactgccccatgtgtgacgtgcaggtccataaaacccggccgctgctgagcatcaggtctgacaaaacacttcaagacattgtctacaaattggtccctgggctttttaaagatgagatgaaacggcggcgggatttctatgcagcgtaccccctgacggaggtccccaacggctccaatgaggaccgcggcgaggtcttggagcaggagaagggggctctgagtgatgatgagattgtcagcctctccatcgaattctacgaaggtgccagggaccgggacgagaagaagggccccctggagaatggggatggggacaaagagaaaacaggggtgcgcttcctgcgatgcccagcagccatgaccgtcatgcatcttgccaagtttctccgcaacaagatggatgtgcccagcaagtacaaggtggaggttctgtacgaggacgagccactgaaggaatactacaccctcatggacatcgcctacatctacccctggcggcggaacgggcctctccccctcaagtaccgtgtccagccagcctgcaagcggctcaccctagccacggtgcccaccccctccgagggcaccaacaccagcggggcgtccgagtgtgagtcagtcagcgacaaggctcccagccctgccaccctgccagccacctcctcctccctgcccagcccagccaccccatcccatggctctcccagttcccatgggcctccagccacccaccctacctcccccactcccccttcgacagccagtggggccaccacagctgccaacgggggtagcttgaactgcctgcagacaccatcctccaccagcagggggcgcaagatgactgtcaacggcgctcccgtgccccccttaacttgaggccagggaccctctcccttcttccagccaagcctctccactccttccactttttctgggcccttttttccacctcttctactttccccagctcttcccaccttgggggtggggggcgcggcttttnnnnnnnnnnnnnnnnnnnnnngtacataggaaaaaccaaatatacatacttattttctatggaccaaccagattaatttaaatgccacaggaaacaaactttatgtgtgtgtgtatgtgtggaaaatggtgttcattttttggggggggtcttgtgtaatttgctgttttgggggtgcctggagatgaactggatgggccactggagtctcaataaagctctgcaccatcctcgctgtttcccaaggcaggtggtgtgttgggggccccttcagacccaaagctttaggcatgattccaactggctgcatataggagtcagttagaattgtttctttctctccccgtttctctccccatcttggctgctgtcctgcctctga

SEQ ID NO: 354167 - DNA, 1571 bp, Homo Sapiens
  misc_feature (515)..(537): n is a, c, g, or t
tattccttcatgcacattgcctcattatatccttgggtacgtacggagtctctcctcctctagttccttgtccagtgagcatgcgatcggcttcacgtagtccgtgcgcccacctcctccgatggcaccaacaccagcggggcgtcccagtctgaggcccggtcacctggtcaggacagagcaactgcatctaaaagcacaagaagacagaaacctgtaagctctgaccccacccccaccccttgagaggtcagcggaccacctccttagggacagaccctggcaggtcgctgcccaccgagatttcctcaagtgtgcatagatctgagaggagtcgggagtcgagactcgagattccatcatagcgtaggtgtgtggggttgggagccccctgatgggcttgtctgtgtttgcaccttgtcctgtgtctgaggtcctgtgactgtaccctcctttgccctgggacatctgtatctcttggctttgtaataaatgctgcatactttcgccgccgnnnnnnnnnnnnnnnnnnnnnnngacgaaaggaggcggggggggagacaggggaaaaaacgtgggcggccggcgaccggcctgtggcaggcttctccccccctcagagggggtccggggccgccgggcggcctgggacccccccgtgggccgcctgccaggggggggtcggcttttcccccagcgcgcccgggggttcgggcgcataagggtgggcgctgggacggcgaacatggagagtggtccccgggaccgaaccccaggggcgggtgccgcatcggaggacctcctcaaagggggaggccctctcagacgcgaaatgcgccaccggagcagctgtcacccccccgccggggtatccccaccaccagcggccgccgcccgcagtaggtgccgcgaatgtaaagcggggctggccgcgcgaccgacgggggcggaagcccgcctgggtgggggaggcgatgcgctttcggcgggaggtgggaagaccgggcccttgtggtgggcgcgcgcgccccccttatctccctctggggcgacagggggggaggctgtggcgaggtctagaggggcgcgtccggcccgcgcgagagaacacccccgccccgcactaatgggggtgtgggggcccgacgcgcgtcgacgtaactttatttgcccaccccccgcggccggctgtagggtgtcaccccgcgacccgagccgcgcctgtggagtcgatcgcccccggcgcgtgccggcgcacagaaataaaattagggggtgtctggcgcccgcccacttcgtggagacgcggtggagtagcctccgggggtgtgtggggccagcgcaccgaactggacgagttgctgctagaagccctaccgatattttgctggggccccggcgccggggacggggcctggatgaggcgcccacatgagcgcgcggcccggccgcccgtattcctttcacaagcgcgctcgtggcgggatagcgtcttatggttgcggcgagagtaggactgagcgtcactgtgtgcggggccgggacgcccccagacgcgccaagcagcgggg

SEQ ID NO: 354168 - DNA, 1388 bp, Homo Sapiens
  misc_feature (166)..(216): n is a, c, g, or t
  misc_feature (700)..(702): n is a, c, g, or t
  misc_feature (707)..(707): n is a, c, g, or t
  misc_feature (710)..(710): n is a, c, g, or t
  misc_feature (720)..(721): n is a, c, g, or t
  misc_feature (724)..(724): n is a, c, g, or t
  misc_feature (726)..(733): n is a, c, g, or t
  misc_feature (735)..(737): n is a, c, g, or t
  misc_feature (740)..(742): n is a, c, g, or t
  misc_feature (744)..(744): n is a, c, g, or t
  misc_feature (770)..(770): n is a, c, g, or t
caagatgactgtcaacggcgctcccgtgccccccttaacttgaggccaggtaccctctcccttcttccagccaagcctctccactccttccactttttctgggcccttttttccacctcttctactttccccagctcttcccaccttgggggtggggggcgggttnnnnnnnnnnnnnnnnnnnnnnnnnnnnnnnnnnnnnnnnnnnnnnnnnnncttattttctatggaccaaccagattaatttaaatgccacaggaaacaaactttatgtgtgtgtgtatgtgtggaaaatggtgttcattttttttggggggggtcttgtgtaatttgctgtttttgggggtgcctggagatgaactggatgggccactggagtctcaataaagctctgcaccatcctcgctgtttcccaaggcaggtggtgtgttgggggccccttcagacccaaagctttaggcatgattccaactggctgcatataggagtcagttagaattgtttctttctctccccgtttctctccccatcttggctgctgtcctgcctctgaccagtggccgccccccacgttgttgaatgtccagaaattgctaagaacagtgccttttacaaatgcagtttatccctggttctgaggagcaagtgcaaggtggaagtggcacctgcatcacctcctcctcttgcagtggaaactttnnncaaanaanaaaaaaaacnnccncnnnnnnnnannnccnnngngtgtggcctttgcatcatttatcttntggaaaagaagattcaggccctgagaggtctcagctcttggaggagggctaaggctttagcattgtaaagcgctgaacccccacaaaccttaccctcaccggggaaccctcactaccaggactggtggtggagtctcacctggggcctagagtggaagtgggggtgggttaacctcacacaagcacagatcccagactttgccagaggaaaacagccttccaattgcccctccacccccagatgaggcccgatcacctggtcaggacagagcaactgcatctaaaagcacaagaagacagaaacctgtaagctctgaccccacccccaccccttgagaggtcagccgaccacctccttaggaacagaccctggcaggtcgctgcccaccgagatttcctcaagtgtgcatagatctgagaggagtcggggagtcgagactcgagattccatcataccctaagtgtgtggggtttgggaagcccccctggagggggcttggtctggggtttgcaaccttggcccctgggtcctggagggtccttggggaactggaaccccctccccttttggcccctgggggaacaaatccgggaatcccccccttggggccttttttg

SEQ ID NO: 354169 - DNA, 431 bp, Homo Sapiens
  misc_feature (289)..(289): n is a, c, g, or t
tagcccatagttcaagggcataaccctgtcagaagattctgagactatgacagttgcctggctcttctccctatggattcttaggtaccaagattcttgaggctcaaataaaaatcatgattcataaatataaaggcctttgattcacactgtattcttagagactcactccttgtgtatctcaggacatggtgtctccactgccaatatcctgcctgaagccaagccaaggccctcgaaactcattttatttgcttgcctttttatgagaattacaggggacctggtnccagataattacctaatttcccactctaaaaatagctagctctggggggcagggaagaaaatattaggagaaaacacttttgtaataatctctacctcaaggaaactaggagttaatgcacacactcacagcagaggaataa

SEQ ID NO: 354170 - DNA, 827 bp, Homo Sapiens
  misc_feature (81)..(167): n is a, c, g, or t
  misc_feature (173)..(173): n is a, c, g, or t
  misc_feature (520)..(666): n is a, c, g, or t
acaagtttacaattactgaagatttactctaagctagttgctgttctaagatgttctgcatatatcaacacattgaatttnnnnnnnnnnnnnnnnnnnnnnnnnnnnnnnnnnnnnnnnnnnnnnnnnnnnnnnnnnnnnnnnnnnnnnnnnnnnnnnnnnnnnnngtgacnatttgaaaatggcagggaagttggggttcaaagccagaagtctgactccagagcccaccctctaacaagctagacatattgcctctttacagtgtatgataagtgcttgccaaatgcatgtaagaactgactatccagctaagtttctccaaactagataactgtctttaagcagggaccttgctgcctgtgcccctcccagctctctctccagtcaccactacagagcacaatgcatggtgccttcttcacaagcaaataccttctcccttcttcaaatcctgactacagatccagggtagcaccatataccacacctccctaaaaaaagaatggttataggcagnnnnnnnnnnnnnnnnnnnnnnnnnnnnnnnnnnnnnnnnnnnnnnnnnnnnnnnnnnnnnnnnnnnnnnnnnnnnnnnnnnnnnnnnnnnnnnnnnnnnnnnnnnnnnnnnnnnnnnnnnnnnnnnnnnnnnnnnnnnnnnnnnnnatgtgcctgtaatcccagctgggctgtgccggaaactgaccggaacagggattatgagaaaatagtcgggcaaaccaggagtaagctcaaaatcggaggctcaagagcagtttcaagctgggctgtgccagaaattgactggaatagggactatgagaaaa

SEQ ID NO: 354171 - DNA, 328 bp, Homo Sapiens
aaagcgctgatggaattaccctgctagggaaccagcatacatatgtcattcctttgtacagtatttttacaagtatttgattttgtttaccctaatttatccaactcaggaataaaaaggaatctcagatctatgagaaggacctccaatttctcattctcagcttcaaaacaaattagtcagtttaacattagtcaagacacaggttgctgtgaaataagaatgattctaggtcatgattaagatggttctccaaactatcaacaagactgtctaatcacctgttatgaacccaacactgttaaacagcaatggcatgtacaaaaga

SEQ ID NO: 354172 - DNA, 809 bp, Homo Sapiens
aaggccccccatccacccgaatttggtccccccttgaacaggggaccaagctatcctcacaatttctgcctctatcttgcgtagtctggggaagatatctggatgcagggggttactccatgcaaaatctccataagctttcacaaggagctcagtgagcttctcctccccactgtacactgttccagaggctctcccttcttgccagaaggcgtccatagagctgtactccttaagtttctccaaaacagcagatgagctcagaccctgggagggtaaagctttcacatactctttgtccactttcaggaatgacatgttcttgctaatatcatccttggtcttgttcaacttgtcttgaatcttacgaccaataatgggcatcttcctggtgagcttaaaacatttctttttaaaccttgaccataaactctctggctggaagacaaactcatatccccagactatcagcagggtccacacgacactccatgcaattagctgccagggctcatacttggtgcaatgtccatttacataattcttggcttttgtggagtatacttccaaaatctctaagtagggctcaaaggccttcaacatcagaaggtctgtgctaggcatcttcctcttccagcctcctctccgcgctcccctttttcagactcggaaccagcttccagtctccttccctcgagcacccggccggctccacctcctgcgtctccctcagcacgcgacggactcgcaggccgcgagacccaggctcccctgttgccgccgccgccgccgagattggaggcccgccc

SEQ ID NO: 354173 - DNA, 1690 bp, Homo Sapiens
  misc_feature (1180)..(1209): n is a, c, g, or t
aagcggaggaacttcagtttgttggctgcggcagcaggtagcaaagtgacgccgagggcctgagtgctccagtagccaccgcatctggagaaccagcggttaccatggaggggatcagtatatacacttcagataactacaccgaggaaatgggctcaggggactatgactccatgaaggaaccctgtttccgtgaagaaaatgctaatttcaataaaatcttcctgcccaccatctactccatcatcttcttaactggcattgtgggcaatggattggtcatcctggtcatgggttaccagaagaaactgagaagcatgacggacaagtacaggctgcacctgtcagtggccgacctcctctttgtcatcacgcttcccttctgggcagttgatgccgtggcaaactggtactttgggaacttcctatgcaaggcagtccatgtcatctacacagtcaacctctacagcagtgtcctcatcctggccttcatcagtctggaccgctacctggccatcgtccacgccaccaacagtcagaggccaaggaagctgttggctgaaaaggtggtctatgttggcgtctggatccctgccctcctgctgactattcccgacttcatctttgccaacgtcagtgaggcagatgacagatatatctgtgaccgcttctaccccaatgacttgtgggtggttgtgttccagtttcagcacatcatggttggccttatcctgcctggtattgtcatcctgtcctgctattgcattatcatctccaagctgtcacactccaagggccaccagaagcgcaaggccctcaagaccacagtcatcctcatcctggctttcttcgcctgttggctgccttactacattgggatcagcatcgactccttcatcctcctggaaatcatcaagcaagggtgtgagtttgagaacactgtgcacaagtggatttccatcaccgaggccctagctttcttccactgttgtctgaaccccatcctctatgctttccttggagccaaatttaaaacctctgcccagcacgcactcacctctgtgagcagagggtccagcctcaagatcctctccaaaggaaagcgaggtggacattcatctgtttccactgagtctgagtcttcaagttttcactccagctaacacagatgtaaaagacnnnnnnnnnnnnnnnnnnnnnnnnnnnnnnaagttacacatttttcagatataaaagactgaccaatattgtacagtttttattgcttgttggatttttgtcttgtgtttctttagtttttgtgaagtttaattgacttatttatataaattttttttgtttcatattgatgtgtgtctaggcaggacctgtggccaagttcttagttgctgtatgtctcgtggtaggactgtagaaaagggaactgaacattccagagcgtgtagtgaatcacgtaaagctagaaatgatccccagctgtttatgcatagataatctctccattcccgtggaacgtttttcctgttcttaagacgtgattttgctgtagaagatggcacttataaccaaagcccaaagtggtatagaaatgctggtttttcagttttcaggagtgggttgatttcagcacctacagtgtacagtcttgtattaagttgttaataaaagtacatgttaaacttaaaaaaaa

SEQ ID NO: 354174 - DNA, 797 bp, Homo Sapiens
  misc_feature (746)..(746): n is a, c, g, or t
aaaaaaaagttttatgcttgttaatttcataaatgctagagggatcaccctaatcaaataaagctactcaaaaataaaatatgaaaggtgttagtgggatacagctttctagttttttgccactagtggataggttggaatttaaattcttcggatattggaaccagaacaggctgtaactgattatttttgctgtgattcgtgcttactggagcctcgggaaagagggagacaacatgtaaagagaagcaatctgtttggaaaatgaaaatacagttaaattgctaatgaacccttgtcaaaatcaaatgtctccccttagaggctgatgattgtctagtctaatatgcaattttttttgagtgggtcaattggactctaagaccaacaagataaaaaggcagccttgcatgtcacttggaccacagctgtctggccatgcagcatgccttcactgctgctgaagaaaagcagctgcttgttgagaatctcaaattctcagatcctaattgcctggccctgactctaagctgaaacctgctactgtctgccttgagctgttttagcctcaacacgagctatgctgaactgaaagcaggcacaggctcaatgaccaggactcagacgttggggccgttggagattaaggaccccctccgtggagcgctaaactatgaaaacgtcctgggaacctgggctgaaaagggcttattctctaaatggggaccattttaaggttcaagctngttgatagggtcttttgtcttcttaattacagagggttaatttgcatttcc

SEQ ID NO: 354175 - DNA, 813 bp, Homo Sapiens
tggagaaggtgtcagggaagtctctaaccactccctcgcccttctattcagccatccttaccggctttcagcccgcagtctgtgacgatgccgaggaggcctggcgcagccacatcaaccagcttatgtgtgactcagatggctcctgtgctgtggtatacatttcatgtgttctcctccttgtttaagaatattcagaaaaggttctgcttcctaacctgtgatgcagccagttaccttggagataacctccggggaatcggatccaaatttgtcagctcttcccagatgctcacctcctgctctgaatgtcctacactttttgtggatgccgagactctcctttcatgtggacttctggacaagctcaagttcagtgtgttagaactgcaagaatatttggatacctacaacaacaggaaagaggccacactctcttggcttgcaaattgtaaggcaacatttgcagggggatcaagagatggagtaattacctgtcaaccaggggactccgaagaaaaggtaataaaagcctgttagaatgggtctcttgtgtgctctaacattgtgtattagttttggtctacccaagaagcctggaacttgagaaaagaagaggcggaatgagtcaccccaaacatttacatgaaaccaacagagtaagacagaatgccttccagcatgactgtgtgttgatgggattggggggaagggttttttcgttttggaaaagtagaggtataaaataaccttttttgctggatactgtctaactatactaataatttcccaataaatgtattcttaattcag

SEQ ID NO: 354176 - DNA, 462 bp, Homo Sapiens
  misc_feature (317)..(354): n is a, c, g, or t
atttccatgccagtgtataaatatgcatcaaaagcagcttcatagtaagagcagacgtgatccttaaagagagtgctatctggatcagttatggtggcaaagagatgcaggacttgcagaaacagtagcctagcaacataagaaaggtacttcatagcagctccttttagatacagtaattgtattcaaattacagtgtacattacattgcagtccatttacaattcccttttcacatacacaggctgtcagcttttgaccatcttacagttttcagtggccagcttcattttgcctgcccctttctcagcccacgnnnnnnnnnnnnnnnnnnnnnnnnnnnnnnnnnnnnnntggaacaagacagggaaagaatatacatgtttgagaatataaaattttttgagtgaagaaaacattgcacttttgccaatctaaaattgtttctagaaaggaaggtac

SEQ ID NO: 354177 - DNA, 1691 bp, Homo Sapiens
ggaggcggtatgatgagctgcagaattcttctgggcgtgatgggaagcccagggccatggccgtcacccggagcacatcttccacttcctcaggctccaactccaacgtccttgttccagtgagctggaaaaggccccagtattctcagaagagaacaaaagagaagttggtacatgtcctttctctgtgtggccaagaagtaggattgagcaaaaatccatcagtgattttttcatcgtgtggggatctggatctgcttgagcaccagacaagcttggtatcttctgaggacggtgcccgagagcaggagaacatggatgacacaaacagcgagcagcagtttagagtcttcagagacttcgacttcctagatgtggagctggaggatggagagggtgagagtatggacaatttcaactggggagtgcgcagacgttctctggacagcctggataagtgtgatatgcagattctggaggagcgccaactgtcaggaagcactcctagcctgaataaaatgcaccatgaggactccgatgaatcatccgaggaggaggacctcacagccagccagatcctggagcactcagacctaatcatgactctctccccctctgaagagacgaatcccatggagctgctcaccacagcctgtgactcgacccctgcagaacctcattcctttaacaccagaatgtccagctttgatgcttccttgcctgatatgaataatctgcagatttctgagggttcaaaggctgaagctgttcgtgaggaggaggacaccaccgtgcatgaggatgatctttctagttccatcaatgaactcccagcagcttttgaatgcagcgacagctttagcctggacatgactgagggggaagaaaaaggcaatcgggcactggaccagtttaccctggcgagctttggagaaggtgacaggggagtctctccccctccctcgcccttcttctcagccatccttgccgcctttcagcccgcagcctgtgacgatgccgaggaggcctggcgcagcacattcaaccagcttatgtgtgactcagatggctcctgtgctgtgtatacatttcatgtgttctcctccttgtttaagaatattcagaaaaggttctgcttcctaacctgtgatgcagccagttaccttggagataacctccggggaatcggatccaaatttgtcagctcttcccagatgctcacctcctgctctgctggacaagctcaagttcagtgtgttagaactgcaagaatatttggatacctacaacaacaggaaagaggccacactctcttggcttgcaaattgtaaggcaacatttgcagggggatcaagagatggagtaattacctgtcaaccaggggactccgaagaaaaggtaataaaagcctgttagaatgggtctcttgtgtgctctaacattgtgtattagttttggtctacccaagaagcctggaacttgagaaaagaagaggcggaatgagtcaccccaaacatttacatgaaaccaacagagtaagacagaatgccttccagcatgactgtgtgttgatgggatttgtggggaggtttcttcgttttggaaaagtagaggtataaaataaccttttttgctggatactgtctaactatactaataatttcctaataaatttattcttaattcagatt

SEQ ID NO: 354178 - DNA, 1848 bp, Homo Sapiens
  misc_feature (475)..(475): n is a, c, g, or t
  misc_feature (698)..(736): n is a, c, g, or t
  misc_feature (1835)..(1835): n is a, c, g, or t
ttttttttagtctaaagaaagttctgaacagaatatcaattaagcttacatcacaaaaactttaaatgtatttacagagtgaataagttacatagataaactctgaatatgtttctgcagtgcaacaagttcacatgcacacatctaacacttgacagcattaagtttaaggagagaacttaagaatggccctttacatatatattacacataaaatatgacatcgaagaaacaaagtaacaactcatattttacctttatgattctacttctgactatccaaacagatattaaaatatgcatgcctgacaggtgaaaagacttggaatttatcttgtgaatagttttctctacaaaacggcaaagttaattaaaattaacactcatccttcagcagtataaatatgctcataaaagcaaccttctagtaaaaagcagccaagatccttaaaaagagtctatctggaccatttgnggtgcaaagagatccagggctttcagaaacagtagcctagcaacataagaaaggtacttcatagcagctccttttagatacagtaattgtattcaaattacagtgtacattacattgcaggccatttacaattcccttttcacatacacaggctgtcagcttttgaccatcttacagttttcagtggccagcttcattttgcctgcccctttctcagcccacnnnnnnnnnnnnnnnnnnnnnnnnnnnnnnnnnnnnnnntggaacaagacagggaaagaatatacatgtttgagaatataaaattttttgagtgaagaaaacattgcacttttgccaatctaaaattgtttctagaaaggaaggtactgttcagtgtagtcggctttggtatgcaacggaagtcacttcttcagtagcgagttgcatatgctcggtcaaatgtaacacatttgtgccacacagcatgatgagtggagtctgtccaggacgttctaagctaccttggttcttatagtattgctacacgttggaagttctgccatcctctttagaaaaagccctacaggtaacaagagggagaacagtctgtccaagccttttgaaggccgagaagacactgaatgacgttgccccagcatggcagcactgccagtttggaacccagtggggacaggaggctcctgtcagagactagtgccagaaacactggagtctggaagaaaagtagtgaggactcggtaactctgggccctgcggatcatgtcccggatctccatgttcagctccatcagcttggtgcagatctcggtcaggctctggttagaccccaccagggcataagtacccgtctgtcccagagtttggtgacggaaataaatattcagtagtgtctggacctcatcatcagaactgcttccaaagatgtcattgggccacagacttctgcactccctgatctgccgcaaagctttgccgagttcgttgttcttcaggcactccagcatggactggatggctgcttcagtggacgtgaaggtgggctcggaccacgcgccgtctgaatagagagggtcagctgcaatgactgcactggcttccttcaggtgtttctttaggtcactcagttccctggacatattcagcagctctggcatggagctaacttcgtgcacctggccgatgagcttacagtaggactgaaaaagcaatagcagctggaagtgtagcttatataatctctgacacagttccaattgtgcaagagattccatttgcttttcttcggagtcccctggttgacaggtaattactccatctcttgatccccctgcaaatgttgccttacaatttgcaagcnaagagagtgtggc

SEQ ID NO: 354179 - DNA, 474 bp, Homo Sapiens
  misc_feature (197)..(197): n is a, c, g, or t
  misc_feature (335)..(335): n is a, c, g, or t
  misc_feature (407)..(407): n is a, c, g, or t
  misc_feature (446)..(446): n is a, c, g, or t
  misc_feature (456)..(456): n is a, c, g, or t
catgccagagctgctgaatatgtccagggaactgagtgaccctaaagaaacacctgaaggaagccagtgcagtcattgcagctgaccctctctattcagacggcgcgtggtccgagcccaccttcacgtccactgaagcagccatccagtccatgctggagtgcctgaagaacaacgaactcggcaaagctttgcgncagatcagggagtgcagaagtctgtggcccaatgacatctttgggaagcagttctgatgatgaggtccagacactacttgaatatttatttccgtcaccaaactctggggacagacgggtactttattgccctgggtnggggtcttaaccagagccttgaccgagatcttgcaccaaggcttgatgggagctgaaacatgggagatcccngggacatggttccgcaggccccagattaccgagttcctnattatttttntttccagattccatgttt

SEQ ID NO: 354180 - DNA, 1200 bp, Homo Sapiens
ggtccggaattctcgggatatcggccccgggtctgtccgggcgttgcgggattggggcctgggaacgctcggcccccggcagccgagaagcccgtgactgggctgagcagcaccatcccagccctggggcctgctgactgcgaacccggagcgttgctatcctccaccggactgtcaggctctgcgcgccccgcggaggtcggcggcgaccagcagcgactgcggagcgacggcgggcggccccgggcatgtacgcccccggaggcgcaggcctgccccgcgggcgcccgcgggaggaccccgggaggcagcgctctgcccaagcagccggagcgtagcctggcctcggccctgcctggcgccctgtctatcacggcgctgtgcactgccctcgccgagcccgcctggttgcacatccacggaggcacctgtacgcgccaggagctgggggtctacgacgtgttgggctatgtgcacccggacctgctgaaagatttctgcatgaatccccagacagtgctgctcctgcgggtcatcgccgccttctgtttcctgggcatcctgtgtagtctctccgctttccttctggatgtctttgggccgaagcatcctgctctgaagatcactcgtcgctatgccttcgcccatatcctaacggttctgcagtgtgccaccgtcattggcttttcttattgggcttctgaactcatcttggcccagcagcagcagcataagaagtaccatggatcccaggtctatgtcaccttcgccgttagcttctacctggtggcaggagctggtggagcctcaatcctggccacggcagccaacctcctgcgccactaccccacagaggaagaggagcaggcgctggagctgctctcagagatggaagagaacgagccctacccggcggaatatgaggtcatcaaccagttccagccaccccctgcttacacaccctaatgccagccctgggctctcttcctcggcagcccctccctcaactctgcagctcctctcgcacccagaggagctcctttccccagcaggcctcactggtaggatcctgaccatcttctccaaaccttccccaggagagactctgcctttagggtcatccaagtatccctgctctcagaaccggaggtccactggttttctataatgtactctttccctcctgccacatcctgcccc

SEQ ID NO: 354181 - DNA, 414 bp, Homo Sapiens
  misc_feature (62)..(62): n is a, c, g, or t
cctggccgatggtggggtcgtctgtattgacgagtttgacaagatgcgagaagatgaccgtntggcaatccacgaagccatggagcagcagaccatctctatcgccaaggctgggatcaccaccaccctgaactcccgctgctccgtcctggctgctgccaactcagtgttcggccgctgggatgagacgaagggggaggacaacattgacttcatgcccaccatcttgtcgcgcttcgacatgatcttcatcgtcaaggatgagcaaagatgtggtaaaggggccacggtggaggctgggaagctggaaatctgaggcctctagactgggatgcagggcacacggggccagtgcgaagacggaaccggtgctctggcagcgggtgccgtgggctaggatgactttctgtagat

SEQ ID NO: 354182 - DNA, 674 bp, Homo Sapiens
atgacctgtagcccatgtgtatacaaccctttcctgcacgtctgcacacggagtaaccagaacccagccagcacgggtgaggaccagatgagagatgggggctgcagcagcaaagtctgggacggaggtctcagagagccccttggggtggcgaaggccctccacacatcagagctccagaccctgaagaagagggcagagctacatggtgctgccaggtgagtcctgcaccgccaggcctcctgtgggaggggcaggaatggccaacggacctcatctccatccgagcctgtctgaggcaggacagctgggtgtgtctgagaagcaatgtcatgctagtactcagcccctgtgccaatattacattctagttctggggcaattcatcaggagcagaagggctgggaaagagcaggccactccccaggcctgttctcacacctgcctgcagattcacaggtaggtttcaggctccatctaggataccctagaaggcggggctattctaggtagcaaaagcctctgcctctggattcttcacccacatggcagaagcagttcacaactttggcacacaacacagcttcacaactaggggaaagcatttgtttaaaggagaatgcccccagggtttgggccaggcatgcccgattacagttgttttcccatggccc

SEQ ID NO: 354183 - DNA, 789 bp, Homo Sapiens
aaagagcaggccactccccaggcctgttctcacacctgcctgcagaatcacaggtaggtttcaggctccatctaggataccctagaaggcggggctattctaggtagcaaaagcctctgcctctgattctcacccacatgcagaagcagtcacaacttgcacacaacacagctcacaactagggaaagcacttgttaaagagaatgcccccagggcatggccagcatgccgatacagtgttcccatgcccctgttactgatcctgtcctcctgccttctagaacagtggacctcacatcacctcccagattgtttccattttatggattgaaactctgaggcctccagacatgaagaagcagccatagattcagtcaaatgccagccaagggtttgccttgcctcagacaacctccccagccccatttgacccagagaccagctgtcagggagcgacctcagagccagaggggtgaaagatgagaggcaagaaggtagctcctatcctagcacagcccaggctccatctgtctgcctttctctcccctgcggcatcctggcagggcagttggcagagtgccccctccccaggaggctgcagatctctgtccctggctcacccagatcggtctgttctctgcagttccattcctttagcctctttcgcaggtctgagcatctctggagcatgcaggggaggagatatctgaagtgggcttccgtgcaagtcagcagcctgccccagcttcagcctcaggcgtcaggctggtctgcgctgaactctgggtc

SEQ ID NO: 354184 - DNA, 2083 bp, Homo Sapiens
tttttttaatataaacccttgaataataaatgagtagaaagctggctccgggtccggaattccccggatggctcattctgctcccccgggtcggagccccccggagctgcgcgcgggcttgcagcgcctcgcccgcgctgtcctcccggtgtcccgcttctccgcgccccagccgccggctgccagcttttcggggccccgagtcgcacccagcgaagagagcgggcccgggacaagctcgaactccggccgcctcgcccttccccggctccgctccctctgccccctcggggtcgcgcgcccacgatgctgcagggccctggctcgctgctgctgctcttcctcgcctcgcactgctgcctgggctcggcgcgcgggctcttcctctttggccagcccgacttctcctacaagcgcagcaattgcaagcccatcccggccaacctgcagctgtgccacggcatcgaataccagaacatgcggctgcccaacctgctgggccacgagaccatgaaggaggtgctggagcaggccggcgcttggatcccgctggtcatgaagcagtgccacccggacaccaagaagttcctgtgctcgctcttcgcccccgtctgcctcgatgacctagacgagaccatccagccatgccactcgctctgcgtgcaggtgaaggaccgctgcgccccggtcatgtccgccttcggcttcccctggcccgacatgcttgagtgcgaccgtttcccccaggacaacgacctttgcatccccctcgctagcagcgaccacctcctgccagccaccgaggaagctccaaaggtatgtgaagcctgcaaaaataaaaatgatgatgacaacgacataatggaaacgctttgtaaaaatgattttgcactgaaaataaaagtgaaggagataacctacatcaaccgagataccaaaatcatcctggagaccaagagcaagaccatttacaagctgaacggtgtgtccgaaagggacctgaagaaatcggtgctgtggctcaaagacagcttgcagtgcacctgtgaggagatgaacgacatcaacgcgccctatctggtcatgggacagaaacagggtggggagctggtgatcacctcggtgaagcggtggcagaaggggcagagagagttcaagcgcatctcccgcagcatccgcaagctgcagtgctagtcccggcatcctgatggctccgacaggcctgctccagagcacggctgaccatttctgctccgggatctcagctcccgttccccaagcacactcctagctgctccagtctcagcctgggcagcttccccctgccttttgcacgtttgcatccccagcatttcctgagttataaggccacaggagtggatagctgttttcacctaaaggaaaagcccacccgaatcttgtagaaatattcaaactaataaaatcatgaatatttttatgaagtttaaaaatagctcactttaaagctagttttgaataggtgcaactgtgacttgggtctggttggttgttgtttgttgttttgagtcagctgattttcacttcccactgaggttgtcataacatgcaaattgcttcaattttctctgtggcccaaacttgtgggtcacaaaccctgttgagataaagctggctgttatctcaacatcttcatcagctccagactgagactcagtgtctaagtcttacaacaattcatcattttataccttcaatgggaacttaaactgttacatgtatcacattccagctacaatacttccatttattagaagcacattaaccatttctatagcatgatttcttcaagtaaaaggcaaaagatataaattttataattgacttgagtactttaagccttgtttaaaacatttcttacttaacttttgcaaattaaacccattgtagcttacctgtaatatacatagtagtttacctttaaaagttgtaaaaatattgctttaaccaacactgtaaatatttcagataaacattatattcttgtatataaactttacatcctgttttacctattctttgtcttctgtcttgtcttcttagt

SEQ ID NO: 354185 - DNA, 631 bp, Homo Sapiens
  misc_feature (504)..(504): n is a, c, g, or t
ggatcgacagcctcaccacagaaggcctttttaacaacctgtcccccaagacaaagggcactcctgtgcacctgggcaccatcgtgggcatcgtgctggcagtcctcctcgtggcggccatcatcctggctggaatttacatcaatggccaccccacatccaatgctgcgctcttcttcatcgagcgtagacctcaccactggccagccatgaagtttcgcagccaccctgaccattccacctatgcggaggtggagccctcgggccatgagaaggagggcttcatggaggctgagcagtgctgagaacaccaagtctcccctttgaagactttgaggccacagaaaagacagttaaagcaaagaagagaagtgacttttcctggcctctcccagcatgccctgggctgagatgagatggtggtttatggctccagagctgctgctcgcttcgttcagcacaccccgaatattgaagagggggccaaaaaacaaccacatggantttttataggaacaacacctaatctcatcctgctttgatgcaagggttctcttctgtgtctgtaaccttgaaacaccaaagaactaaatactaatccatattatttaagggccctacctatccggca

SEQ ID NO: 354186 - DNA, 1692 bp, Homo Sapiens
  misc_feature (1507)..(1507): n is a, c, g, or t
  misc_feature (1509)..(1509): n is a, c, g, or t
  misc_feature (1676)..(1676): n is a, c, g, or t
cacggaactcaactcggtgaatgtgatgccctctgccagccgggtgatcctcctggagaacctgacccgcttctggcccatcatccagattcgcataaagcgctgccagcagggtggcattgatacgcgcattcgggggttagagatcctaggccccaagcccacgttctggccagtgttccgggagcagctctgtcgtcacacacgcctcttctacatggttcgggcacaggcctggagccaggacatggcagaggaccgcacgagcctcctgcacctgagttctagactcaacggtgctctgcgccaggagcagaattttgctgaccgcttcctccctgatgacgaggctgcccaagctctgggcaagacctgctgggaggccctggtcagccccgtggtgcagaacatcacctcccctgatgaggatggcattagccccctgggttggctgctggaccagtacctggagtgtcaggaagctgtcttcaacccccagagccgcggcccagctttcttctcgcgggtgcgccgtctcactcacctgctggtgcatgtcgagccctgtgaggcaccccctcctgtggtggccactcttcggcccaaaggcagaaacagaagccacgactggagctccttggctacccggggccttccaagcagcatcatgagaaacctgacgcgctgttggcgggccgtggtggagaagcaggtgaacaattttctgacctcatcctggcgggatgatgactttgtgccacgctactgtgagcactttaatattctgcagaactcaagctctgaactgtttgggcctcgggcagccttcttgctggcgctgcaaaatggctgtgcgggagccttgctgaagctcccttttctcaaagctgcccacgtgagtgagcagttcgcccggcacattgaccagcagatccagggcagccggatcggtggagcccaggaaatggagaggctggcacagctgcagcaatgcctgcaagctgtcctgattttctccggcttggagatagccaccacttttgagcattattaccagcactacatggcggaccgtctcctgggcgtggtctcgagctggctggagggggccgtgctggagcagatcggtccctgcttccccaaccgcctcccccagcagatgttgcagagcctgagcacctctaaggagctgcagcgccagttccacgtctaccagctccagcagctggatcaggaactcctgaagctggaggatacagagaagaaaatacaggtgggccttggggccagtggcaaggagcacaagagcgagaaggaagaggaagctgggggcagcagcagtggtggatgtggcggagggagaggaggaagaggaggagaatgaggacctctactatgaaggggcaatgccagaagtgtctgtgcttgtcctgtcccgacactcctggcctgttgcctcaatctgccacacactgaaccccagaacctgcctgccctcctacctgangngcactttgaacagatactccaacttctacaacaagagtcagagccaccctgcccttgagcgaggctcacagaggcgactggccatggaacgtgggctggggctggggcttgagctggcagttttggggaaacccagacccctgccatgtgttccacccggtggcaanaatgtgggcttacctg

SEQ ID NO: 354187 - DNA, 423 bp, Homo Sapiens
  misc_feature (315)..(347): n is a, c, g, or t
gaatagcgacaggaatagatgtggtccttaggagacgctgcacttgacaccaaccagacagcacagggcaggggtggtggagggggctgggctcacaggcctctcttttccccgcctgcggtcttctgggctgcgggaggccctggccctttccccttcccctcccctccttgtctagtttcccacattccaaaagggggcctgggatgctagccccagagatgccagcccttcaggaagcaggtgtcctttcccctctctgcccctgatcactcccagcactccccttgccttcccctgtcttcacctgccacnnnnnnnnnnnnnnnnnnnnnnnnnnnnnnnnngcatggctttctataacttcttcctgctggacagagactcagcgctcctcctgtgtgactggcaagaggcctcatg

SEQ ID NO: 354188 - DNA, 1037 bp, Homo Sapiens
  misc_feature (30)..(30): n is a, c, g, or t
  misc_feature (38)..(38): n is a, c, g, or t
  misc_feature (40)..(40): n is a, c, g, or t
  misc_feature (54)..(54): n is a, c, g, or t
  misc_feature (59)..(59): n is a, c, g, or t
  misc_feature (82)..(82): n is a, c, g, or t
tatcaaccatatgtcccgcgctctgaatcntctatttntntctgattctcaganccctnttctgtctcctcttgctgaagcngtgagccaattgtagatcaccagaacactggactctatccatgccttgctgaaagctgtttctcccaaatgcaagtcaacatgttcctgaagaatatggtaatttgtacatatgagcccacacataggacaatcatagagtggttgatcacagtcttccaatggaatgtctaaaagattggcatgctttgttttcacatgagtttccatatcttcactgtgctcctctatttttccacagaatggacattcaggaggactgtatgttgtttcataaacagatccttttatttcggtcaggctggactgtttttccctacttttcaggaattttctagattcagttaagttctctgaatagaagccttcatgttttaaagtactatctttagtcaggttttgagctgaattttttggatgattagatgcacaacctgaaagaatacttgaattaacttccattccacactgtagggtgttgtctttcttgttatctgaagttccatattgtactgtatttatcctctcaaagtttctttcaagtgtattctgctcaaaatgagctgtttcgatatgaaaacacatttcatcataattcacacctgacaacttgcaaaatggacatataatttcactttccatgtgaacaattaggtgagctttcatgtctggttctgaggttactgtttcaccacaaatattacaggaaagcatggtattgacaagtagcggcccagaggccagcagctgccacactgagctccgctaggcttcccctttgggcctcgctggcagacgagtgcgtgcgcggcgtccagtacctctcctggcctgatgactgaggccaggccttcccaatacgcagagtttcacagttaaccgaggaaagaattaggaacttccaacaccttggccctcagtacctcattcaaaagcacttccttacatcccgggaa

SEQ ID NO: 354189 - DNA, 320 bp, Homo Sapiens
  misc_feature (94)..(94): n is a, c, g, or t
ccttcaagacttttgagacttgtcaatttctgaaccgtatcaaagatttgaccttagttctaacatacacaagacaatgtacacttctgtgaanatctgctgggagaccagtgaaactttccgtgcctgttttttcttgtgctgtaaaataactagactctgtagtgcctgctcctgcttcctgcaccagcgttggccaccatgcaggtcactgctccaactacatggctcattgcccttttcactaataaaaacactgccttctcaaatttacattttattcatcatgcacccttgggcttcttagagaaaaagactgt

SEQ ID NO: 354190 - DNA, 489 bp, Homo Sapiens
aactgtgcatggagtcactgtaggactcccgggagccccaggggtggtgggcgaacagaatattggtggactgaggcgttgggttgtgacgtagtataatagggcggcgggatgctgttgctcgtttcactgcggtagtcactgtcacgatcatccactgcactgtcggggtcatcgttgtgctgctcaccccagcccaaaataattcccagttgcagcactggttgctgggaacaggcagaggcttgtcttgctcatcttggaaggaatattcatcctggtcccgcatagcattgagctgctccagcttcttggctcagtagcgagcctcctcttcaggaatgtctaaggctagctcaaagcgcgtgtccaggagatgccgctggaaggtggggcccttggtgccacagatctcactgtctgccatgatgacctgggagtccagcgtcagccactctccaggccctcctcacgaaggggatgacacgg

SEQ ID NO: 354191 - DNA, 1335 bp, Homo Sapiens
atcaggccaaatcggccgagctcgaattcgtcgagagagagggactcccctggacacagaggtgcccatggagcgctgtttgactacagtgagtactgggagggggctaggggactgtacgcggccttcgactgcacggccaccatgaagtctggcaactcggacgtgtatgaaaatgagatccggggggccagtacaccaacctgcacttccaggcccacagcatggggcttggctccaagttcaaggaggtcaagaaggcctatgtggaggccaaccagatgctgggcgatctcatcaaggtgacgccctcctccaagatcgtgggggacctggcccagtttatggtgcagaatggattgagccgggcagaggccgaagctcaggcggaagagctgtcctttccccgctccgtggtggagttcctgcagggctacatcggtgtcccccatggggggttccccgaaccctttcgctctaaggacttcactgccacctttggccccctggatagcctgaatactcgcctcttcctgcagggacccaagatcgcagaggagtttgaggtggagctggagcggggcaagacgctgcacatcaaagccctggccgtgagcgacctgaaccgggccggccagaggcaggtcttctttgagctcaatgggcagctgcggtccatcttggtcaaggacacccaggccatgaaggagatgcacttccaccccaaggccctaaaggacgtgaagggccagatcggggcgcccatgcctgggaaggtgatagacatcaaagtggtggcaggggccaaggtggccaagggccagcccctgtgtgtgctcagtgccatgaagatggagactgtggtgacctcacccatggagggtactgtccgcaaggttcatgtgaccaaggacatgacactggaaggtgacgacctcatcctggagatcgagtgatcttgccccagaccggcagcctggccatccccaagccttcaacagaagctgtgctccaacggcaggcccaggccagccaagtgcccgaggccaggaaggccgggccgtggaggtcctgtccacagctggacaggagagacaccgcctgcggtggttcattcctttcagccatcgtcctttcctccggcggacagctgcttacatgttcatctcttgccaaataagggtcccctcctcactggagactacaagtggtgggtcaggtggtcctaggacccaggggaggtttaggggtcctatctcctgggggaaggggagatctaagatgtcccaggtcctgggaagtttactcaataaagctggctttcccctgccctcc

SEQ ID NO: 354192 - DNA, 383 bp, Homo Sapiens
  misc_feature (353)..(353): n is a, c, g, or t
agatcgtgggggacctggcccactttatggtgcagaatggattgagccgggcagaggccgaagctcaggcggaagagctgtcctttccccgctccgtggtggagttcctgcagggctacatcggtgtcccccatgggggtttccccgaaccctttcgctctaaggtactgaaggacctgccaagggtggaggggcggcctggagcctccctccctcccctggatctgcaggcactggagaaggagctggtagaccggcatggggaggaggtgacgccggaagatgttgctctcagcagctatgttaccccgatgtgttttgcccactttcaaggatttcacttgccacctttnggcccctgggattagcctgaataatttggc

SEQ ID NO: 354193 - DNA, 2099 bp, Homo Sapiens
  misc_feature (1576)..(1576): n is a, c, g, or t
  misc_feature (1611)..(1902): n is a, c, g, or t
gtcgggcggtggctgggatgggcgggagggcccggcccgatttcccttgctgctccccttgtggcctgacgctgacagaggcaaaaatctgctaactcagggggcagactcaaccaagactgtgagcaggcctggggaatgaccccccgatctccaaccagtgccttccgcagctgcacggctgtctccagctgtctctgcccctcttcctggccctggctccatctctctgtcacctcacccttccctgtgccacatgggccctctctctcctgccaggacgctgcggctctggggacctcggagcctgggggtggctctgggagtcttcatgaccattggctttgcactccagctcttgggagggcccttccagaggaggtacttcaggtcatgccttctgacagcttctttttttccattgtccgagacccagcggctctggctcgctctgccttctcctactataaatccacctcatcagccttccgcaaagtcaccatctttggctgccttcctggccaatccccgaaggcttctacaagcctggggcccgtggggaccactacgctcgcaacttactatggtttgactttggcctgccctttcccccagagaagagggccaagagagggaatattcatccccccagagaccccaaccccccacagctgcaggtcttgccttctggtgctggccctcgagcccaaaccctcaatcccaatgccctcatccatcctgtttccactgttactgatcatcgcagccagatatcaagccctgcctctttcgatttggggtcttcatccttcatccagtggggtctggcctggctggactctgtctttgacctggtcatggtggctgagtacttcgatgagtcattggttctgctggcagatgccctgtgctggggtctagatgacgtggtgggcttcatgcacaatgcccaggctggacataagcagggcctcagcactgtcagcaacagtggactgactgcggaggaccggcagctgactgcacgggcccgagcctggaacaacctggactgggctctctatgtccacttcaaccgcagtctctgggcacggatagagaaatacggccagggccggctgcagacagctgtggccgagctccgggctcgccgagaggccctagcgaaacattgtctggtagggggtgaggcttctgaccccaaatacatcactgatcgccggttccgccccttccagtttgggtcagctaaggttttgggctatatacttcggagtggattgagcccccaagaccaagaggaatgtgagcgcctagctacccctgagctccagtacaaggacaagctggatgtcaagcagttcccccctaccgtctcactgcccctcaagacttcaaggccactctccccataaacatcagactacagatttaggtggaagagcagccatgtttgaagggcacatgtgatgagtggggggcagcaagatgccatttctgcatctcccagaagggatgagtctttggcccgatgcaagccccctcttcgctgggctcccagcagggcttccctccnccaccccccactcattttgttcttcccccccaacnnnnnnnnnnnnnnnnnnnnnnnnnnnnnnnnnnnnnnnnnnnnnnnnnnnnnnnnnnnnnnnnnnnnnnnnnnnnnnnnnnnnnnnnnnnnnnnnnnnnnnnnnnnnnnnnnnnnnnnnnnnnnnnnnnnnnnnnnnnnnnnnnnnnnnnnnnnnnnnnnnnnnnnnnnnnnnnnnnnnnnnnnnnnnnnnnnnnnnnnnnnnnnnnnnnnnnnnnnnnnnnnnnnnnnnnnnnnnnnnnnnnnnnnnnnnnnnnnnnnnnnnnnnnnnnnnnnnnnnnnnnnnnnnnnnntccccttcccctttcctgccccaaggcagatccacatcaccgaagctccctagaggggcaaaagatggagtgagccacaggaagtttggggcgtggtgagttggaatgatacgtccatttctctatgaaatatttgctactagactgttcatttctctctgacatgtttgttgaatgaataaataatttgaaacttc

SEQ ID NO: 354194 - DNA, 1487 bp, Homo Sapiens
  misc_feature (104)..(104): n is a, c, g, or t
tgtcaagaagagccggaccctacccgactacctagaggactcgccgtcttgggtcccccccgcccaggcacgcccggaatggagcgccccgggacaaagtcggngttgggggcttcccggtgccaccggccctaagggagaatccggccatcggggcccaaagggattagaggccctccggtccacagggccccccagagagctctgcccgggcggagctgtgggcacccctgaagaaaggggacttcatgggccaccagggcctcctggccccctgggcccccagcccctgatgggccaccccatgcccggatctcccagcatggagacccattgctgtccaacacattcactgagaccaacaaccactggccccagggacccactgggcctccaggccctccagggcccatgggtccccctgggcctcctggccccacaggtgtccctgggagtcctggtcacataggacccccaggccccactggacccaaaggaatctctggccacccaggagagaagggcgagagaggactgcgtggggagcctggcccccaaggctctgctgggcagcagggggaacctggccctaagggagaccctggtgagaagagccactggggggaggggttgcaccaactacgcgaggctttgaagattttagctgagagggttttaatcttggaaacaatgattgggctctatgaaccagagctggggtctggggcgggccctgccggcacaggcacccccagcctccttcggggcaagaggggcggacatgcaaccaactaccggatcgtggcccccaggagccgggacgagagaggctgagggtggtggcggcccctgaggcagaccaggccaggcttcccctcctacctggactcggccagctgcctccagggaccgcccgtccatatttattaatgtcctcagggtcccttctgccatctaggccttaggggtaagcaggtctcagtcctggcaccatgcacatgtctgaggctgagcaagggctgagaggagaggcttgggcctcagtttccctctgtgaagtggggggaggcaggccttcaaggagggatagaggtacaaggcttcgtctcatctgctgtctgagcatccaggcccaaaggcactgagggagtcaggagctggggctcggcacatgcagagatgacagggcagggggcagtcttcctccccctccccgaccaaacctcggggagccctcctgtgcccctccctccttgttgtccagtgctgggctccccaccccgaggtcaggctgcccaatcctctgactggatcaccgggggcttcttgcctcagttcttccctctgagcccccaggccctcccgcatctcaggttggggatggggacatggagaggaaggggccgcctactcctgcaaatgcttgtgacagatgccaggaggtagatgtgtgctggccaataaaggcccctacctgattccccgca

SEQ ID NO: 354195 - DNA, 2052 bp, Homo Sapiens
  misc_feature (1820)..(1820): n is a, c, g, or t
  misc_feature (1824)..(1824): n is a, c, g, or t
  misc_feature (1830)..(1830): n is a, c, g, or t
  misc_feature (1854)..(1854): n is a, c, g, or t
  misc_feature (1866)..(1866): n is a, c, g, or t
  misc_feature (1876)..(1876): n is a, c, g, or t
  misc_feature (1890)..(1891): n is a, c, g, or t
  misc_feature (1893)..(1894): n is a, c, g, or t
  misc_feature (1897)..(1897): n is a, c, g, or t
  misc_feature (1905)..(1905): n is a, c, g, or t
  misc_feature (2037)..(2038): n is a, c, g, or t
  misc_feature (2046)..(2046): n is a, c, g, or t
  misc_feature (2049)..(2049): n is a, c, g, or t
ccgggatcggagctggaaaccggactccgcgcatccggggcggctgccggcgcgggcaggcaggcggggaggacaggctgggggcggcgaccgcgaggggccgcgcgcggagggcgcctggtgcagcatgggcggcccgcgggcttgggcgctgctctgcctcgggctcctgctcccgggaggcggcgctgcgtggagcatcggggcagctccgttctccggacgcaggaactggtgctcctatgtggtgacccgcaccatctcatgccatgtgcagaatggcacctaccttcagcgagtgctgcagaactgcccctggcccatgagctgtccggggagcagctacagaactgtggtgagacccacatacaaggtgatgtacaagatagtgaccgcccgtgagtggaggtgctgccctgggcactcaggagtgagctgcgaggaagttgcaggttcctctgcctccttggagcccatgtggtcgggcagtaccatgcggcggatggcgcttcggcccacagccttctcaggttgtctcaactgcagcaaagtgtcagagctgacagagcggctgaaggtgctggaggccaagatgaccatgctgactgtcatagagcagccagtacctccaacaccagctacccctgaggaccctgccccgctctggggtccccctcctgcccagggcagccccggagatggaggcctccaggaccaagtcggtgcttgggggcttcccgggcccaccggccccaagggagatgccggcagtcggggcccaatggggatgagaggcccaccaggtccacagggccccccagggagccctggccgggctggagctgtgggcacccctggagagaggggacctcctgggccaccagggcctcctggcccccctgggcccccagcccctgttgggccaccccatgcccggatctcccagcatggagacccattgctgtccaacaccttcactgagaccaacaaccactggccccagggacccactgggcctccaggccctccagggcccatgggtccccctgggcctcctggccccacaggtgtccctgggagtcctggtcacataggactgcgtggggagcctggcccccaaggctctgctgggcagcagggggaacctggccctaagggagaccctggtgagaagagccactggggggaggggttgcaccagctacgcgaggctttgaagattttagctgagagggtttttatcttacagagctcctgcagaaacaggctcagctggagctcctggccagacgggtcaccctcctggaagccatcatctggccagaaccagagctggggtctggggcgggccctgccggcacaggcacccccagcctccttcggggcaagaggggcggacatgcaaccaactaccggatcgtggcccccaggagccgggacgagagaggctgagggtggtggcggcccctgaggcagaccaggccaggcttcccctcatacctggaatcggacagatgcctccagagacaacccgtcccatatttattaatgtcctcagggtcccttctgccatctaggccttaggggtaagcaggtataagtcctggcaccatgcacatgtctgaggctgagcaagggctgagaggagaggattgggcctcagtttccctctgtgaagtggggggaggaaggccttaaagaagggatagaggtaaaaggcttcgtctaaatctgctgtctgagcatccaggcccaaaggcactgagggagtcagcagatggggctcggaaaatgcagagatgacagggaagggggaagtnttcntccccntccccgaccaaacctcggggagcnctcatgtgcccntccctcattnttagtccagtgctnnannccnacaaccgnggtcaggctgcccaatcctctgactggatcaccgggggcttcttgcctcagttcttccctctgagcccccaggccctcccgcatctcaggttggggataggggacatggagaggaaggggccgcctactccnncaaatgcnggngaa

SEQ ID NO: 354196 - DNA, 1389 bp, Homo Sapiens
  misc_feature (237)..(300): n is a, c, g, or t
ctcaacacctgtcgttctggaatcagaacacttggaaaaggctttccttggtacgggatgaagagttgatttacaattcctgccgaggtggtaaagctccggatggcaggttctctcctgagaatccggcttcaactaggaaggaggagccttggaagcaggaccccgagctgacctgttgacccaggagaggagtaagcagaagggaggcaggagcggcggaggagagaaggccgnnnnnnnnnnnnnnnnnnnnnnnnnnnnnnnnnnnnnnnnnnnnnnnnnnnnnnnnnnnnnnnntgatgccgagctgaaaatagacagtctccaggtaggataatccgtcacactagatgcatatagcttcattgcaagaagagcgactgttgcgctgtcttctaccccctgttggccgctgatcccgtgacaatgccggcatccgggcaccaactggcttttgcgaaccgctctccgctccccgcccggattccgaagcccggagccgtttacagtttgaggcgccgtgtgccgccccactggtggccggaggccgttactgtcgcggctgagggggcgtcccggtgtatccgcagcgcgccctggccgccctctggtggccggaggccgttactgtcgcggctgagggggcgtcccggtgtatccgcagcgcgccctggccgccccctggtggccggaggccgttactgtcgcggctgagggggcgtcccggtgtatccgcagcgcgccctggccgacccctggtggccggaggccgttactgtcgcggctgaaggggcgtgtcccggtgtatccgcagcgcgccctggctgccccctggtggccggaggccgttactgtcgcggctgagggggcgtccggtgtatccgcagcgcgccctgtcccgccatatacattccgtgcttttcaaacacccgccgtgggctaagcatgggacccacgtggggcgggcacacacggcgataaacagccaggccctcgctgccaaggagcttccccgtaagccaccgattgcatcaaacacaaaaggcaggcagtgaggattgcccagagttcatgggtatctagaagacaagttttcaactgcagatacaaacatcaggacgtcaatgtatctgctaggagacacccggacagtgttgagaacacagaacctggaggctaaacccccagctttctatgccagctgagagtctgtgggcacattactcagcgtctctgaacctcatgctcctcccctgtgacatgtagattgctaaacccatctcacagggctatcttctgcatttaaagaataaaaataaacacatggagcgggtccaaaaacaagcaaccaccacaacaaataccaacgaagaagacacaaaataa

SEQ ID NO: 354197 - DNA, 940 bp, Homo Sapiens
gggagctccggcaggtgaatcacttgaacccgggagttaagcccgcagtaacgctgttccctgcattggaatgaagttgctccccaccaactcttctcaccggagagggtgggatctgcgggctccctgggtggcttgatttcgacaccctgtggctgccttccactctggtactttcctctgcctgctgatgcttgaaattccttgaaccggccacacacacctgctttctggaatcagaacactggaaaggcttcctgggacgggagaagagtgatttacattcctgccgaggtgtaaagctgcggatggcaggttctctcctgagaaccggcttcaactaggaggaggaggttggaagcaggaccccgagctgacctgttgaccaggagaggagtaagcagaagggaggcaggagcgggcggaggagagaaggccggggagccgggatgggggtcaccgcccccggggagccgggatgggggtcaccgcccccgcccccgtgatgccgagctgaaaaagacagtctccaggtaggataatccgtcacactagatgcatatagcttcatgcaagaagagcgactgttgcgctgtcttctaccccctttggccgcgatcccgtgacaatgccggcatccgggcaccaactggcttttgcgaaccgctctccgctccccgcccggattccgaagcccggagccgtttacagtttgaggcgccgtgtgccgcccactggtggccggaggccgttactgtcgcggctgagggggcgtcccggtgtatccgcagcgcgacctggccgccctctggtggccggaggccgttactgtcgcggctgagggggcgtcccggtgtatccgcagcgcgcactggccgcccactggtggccggaggccgttactgtcgcggctgagggggcgtcccggtgtatccgcagc

SEQ ID NO: 354198 - DNA, 1395 bp, Homo Sapiens
  misc_feature (65)..(126): n is a, c, g, or t
  misc_feature (541)..(633): n is a, c, g, or t
gacggattatcctacctggagactgtctttttcagctcggcatcacgggggcgggggcggtgacnnnnnnnnnnnnnnnnnnnnnnnnnnnnnnnnnnnnnnnnnnnnnnnnnnnnnnnnnnnnnnatcccggctccccggccttctctcctccgcccgctcctgcctcccttctgcttactcctctcctggtcaacaggtcagctcggggtcctgcttccaacctcctcctcctagtttgaagccggttctcaggagagaacctgccatccgcagctttacacctcggcaggaatgtaaatcactcttctcccgtcccaggaagcctttccagtgttctgattccagaaagcaggtgtgtgtggccggttcaaggaatttcaagcatcaccaggcagaggaaagtaccagagtggaaggcagcccacagggtgtcgaaatcaagccacccagggagcccgcagatcccaccctctccggtgagagagattggcggggagcacttcatccaatgcagggaacagcgttactgcggccttcnnnnnnnnnnnnnnnnnnnnnnnnnnnnnnnnnnnnnnnnnnnnnnnnnnnnnnnnnnnnnnnnnnnnnnnnnnnnnnnnnnnnnnnnnnnnnctacgctggagatggagttccactatttttctctccccaatccccgggaaaccctggatctgtttaccacatgttctccccccctctacccggcttttactctgtagggcctgaccccaaaagccaagaaaacaccctcctttcctcccagaactttaccttttcctgggacacaggaagcacggagacctactaactaaaaacggctaggaagtaagatggatcaaccctgtggcagaccgggccttctactcacctatcatcgcgcctcacctcaatggcccctgttgtgcggaccccccgctcctgtccccactagatttcgacatcaccctccttgcctctaatcaatgcccccacccgccttggcccctgggtctccccggaacgcggatcacgatgctccgcaacggctccccggctaatacccatttttgcaacgcttgtcgctccctcacccgcgcaatctctgtgcaccccggcttagcgtgtcgccgacctacgagtagccatcccttgcccctaagcaatgcctcactctgcgtctagcaccactcaccatccctatagccatgcccgagttactagtgtgcgacgtgcctcgcccagcttcttgatgcaactctccaatcccacgacaatcccactcgcctacgcgtactccttcccgtcagccctaaatacgattatatccacaatctacccgctccagccctccttataccgcctttcgtgacttcatcgccgttcccactcgacttg

SEQ ID NO: 354199 - DNA, 655 bp, Homo Sapiens
tggtacagaactaccgagcccttcagcctctcaatcagcgcatggtctttgcttctttcatccaaggaccctcgtataccacaggtgaaatgctgagtctaggtgtaggaatcttggttggctgtctctgccttctcctggctgtttatttcattgctagaaagattcggaagaagaggctggaaaaccgaaagagtgtggtcttcacctcagcacaagccacgactgaggcataaattccttctcagataccatggatgtggatgacttcccttcatgcctatcaggaagcctctaaaatggggtgtaggatctggccagaaacactgtaggagtagtaagcagatgtcctccttcccctggacatctcctagagaggaatggacccaggctgtcattccaggaagaactgcagagccttcagcctctccaaacatgtaggaggaaatgaggaaatcgctgtgttgttaatgcagagaacaaactctgtttagttgcaggggaagtttgggatataccccaaagtcctctaccccctcacttttatggccctttccctagatatactgcgggatctctccttaggataaagagttgctgttgaagttgtatatttttgatcaatatatttggaaattaaagtttctgactttaa

SEQ ID NO: 354200 - DNA, 256 bp, Homo Sapiens
tggcctcctagaggagacagctttcgttaacagtgtaatcagcaacgtttatggatttgtgagctccttacagccatttcccttggttgctgttgcagtatccgaagttgctctcatacttttagcataaataacaaatttacttatatatgctgtttagggtcttagatcattttaaataaagtccattcccagcttcttaaaacaaaaacctgctactttctagagggtgctctttggatggtaatagttgatg

SEQ ID NO: 354201 - DNA, 253 bp, Homo Sapiens
  misc_feature (38)..(38): n is a, c, g, or t
  misc_feature (71)..(71): n is a, c, g, or t
  misc_feature (139)..(139): n is a, c, g, or t
cgtccacccacgctctccgacccattaatgcaccttcnccaggttggtgcgtctggggccggaagaggctnagaaccagcgggccgtatctgcggagggctccaggtcaccacttcgccctgcgtggagctctctctcnaaacagccaggacagggaggcttccctgttcccaggggtgaggccagagggtggacgagggctcctggggtcagctctcaccctgttcctattctcatatagcccccagcatgg

SEQ ID NO: 354202 - DNA, 416 bp, Homo Sapiens
  misc_feature (19)..(19): n is a, c, g, or t
  misc_feature (55)..(55): n is a, c, g, or t
  misc_feature (58)..(58): n is a, c, g, or t
  misc_feature (97)..(97): n is a, c, g, or t
ctaggaggaggaagcaagngtacagagagcagcctggccctcaccagtgcgcaanggnggcagcaaggctgacaggttgctgcatgcccagggaggngtgtggtactggcacccaagttcagcatggcagagctggccaacagcttgtccccgatctgcctccagccccaagatgcctacagcccccaggccccttcggcagcactgcctctgcccacctgcctttaagagactccagggctgctcctgtcatgcagcgaaggttttgtctgtttcaaagttcgagactcaacttgagggactgtttttgacaatccccgctgacctccgctcctcgtggcgccctggccctaacacccagcctggcccagggcggcttttgctgggtgaggctgggagggagcaccagggacctg

SEQ ID NO: 354203 - DNA, 844 bp, Homo Sapiens
  misc_feature (33)..(33): n is a, c, g, or t
  misc_feature (765)..(765): n is a, c, g, or t
gcgtctggagattaaccgagccccaagctttgnaactgatcagaaaatagactatgatgtaaaaaggggagtgctgctaaatgcgttgaagctactaaacataaggaccagtgacaaaagaagaaacttggccaaacaaaaagctgaggctcaaaggaggctctatggtcaaaattcaattaaaaggctcttaccaggctcctcagactgggaacagcagagacaccagttggagaggcggaaagaagagttgaaagagagactcgctcaagtacgaaagcagatctcacgacgaagaacatgaaaatccgacatatggggaattatagaccgaatttatcctcctgaagataaagcattacttgaaaagtatgaaaatttgttagctgttgcctttcagaccttcctttcaggaagagcagcttcattccagcgagagttgaataatcctttgaaaaggatgaaggaagaagatattttggatcttctggagcaatgtgaaattgatgatgaaaagttgatgggaaaaactaccaagactcgaggaccaaagcctctgtgttctatgcctgagagtactgagataatgaaaagaccaaagtactgcagcagtgacagcagttatgatagtagcagcagctcttcagaatctgacgaaaatgaaaaagaagagtaccaaaataagaaaagagaaaagcaagttacatataatcttaaaccctccaaccactacaaattaattcaacaacccagtaagtcaatttnttctaatttagatgttatataaagaattatggaactgaaattattaaactcagtaaaaggtccttgggccaaatgaacc

SEQ ID NO: 354204 - DNA, 1043 bp, Homo Sapiens
  misc_feature (227)..(311): n is a, c, g, or t
  misc_feature (558)..(558): n is a, c, g, or t
  misc_feature (773)..(816): n is a, c, g, or t
cacctcccatacgagtgggatgtgggtcttcatgtcccaatgcaccacctcagactttcacagatcgcgggcggcatgcgccagtctcgcttcaccctggggtgagagacggtacggggctcagtgttgttctatcacgcgggcacgggcccgggcactgccctggcacatcgtgtcgtgggggccagctgaccggaggtgctgggcagggacctcgtcagccccannnnnnnnnnnnnnnnnnnnnnnnnnnnnnnnnnnnnnnnnnnnnnnnnnnnnnnnnnnnnnnnnnnnnnnnnnnnnnnnnnnnnaggggaggggccccagccttgaaaaccactaagtccagagacaaacccaagtctggatccaccagacacccccgtggcctcccacagctccaggctgaccctggcacggggccatcagggctggaccccagcaaccagtgggtgcactgagtgcatgggaggtcatgtaccctccccgccccaccccagggcagggctcacggtggctatcacggtccctgcttcccggcggtgcagcagggcctcnccctccccccccactcactgctgctcagcactggcgcggtcgctgacgaagaagagcgcagtggcgaggaagaacatgccgcccaggaccacgacgaaagggcagagcatgagcgcgtagcccaggctcaggaactcccagagcggggagtccttagtgctctggcggatcaggtctgagatctgcgaggatttgggggtggatgtcggggcagnnnnnnnnnnnnnnnnnnnnnnnnnnnnnnnnnnnnnnnnnnnnggggctactcacaaagccaatgaggtaggggctcccggcgtcccccagcaggtgggaggtgaagctctgcaaggccacggcagtggcgcgccgcgtggggatgaccacgtacatgaggatgtctgcagtgatggcccagttagaaaacagcagcgtctccccgacgaagatacagatctgccggggagaaggcaaagccaccatcagcggtccatcccgggaattcc

SEQ ID NO: 354205 - DNA, 1578 bp, Homo Sapiens
  misc_feature (527)..(527): n is a, c, g, or t
  misc_feature (536)..(536): n is a, c, g, or t
agcgggtggttgctgcggatggagggaccgctgatggtggctttgccttctccccggcagatctgtatcttcgtcggggagacgctgctgttttctaactgggccatcactgcagacatcctcatgtacgtggtcatccccacgcggcgcgccactgccgtggccttgcagagcttcacctcccacctgctgggggacgccgggagcccctacctcattggctttggtgaaccagctggcgatgccgcccgcatctgtgaaagtctgaggtggtgccattgggacaatgaagaacccacactcccacctcgtctgggaggtgtcctacagcgtccgggaccggctgggctgccccaaagctttctgtgtgatccacggctaggcacccaccctctctggcccaggcctgctgagtggccctggcatcaagaagaggctgtgtcctcagttaccctggaaggatgtgtgtgttggagccacacggttggacaggttcccagccctaggtttgggccgcagggccctgngggcaaagngaagaagacagccccaagtgggtgtccggggagagcctggcctgccaccagcttatgtgatcttgggcaagtccctgccctccctggaacgaagggccagggggctggactttcccacacaacttgctgggcaaagcacgatctgcagctttgaagactcaacagaccctggaccatacggagagcaggtggcccagggcctcaggccggcagtcccggctttgaggctcacgcgagggcctggtatgcagggaccactgctcagctgggcctcggaccttggggatattggacgcaacctggcaaatgaagctgggcgcccaagtctctgggtactccctggaggacactgtctcactgtctcgggttggctcccagcctggaggtcccagatggggactgttctgacaagctggcatcaccaggggtgaaggccctggctgcagctgtacaccacctgtgcccccaggctcaaggtctctggcaggtgcacaccagcccaactctgcagggcttctctccctgccaccaacccccaagccaggaccccactccttccccgaggctgagctgagccttttccaggggcagggcccaggagaccattcccagaatccatggggcagtagccaggctccggctgctggaggaagcagctatccacaaagcttcctgccccagagctgaggctgaggccccgggagaggcggcccctacccaaacactggctgctggcattccaccaagtgaccccaggggccaggccttcgatcacccacctcccatccatgcacacaccaggatgcagctgccaacttcacaccagcccaacccgctttgggggagcttagccccctgcgtcacccgatccctgcacttcttgctgcaatccaccgtggttctggtgcgggggtggcggtggcgggttgaggccttgtggccatgggggaccccccaagagccagcttggaccatgctcttctggcccttagttactggcctgctgtggcttcccggtgtgtaaccgcgtggatctcaccag

SEQ ID NO: 354206 - DNA, 862 bp, Homo Sapiens
  misc_feature (662)..(662): n is a, c, g, or t
cactgatggtggctttgccttctccccggcagatctgtatcttcgtcggggagacgctgctgttttctaactgggccatcactgcagacatcctcatgtacgtggtcatccccacgcggcgcgccactgccgtggccttgcagagcttcacctcccacctgctgggggacgccgggagcccctacctcattggctttatctcagacctgatccgccagagcactaaggactccccgctctgggagttcctgagcctgggctacgcgctcatgctctgccctttcgtcgtggtcctgggcggcatgttcttcctcgccactgcgctcttcttcgtcagcgaccgcgccagggctgagcagcaggtgaaccagctggcgatgccgcccgcatctgtgaaagtctgaggtggtgccattgggacaatgaagaacccacactcccacctcgtctgggaggtgtcctacagcgtccgggaccggctgggctgccccaaagctttctgtgtgatccacggctaggcacccaccctctctggcccaggcctgctgagtggccctggcatcaagaagaggctgtgtcctcacttaccctggaaggatgtgtgtgtcggagccacacggttggacaggttcccagccctaggttgggccgcagggccctgngggccaaggaagaagacagcccaagtgggtgtccggggagagcctggctgcaacagcttatgtgatcttgggcaagtccctggcccttcctggaacgaagggccaggggctggacttttccacacaacttgcttgggcaaaagcacgatctgcagtttgaaggactcaacagaccctgggaccatacggagaacacagtt

SEQ ID NO: 354207 - DNA, 1153 bp, Homo Sapiens
  misc_feature (969)..(970): n is a, c, g, or t
  misc_feature (988)..(988): n is a, c, g, or t
  misc_feature (1024)..(1024): n is a, c, g, or t
  misc_feature (1028)..(1028): n is a, c, g, or t
  misc_feature (1048)..(1048): n is a, c, g, or t
  misc_feature (1053)..(1054): n is a, c, g, or t
  misc_feature (1066)..(1066): n is a, c, g, or t
  misc_feature (1076)..(1076): n is a, c, g, or t
  misc_feature (1079)..(1079): n is a, c, g, or t
  misc_feature (1085)..(1085): n is a, c, g, or t
  misc_feature (1099)..(1099): n is a, c, g, or t
  misc_feature (1106)..(1106): n is a, c, g, or t
  misc_feature (1109)..(1110): n is a, c, g, or t
  misc_feature (1115)..(1115): n is a, c, g, or t
  misc_feature (1124)..(1124): n is a, c, g, or t
  misc_feature (1147)..(1147): n is a, c, g, or t
aaacttaaggctaaggtacgaggcctgggtggcgaattcggcaccgaggctccagtggagcacgttgtggcggatgctggggctttcctgcggcatgcggctctgcaggacatcgggaagaacatttacaccatccgggaggtggtcactgagattcgggacaaggccacacgcaggcggctcgctgtcctgccctacgagctgcggttcaaggagcccttaccggaatacgtgcggctggtgactgagttttcaaagaaaacaggagactaccccagcctctctgccacggacatccaagtgcttgcactcacataccagttggaagcagagtttgttggggtgtctcacctaaaacaagaaccacagaaggttaaggtgagctcatcgattcagcacccagaaacacctctgcacatttctggtttccatctgccctacaagcctaaacccccacaagaaacagaaaaaggacactcagcttgtgagcctgagaacctggaatttagttccttcatgttctggagaaaccctttgcccaacatcgatcatgaactgcaggagctgctgattgacagaggtgaggacgttccaagtgaggaggaggaggaggaagaaaacgggtttgaagacagaaaagatgacagcgatgacgacgggggtggctggataacccccagtaacatcaagcagatccagcaggagctggagcagtgtgacgtccccgaggacgtgcgggttggctgcctgaccacagacttcgccatgcagaatgttctgctgcagatggggctgcacgtgctggcggtgaacggcatgctgattcgtgaggcccggagctacatcttgcgctgccatggctgtttcaagacaacgtctgacatgagccgagtgttctgctcacactgtgggaacaagaccctgaagaaagtgtccgtgaccgtcagcgacgacggcaccctgcacatnnacttctcccgccaacccnaaggtgctgaacccccgcggcctccggtactcgctnccanttcccaaaggggggaaatantgcannaaccccatctancgaggattancgnttcctntactgcgatttccnaaaagcnagnnaaacnaacgttttncccttatatatctgcggggtgtncctttt

SEQ ID NO: 354208 - DNA, 1995 bp, Homo Sapiens
  misc_feature (1573)..(1661): n is a, c, g, or t
  misc_feature (1713)..(1721): n is a, c, g, or t
  misc_feature (1757)..(1770): n is a, c, g, or t
  misc_feature (1836)..(1845): n is a, c, g, or t
  misc_feature (1889)..(1926): n is a, c, g, or t
catggctccagtggagcacgttgtggcggatgctggggctttcctgcggcagtgcggctctgcaggagcatcgggaagaacatttacaccatccgggaggtggtcactgagattcgggacaaggccacacgcaggcggctcgctgtcctgccctacgagctgcggttcaaggagcccttaccgtgaatacgtgcggctgggttaaggtgagctcatcgattcagcacccagaaacacctctgcacatttctggtttccatctgccctacaagcctaaacccccacaagaaacagaaaaaggacactcagcttgtgagcctgagaacctggaatttagttccttcatgttctggagaaaccctttgcccaacatcgatcatgaactgcaggagctgctgattgacagaggtgaggacgttccaagtgaggaggaggaggaggaagaaaacgggtttgaagacagaaaagatgacagcgatgacgacgggggtggctggataacccccagtaacatcaagcagatccagcaggagctggagcagtgtgacgtccccgaggacgtgcgggttggctgcctgaccacagacttcgccatgcagaatgttctgctgcagatggggctgcacgtgctggcggtgaacggcatgctgattcgtgaggcccggagctacatcttgcgctgccatggctgtttcaagacaacgtctgacatgagccgagtgttctgctcacactgtgggaacaagaccctgaagaaagtgtccgtgaccgtcagcgacgacggcaccctgcacatgcacttctcccgcaaccccaaggtgctgaacccccgcggcctccggtactcgcttcccactcccaaagggggcaaatacgccatcaacccccatctcaccgaggatcagcgcttccctcagctgcgactctcccaaaaggccaggcagaaaaccaacgtgttcgcccctgactacatcgccggggtgtcaccctttgtcgagaatgacatctccagccgctcagctaccctgcaggtccgggacagcaccttgggagctgggcggagacgcttaaatcccaacgcttccagaaagaagtttgtgaagaaaaggtgaagagcgagttcccgcaggcaaattggatgggcgtctggccgccgtggagttccggtgacccatttccccagccgtgtcgtctccaggaccacccgatggaaataacaggcgggcttcacggtgcggctctgtccgcccatgccccgctgggtctgcagggaactggactgtcccatggcctgtgagcaccggagcgcctggctgcctgccaaggaagtgcaattgcataaaaacagaaagaacaacgccctggagccaatcttcaagaaaggaatttccaaaggataatatttttctaataaatgcggctgcaacctcctgtgcatttaattaaataggccaaatttttgctgcttaggtcatctcaaggctgatacttgagctgtgtgcccagagatcatgcatttagatttatatttttgccagaaaatacaaggttataataaaactaagaactaccnnnnnnnnnnnnnnnnnnnnnnnnnnnnnnnnnnnnnnnnnnnnnnnnnnnnnnnnnnnnnnnnnnnnnnnnnnnnnnnnnnnnnnnnngggggggcccccaaaaaaatcccccgggggggccaaattttacccacccccnnnnnnnnngaaaaagggggcccctaaagggggctttattaaaannnnnnnnnnnnnncgttttttaaaacctgggggggggaaaaaccgccccttgggattttttggaaaaaaaccttctttnnnnnnnnnncaattttgggccaaccccccccaaaaatttaaaccccccggggnnnnnnnnnnnnnnnnnnnnnnnnnnnnnnnnnnnnnncggcaaatttcttggggttaaaaaatttttccaccggggatgttttttaaaaaattttcccccgggctt

SEQ ID NO: 354209 - DNA, 2161 bp, Homo Sapiens
  misc_feature (1076)..(1076): n is a, c, g, or t
  misc_feature (1200)..(1202): n is a, c, g, or t
  misc_feature (2112)..(2112): n is a, c, g, or t
ttaggcctccacgtctcgctggagctgctggacctcagtcgtccatccacacctcccccctgccgcccccgcccatctcacgtctcccaaccctgggcaccaggcaggtcgacagcccgaggcactcctctactgcgtttccaggcctaggagacccactccagcgccgcggttccttgctgaccggcagccgttcagcagacctcccattctttcctgcatcatcgggcattgtggaggcaccctacggtgattcctctcagagcctgtttgtaggtgaccgtgacagagacaaaaccatggaagtgactgggtttggagtgaccaggtgttcctccctcccctttcccagacacgcctcttgctgtaggtctctggttaagtctctctctctcattcccttcctgggagacagtagctccctaggcctgcaatgagggaggctggcttggggaaggagacgggaattgggcgtctttgaagacctgtgggcagagggagggagggagggtgtatgtcctgggtggggctctgggccaggtcctctgggtagctgtgaagtggtgaaagaaggggtgggaacgctggacttctggactttgggcagggcagatcctctgactctctggctgcagaacagtttcttccgtgctctggcctgagtgccacagccagggcctctgctctgtacacagaccgggcaaggtcccccaggccaggatgtcaggcctggtgttggggcagcgggatgagcctgcaggccaccggctcagccaagaggagatcctggggagcacacggctggtcagccaagggctagaggccctacgcagtgaacaccaggccggtgcttgcaaaccctgtcccagaccattgaatgtctgcagcagggaggccatgaggaagggctggtgcatgagaaggcccggcagcttcgccgttctatggaaaacattgagctcgggctgagtgaggcccaggtgcggcggctatgccaggagaaccagtggctgcgggatgagctggctggcacccagcagcggctacagcgcagtgaacaggctgtggctcagctngaggaggaaaagaagcacctggagttcctggggcagctgcggcagtatgatgaggatggacatacctcggaggagaaagaaggcgatgccaccaaggattccctggatgacctctttcctaatnnngaggaagaggaccccagcaatggcttgtcccgtggtcaaggtgctacagcagctcagcagggtggatatgagatcccagcaaggttgcggacgttgcacaacctggtgatccagtacgcagcccaaggtcgctatgaggtggccgtgccactctgtaagcaggcactagaggacctggagcgcacatcaggccgtggccaccctgatgtcgccaccatgctcaacatccttgctttggtgtatcgtgaccagaataagtataaggaagctgcccacctgctgaatgatgcccttagcatccgggagagcaccttgggacctgaccatcctgctgtggctgccacactcaacaatttggctgtgctctatggcaaaaggggcaagtacaaggaggcagagcctctgtgccagcgggcactggagattcgagaaaaggtcctgggcacgaatcatccagatgtggcaaaacagctgaacaacctggccctcttgtgccaaaaccagggcaagtatgaggccgtggaacgctactaccagcgagcactggccatctacgaggggcagctggggcccggacaaccctaatgtagcccggaccaagaacaacctggcttcctgttacctgaaacagggcaaatatgctgaggctgagacactatacaaagagatcctgacccgtgcccatgtacaggagtttgggtctgtggatgatgaccacaagcccatctggatgcatgcaaaggagcgggaggaaatgagcaaaagccggcaccatgagggtgggacaccctatgctgagtatggaggctggtacagggcctgcaaagtgagcagcccccacagtgacactactctgagaaacctgggagctctgtataggccgccagggaaaagctggaggctgctgganacccttggagaattgtgcccttgcggttcccccggagacaggggcactg

SEQ ID NO: 354210 - DNA, 945 bp, Homo Sapiens
  misc_feature (813)..(813): n is a, c, g, or t
ggaacgaggcctgggtggcgaattcggcacgaggccggcaagagcggcagccacaccggcagattgcagaccgggcaaggtcccccaggccaggatgtcaggcctggtgttggggcagcgggatgagcctgcaggccaccggctcagccaagaggagatcctggggagcacacggctggtcagccaagggctagaggccctacgcagtgaacaccaggccgtgctgcaaagcctgtcccagaccattgagtgtctgcagcagggaggccatgaggaagggctggtgcatgagaaggcccggcagcttcgccgttctatggaaaacattgagctcgggctgagtgaggcccaggtgatgctggctctagccagccacctgagcacagtggagtcggagaaacagaagctgcgggctcaggtgcggcggctatgccaggagaaccagtggctgcgggatgagctggctggcacccagcagcggctacagcgcagtgaacaggctgtggctcagctggaggaggaaaagaagcacctggagttcctggggcagctgcggcagtatgatgaggatggacatacctcggaggagaaagaaggcgatgccaccaaggattccctggatgacctctttcctaatgaggaggaagaggaccccagcaatggcttgtcccgtggtcaaggtgctacagcagctcagcaggggtggatatgagatcccagcaaggttgcggacgttgcacaaacctggtggatccagtacgcagcccaaaggtcgctatgaggtggccgtgccactctgtaagcaggcactanaggacctggagcgcacatcaagccgtgggccacccctgaatgtcgcccaccatgctcaacatcctttgctttgggggatcgtggaccagaataagttttaaggaagctggccaccctgctgaaatgatggcc

SEQ ID NO: 354211 - DNA, 1026 bp, Homo Sapiens
  misc_feature (67)..(67): n is a, c, g, or t
  misc_feature (863)..(863): n is a, c, g, or t
  misc_feature (915)..(915): n is a, c, g, or t
ctcaaacacagagagctttgtgaaagatgctaccagtagtttttccagggcagagatgggtccttcntttttctctctaatctagcccatatgcttagctgagttttcttcgtatcactttaaatgatgatgtcccttgttcaacaattttctaaacattctttagataataattttatgggcattctttactgcattaggcttaaatttaatgcatcttaaggttttattgcaaaatattgccttgtttcctttttaagatgatacagtttataatatgcaaatttgttgtgtcccctccctttatgtacatagaaaatgagcaaacaggtggccatgaaacagatggtcatagaattggttcagtggttgtgagtgcagcaacccaagagtgtcttatctgaaataccaccaggaatgcctggacacagtagacaaaggttgttcaactggacgccttaggatacatgctaccaaaaacaaagtagccaaaaagaaaccagaataacagaatatcagagccagaggaacatttggaggtaattcagtacctcctccttttcaacctacaggggagatagtggaagagaagcagggatgggtctgccttctgtgcccacaattcattggagattgttgtggtgaagaatttcttttatgatgaaggagaaataaactcccatcagctttaattcaggcaggtttattgaaaaggtgaagaagcgtcttgcagaagcaaagcatggctgaggcttgtgggctctgtctggacaaatgagcagccgacagtggctgatgctgcccctgactctggagccgtgcggtctgtggttctctgtgagcatctcttctaatctcctgcnaccttccctcagcctggcagtctctgtgtactcttcaacccataattgagcngaggctgtaccagccccaatgccatgtcagcactttatgtcaacattagaaaggcatgaaataaactaggccctttataatacaactgttggaacaacagttgaaaataac

SEQ ID NO: 354212 - DNA, 495 bp, Homo Sapiens
cagcgttaagacgactgcctaactttggccacatgcgttgttttttgggttccgtttcgtatcagggcatgctggctaaaagatgggagccagcaacattctcttgggctccatcatttatatgagggttggcaatgccatctgtaccctctgtgaactcccactgctgctcactcagttaatctaagggacaccaaggggtctgcgggaggatgacctcacaagggactgaggacatgggagaccaccctcctgtgggtagaatacaccagagggcccaggcttgactctgtcctgtgttaaggaggcatcggtagttttgctgagcttgtcaggtgtttataatggacagttggagattggggtcctaggcttaggtctttgagagcctctgtgtccaggagagcccagtaggcatccagccatttactgctttaatagggtagcatgaggctgagagggatagtttcttgcatccaaagcccttaggcacct

SEQ ID NO: 354213 - DNA, 1280 bp, Homo Sapiens
cggcggttcaggtcgcttagagagtcgtaggttgggtagtgcgggttggggcgggggctgcggagagggtgcttaactgaggggcatgatgggggaggcggccgtggccgcggggccttgtccgttgcgcgaggacagcttcacgcgcttctcgtcgcagagcaatgtgtacgggctggcaggcggcgccggcgggcgcggggagctgctggccgccacccttaaaggcaaggtgctcggcttccgctaccaagacctccgacagaaaatccggccagtggccaaggagctgcagttcaactacattcccgtggatgcggagattgtctccatcgacactttcaacaagtcaccccccaagcggggtctggttgtggggatcacgttcatcaaggattcaggggacaagggcagccccttcctgaacatttactgcgactacgagcccggctctgagtacaaccttgactctattgcccagagctgcctgaacctggagctccagttcactccgttccagctgtgccatgcggaggtccaggtcggggatcaacttgagactgtgtttctcttgagtgggaacgacccggccattcatctctacaaggagaacgaggggctgcatcagtttgaggaacagcccgtggaaaacctcttcccagagctgacgaacctgaccagtagcgtcctctggctggacgtccacaacttccccggcacgtcccggcgcctctcagctctgggctgtcagagtggttatgtccgtgtcgcccacgtggaccagcggaagtcgagaggttctgcagatgtggtcggtcctgcaggaccggtcccatctcccgagtgattgtgttcagactctcggccgccaaggagaccaaggacaggccactacaagatgagtacagcgtgctcgtggccagcatgttggagcccagcagtggtgtatcgggacctgctgaaccggggtcttgaagaccagcttctcctgcccggcagtgaccagtttgacagcgtcctctgcagcctggtcaccgatgtggatttggatgggcggccagaagtcctggtggccacctatggacaggaactgctgtgttataaagtaccggggcccagagtcggggcttcctgaggcccagcacgggttccatctgctgtggcagcggagcttctccagtcccctgctggccatggctcacgtggacctgaccggggatgggctgcggagctgccgtggtctccctgaggggtgcctctgccagcctgtttagcccaag

SEQ ID NO: 354214 - DNA, 404 bp, Homo Sapiens
  misc_feature (313)..(313): n is a, c, g, or t
tgctggggggcgggggcctggaacgtggtgttgagaaggcttctgaggctctgtctgagccggggtcaccgtgctggaagaatgggatcagtggatgcggagattgtctccatcgacactttcaacaagtcaccccccaagcggggtcttggttgtggggatcacgttcatcaaggattcaggggacaagggcagccccttcctgaacatttactgcgactacgagcccggctctgagtacaaccttgactctattgcccagagctgcctgaacctgggagctccagttcactccgttccagctgtgccatgnggaggtccaggtcggggatcaactttgagactgtgtttctctttgagttgggaacgacccggccattcatcttttacaaaggagaacgagg

SEQ ID NO: 354215 - DNA, 757 bp, Homo Sapiens
  misc_feature (131)..(182): n is a, c, g, or t
  misc_feature (296)..(338): n is a, c, g, or t
ctggtatgtgttgcgcggggtcccgcctacctcagcccttcctgtgtcccccgctgagtgaccggcccagggtcactctactcggatggaaggaagtcggaaaagtttggtcccatgatccgtactctaannnnnnnnnnnnnnnnnnnnnnnnnnnnnnnnnnnnnnnnnnnnnnnnnnnnggaaaaggtgtgatttagtttggggaagtcaccaagttttgtggggaagaagcgagagcgtttcccaaagcagggggggcgtgtgaacacttctgcccacgattcaggagcctnnnnnnnnnnnnnnnnnnnnnnnnnnnnnnnnnnnnnnnnnnntcgccactccaggtggcctccagtagaggggcagggcaaggggagaagaggggaggaaagggctggtgtccaaagaacggttggaatttatgggtaagtcctggatcggttggaagcagaaaaccctcctgggatgggaaggcccctcacctgggggagaagggacgggcgttagggagtgagaacggggccacacaggtggacaccacctccccaccctactccacccggccaggctgggatctaggaacacaggggctcccatcttttccaaaagaacagatcccacaaaggccagagttcagaggccaacaaacccagctttcaaagaacttaatgtcaccatcaccaagcccatttcctcctcctctggcagctggggacagatatttctgtttattttctgtctctccttccct

SEQ ID NO: 354216 - DNA, 1186 bp, Homo Sapiens
  misc_feature (110)..(110): n is a, c, g, or t
aaagggaaaacttaaaaaaattaacccggggggaggattcccgcccgcgaattagaaagccagaggggctgccccagctgtgagttcgggggctgcccggaaaaggggcngggcgtgacccctagcccgcgcgcacttctaaagtggaaccctgtattgcatagaacgtccccacccgcggggagggggcagcaggctccgcagcccccgggggttgggagcatggagggtggggggactgagcagacccccgcattcctgggtgcccgaagggaggccgaggccgcagccgttttcctgaaggtggcagaccaaaaacactgccctgggggtgaggattcggccagaccccggggtctgggctcagctctaaggacaaggacggagctgacggagcttccaggtcaggcccgaggggcggcgcgaggcaggacgtggctacggtcagactgagccctgagaaggggcactcgggtgccccaagggggtgtcttcaggaccccccacattggctgacagtgcctgtccagcccctctgcctgctgcggtggaaacggcttcgggccaggcggggctcctgctgtctcaggccttggtgtggaggggaggggcagcggcgagcccctggggtcagctgcagtttaaggtcaaggtcggaggccgaatctggccaccaggagtcctggacagacagacgggccttgcaggaagccccgattgtcaactatcatggggacaaggcaggcgcgggtgaagggctgggggatcccatggggtgggtgggtgagctgcctgccacctgcctgcctgacacctccagagacaggcagcccctcccttccccaaccaagccaccaggggtgctctcagggtgagggatagaggggaagagcctgtccctgaaatactgcgggctgggagggaacacgagggcagggtcctgtgcccctccccagctctgcaagatggcaaacgctgtgggcctgctctcctgagtcactgcaagccacgtgggcagatggcgggcagcacaggtgacctgggggcaccttcatagtagaggtgagcagggcgggggaccggggaggggacaagcccacccacctaccctctgctcaccttcccgggtgcctgcaatgcttttaaccatccaaaggaaaaaataacggggaggggtggaaacagg

SEQ ID NO: 354217 - DNA, 1004 bp, Homo Sapiens
  misc_feature (807)..(807): n is a, c, g, or t
  misc_feature (872)..(872): n is a, c, g, or t
  misc_feature (875)..(875): n is a, c, g, or t
  misc_feature (893)..(893): n is a, c, g, or t
  misc_feature (918)..(918): n is a, c, g, or t
  misc_feature (932)..(932): n is a, c, g, or t
  misc_feature (934)..(934): n is a, c, g, or t
  misc_feature (952)..(952): n is a, c, g, or t
agcggggaaggactctagagaacgctctgcactatggctggtcccgtgagcttgcgagaccttctaatgggagcgtcagcctggatgggctctgaaagtcccggagggtcccctactgagggcggagggagcgcggctggcggaccggagcctccatggcgggaggatgagatctgcgttgtgggaatcttcggcaagacggctctacgcctgaattccgagaagttctctcttgtgaatacggtgtgcgaccgacaggtctttcctctctttcgccaccaagatcctggggatccaggacctggaatcagaactgaggctggcgccgtgggtgaggccggtggagccgaggaccctggggctgcagccgggggttcagttcggggaagtggagctgtcgcggaaggtaaccgaactgaggcaggctcccaggactacagccttctgcaggcctactacagtcaggaaagcaaagttctgtatcttctcctcacctccatctgtgacaattcacagcttctccgggcttgtcgggctcttcagagcggggaagctggaggtggactctctttacctcatgcagaagcacacgagttctggaagcatcaagagaagctgcagtgcctcagtctcctttacctattatctgtctgtcatatcttgcttctggtccatcccacttgttcctttgatatcacttatgatcgagtattcagagccatggatgggctgagacacgaaggtcctgccgctccttaaaacagccattaaggattgtccagttggcaaagactggaagctaaactnccgaccttgcccacctagactccttttcctctttcaactcaatggagccctcaaggtagaacctnctnggaaccaagacccagctnatccagacaagcccaagaaacattntcccaaaaggaggntncagcatgccctgggaggnccagatctatagaatcttccggaagagtcgtgtcttggactaatcagaggat

SEQ ID NO: 354218 - DNA, 559 bp, Homo Sapiens
aaatgtttcagtacaaaccactgtttgaactatctgggttattggtgtttgttcctgatgaaaggaaaaaaattctctccaggaggaagcctttttccttcttgcccttcctgattgatcttctgagagctcgaatgctgctggacacgtacccctttctattattactttgtagtagaaagaaagttaatgaaactgagaactgattggagggtgtttgatcatttagtttttaacaggctgaggcaacatggatcagtgtgtgtccccctcaggaatgtatccacagtggccttccttgctggtgggcagtgtatcctgatggcagggtacaagtaccattaatgaagggtctgcaacataaagccttaaaaagacacacactaagaaaactgtaaaaccttgaacattgttatttatattttttaaaatggaaaagatcactatgtttgttgtgctaaccacttatttgattctgttttgtggtggacatagatgattacgtttgagctttgtattttgtgaaaaccttaatgaaatgaattccaaagataaaaaa

SEQ ID NO: 354219 - DNA, 288 bp, Homo Sapiens
aggctcgaactcttggcttcaagcaattctcttgcattggcctctcaaagtgcatggattacaggcatgagccaccatgcctggcctgaactctgacttctgagccaggccctgtggggtgagctttggctcctgtcttgagagctgcagattctctctcagcctggctgcagattccagattcttcctgtcaatgccatctctcagataggtcccagccacttatatcctccacagccccttctggaagtgtctttgtctccctgaacaaaaattcaatatggaagc

SEQ ID NO: 354220 - DNA, 1112 bp, Homo Sapiens
  misc_feature (42)..(97): n is a, c, g, or t
  misc_feature (1050)..(1050): n is a, c, g, or t
  misc_feature (1095)..(1095): n is a, c, g, or t
cagtgacagtgtggcgactggggaagtcccggcaagcgtcannnnnnnnnnnnnnnnnnnnnnnnnnnnnnnnnnnnnnnnnnnnnnnnnnnnnnnntaaaaaactatgtccccttcagttcggggtggatgtgaccagttgccgggggatgtggatttggcatttgggaaagaggcttggtgacgccgccaacggggttccgtggtccttggtgggtatttcagcagggtggggggtacttccagagcttcttagggaaggtttcctttctcatcggcctgccggtttagcgggaacttcaggatataaggcaagagccaatggaattccaggttgttgacacttagaaggtagggcccagatgaaaccttccctggggtcgggagcaccaaagggtcatctgggatcaccacaccatccaccacagggctcatggaccagataatctcttccgggtctctctggaagttcagttggaggaatctcatcttgttggacacacgcatcaccttggtccctgataagtgccctcaggcagtttaccaggatctgtgtgctgttgtggttgcatcacagccaggtgggcaaccttcttggccactttcagtgggttacgagtgatgaaaagtctgaataacgcggtgccactctgggaaatggcccgatggaagagacccgaggctaggggtgacatcatcagtcctgagatgctcatggcccccgccgactggccgaacagggtcacatttcctgggtctcccccgaaggctgcgatgttctcctgcacccagcgcagagccgcccatctggtccagcagcccccagttcccgcgcgcgtggctgtcgtccgtgctcaggaagccgaagatgccgagcctgtgctgcagaaacaccagcaccactttctcgcgggcggccaagtcagagccctcgtacgaagaagcagcgcccacgatgaaggcgcctcccgggaaccagaccatcactggcagctggggatcccccggcgcgcgcgccggcgcgtacacgttcaggtacagacagtcctnctgaagcgcagccacttgtaccgttcccgcgtgctgacgtacatncgagccagctggcccca

SEQ ID NO: 354221 - DNA, 908 bp, Homo Sapiens
  misc_feature (201)..(219): n is a, c, g, or t
  misc_feature (294)..(344): n is a, c, g, or t
  misc_feature (366)..(393): n is a, c, g, or t
  misc_feature (396)..(455): n is a, c, g, or t
gggatagaagacagagaggggcaggtgtggtgaaaggaaactaggaggtgggacaaataatagggtaggaaagaggtggttatagaccggtaggcgctgcaaagattacggtcgccggaggccagcatcaggaaacagggagagtgaataagaatgcagcataaaaaacctaggcagactaagggagaactcatctgggcnnnnnnnnnnnnnnnnnnngccgggcaaggtggtgcacacctgtagtcccacataatctccagactaaggtggaaggatcgcttaagcccaaannnnnnnnnnnnnnnnnnnnnnnnnnnnnnnnnnnnnnnnnnnnnnnnnnngatacagcgagaccttgtctcnnnnnnnnnnnnnnnnnnnnnnnnnnnntgnnnnnnnnnnnnnnnnnnnnnnnnnnnnnnnnnnnnnnnnnnnnnnnnnnnnnnnnnnnnagccatttggcttttcgcaagttctacaggtcattcttgggcacgatcaaatttgagaatcacaggtctaggatacgacggggaaaacagaaatgtggggtggtcagggacattcggataattcgggctatttgtattcaggtgtgagctggcaaatccgagacctgttttgcgtagctaattaccagcaatgacaaactcccaggctctgaggcccaagcctcctgggctgcaactggtctttatttttggaggcaatgaatggagcacctcggcctgggaccctcagtgtagggttttctgacttttaggcaacttcctagggtgctgtacttcctttttaaagttggggagcggcagggggagggggaagtgccacgcccttgtagtttcatgatgtcatgttgcatgtgctcctgagcctgtaaataaagagacgatggttaaaaaaaa

SEQ ID NO: 354222 - DNA, 522 bp, Homo Sapiens
  misc_feature (41)..(41): n is a, c, g, or t
gacgtcaccgtacaccctggtcccattctccatccaccaangatcggtgcattgatatattaaaagtcaggataaggtctgtttcctttgagaggtccccagcctccaaatagaagcagataacaaacacattccacgtaacccagaggactagccagacagcatatcctgttatgtaacgaggtctatattgaatagttccaaacaaaccaagaatgacgataataatatgtacaaaatttgccaggataggtgcccactgatatccaaggaagtcaaatatttgcctctccagcacacaaaccagttgcatgccacagataaagataagcgtgcacctgccactgcaataacccatggtttccgagacccctgccacagccagactgtcccacgtcggccaccgtcgagcccccactttatccaatcagatcgcggggaaggacacgcaaacctgccgagggctcgggggctccgggctgctgctgctgccagcgtcctgggaagtgacaggcattagga

SEQ ID NO: 354223 - DNA, 789 bp, Homo Sapiens
  misc_feature (618)..(618): n is a, c, g, or t
agcggggggctcgacggtggccgacgtgggacagtctggctgtggcaggggtctcggaaaccatgggttattgcagtggcaggtgcacgcttatctttatctgtggcatgcaactggtactgaagatggatggggatcattaggttactcttataatattgtcccacaaatatcttaaccgtttgtgtgctggagaggcaaatatttgacttccttggatatcagtgggcacctatcctggcaaatttgtacatattattatcgtcattcttggttcgtttggaactattcaatatagacctcgttacataacaggatatgctgtctggctagtcctctgggttacgtggaatgtgttcgttatctgcttctatttggaggctggggacctctcaaaggaaacagaccttatcctgacttttaatatatcaatgcaccgatcttggtggatggagaatggaccaggatgtacggtgacgtcagtgacacctgccccagactgggccccagaagaccatcgctacatcacggtctcagggtgtttgctggagtaccagtacatagaagtggctcatagttccctccagattgtcctcgcactggcaggtttcatctacngcctgttatgtcgtgaaatgtataactgaacgaagaggacagctttgattttcatcaggtggctttgactcttatggctatcacgggcctcagaagacatctcatttacagcttacagcctatgtacatgtcaagataagtccggatgacttcggtatgtcaggcccatgg

SEQ ID NO: 354224 - DNA, 1111 bp, Homo Sapiens
  misc_feature (831)..(831): n is a, c, g, or t
aaagaaggcagacatctcttacatgaggttcggggagcttgaaggtgttagcaaatttacgtggcagctgaatccatcaggagcttatggtcttgaacaaaatgagcctgaaagtagagaaaatggtgtgttgagacctgtcccacagaaggaagagcagcaccaggacaagaagctgcgcctcggaatccactaagaaggcctgtctacactgcaggggaacctcaagaacttttcatttgcacttctaaaattcagccttgttcattcagaaaataaggatggattttgtgaataattgaaaagattttttaaggaagctaatttatttctaggatacaaatggtgttaataagaatatttgtcttttagatttatgtgtgggttttccataatgtagtagtgtgttattttattacacgaaatgagggagcaataacttcaaccaatgtaatcaccaacagggactgatttctatttatcttgactttatattagccaatttgaaagggtctgcttcacaagaggtcatgcctctgcagggaatcacacaccttttgagaaatattaattcttttgaattacaagagtgacagttagtaaactgctccagggaaataagtgttatcttttaagagtcagtgtatagcaaaccaaaagatcacatttatacccaaagctttctagtaatcagaatttacttaattagaattgactcataaaaataaagttagtggactttgtctccatttttaaagtatattttgtaaatgttaattctgtggtcctgtttatcacagactttgggtagcaataggaagagagtgttantcctgagacagtgtcgcctgccttgatatcactgactcttgaaatcactaacagtgaacctcaaatttggttatgatgttaacagagaagaaatatttgagtctggaatattgaaactagctttcctagaattccattaataaatgctgctcccccatatagtccttccccttctgtataattaacataggttgtctcatggctttgatcttcaaaaggaagagccttttaaaaacatttgccaacctcaagaataaatactgaaagtcttgaaaaaaaa

SEQ ID NO: 354225 - DNA, 1147 bp, Homo Sapiens
tcatggaacgccaagaggagtctctgtccgcgcggccggccctggagaccgaggggctgcgcttcctgcacaccacggtgggctccctgctggccacctatggctggtacatcgtcttcagctgcatccttctctacgtggtctttcagaagctttccgcccggctaagagccttgaggcagaggcagctggaccgagctgcggctgctgtggaacctgatgttgttgttaaacgacaagaagctttagcagctgctcgactgaaaatgcaagaagaactaaatgcgcaagttgaaaagcataaggaaaaactgaaacaacttgaagaagaaaaaaggagacagaagattgaaatgtgggacagcatgcaagaaggaaaaagttacaaaggaaatgcaaagaagccccaggaggaagacagtcctgggccttccacttcatctgtcctgaaacggaaatcggacagaaagcctttgcggggaggaggttataacccgttgtctggtgaaggaggcggagcttgctcctggagacctggacgcagaggcccgtcatctggcggatgaggctaagaatcttgttagtgtcacttttgacattagcaagatgaacccttaaccctcgattcaattgccttacgcacgcttttcacagtgactagccaaggggaggttggggttgatttctgttcctaactacacctgcatatgtcagggctccagtcagcaaaaggtatagatgttgcctctaggcatgaggtcattggtcacattctacttggagacagtgattgcattcattgatttcatggttaattgctagttggtaggtaaaggcctctagatgattagcaatcttgataaaagaggcctagtaatgttcttttgaggttagaaatccttgctgctaggacagtctctgtgacaggttgcgttgaatgatgtcttccttatcaatggtgagcccaccagtgaggattactgatgtggacagttgatggggtttgtttctgtatatttatttttatgtacagaactttgtaaaaacgaaactatttaaaaaacaagaataacatttttagcatctttattcaaggagatttatggacttcaatttgtctatcaaacattaaatagctttttattac

SEQ ID NO: 354226 - DNA, 1287 bp, Homo Sapiens
  misc_feature (726)..(761): n is a, c, g, or t
  misc_feature (767)..(767): n is a, c, g, or t
  misc_feature (1037)..(1037): n is a, c, g, or t
cactggctgagtgccaatattgtgtcactcgccaccaatctctggggtgatatcgtccacaaagaatggctctgtgttggttgactctcaaacttgagcatcaccatgctgatgaccactcgtcttcaccataaccgagccatgttatctacctggcctttcatgtccatctgtcgactccattcctcgcgacaataagtccagtttgcggccactagattattcatggccccccgatgcttgtcgatcaagtgaccggcctagggtgctatcgtggttggatgatgaggtaatcttctgcaaggcctcgtgtggcccacctggcctcaaggatgtcagggaatagcttggtcaatgcctgaaggggacggccgagctccacgaggctgctctaactgccccgtgggtcaggcctgccatcgctgtcacaatgggaatagcaaagctggctctcccagagccacggggtctgccggaggtggctgtgctggggtgggtacagggctcagcctctgaggatggtgacctggtttgtaactgtccctttacccacaccaggagagagaaataaggaacagtcccctgggaggtgtccaggaccaggagggaacaggaagggaatttttaggcatctaaggattctttatttccagagaaaatctattcaagacctttgctgacctcctctgtgcctgcagggcactccaggaaatcctcagctctgtnnnnnnnnnnnnnnnnnnnnnnnnnnnnnnnnnnnngccacnagcccatcagtgtgagcttcacatccagggacaccggcttcctcccgctacactgaaaggccactggtgagtgtgtgtccaggtggggagccgagcgtgtctgacacaaagccacttgtaataaacacccacatacaaggaaaggccaaagcaggctgcccagaggcagagaaagccgcatcctaacacagagcccctgactcctcccccttccacgctcagccctgtccttgacccaaccaaggacctcttctcagagaaaggtgtctntgctctgcagctccccgggcagggcccactcaaaagcgtccccgggagaagcagggtgttgaggggatgggaggacagaggcaaaggggctggagcagaagcagcagccctagctctggccctctgttctgtataggtcccagggttggtctggggacaggcttagggcttgactaagccgctgggtttttaccttcctgatgtctcaacgatgtggcttctatgctcctggaaacaagaccagatgctg

SEQ ID NO: 354227 - DNA, 314 bp, Homo Sapiens
  misc_feature (63)..(63): n is a, c, g, or t
catgagtacatttctaaatgcagaacataggattcaaatgtgccacatgtcactttattttcnaaaatgtattttctctatatttgcctgacttctatggcaaataaaatccactttggcatgacactcatcttacataaatgaaaatatgagccaacagaatggcattttagtagctttaagccaaacaaattcttgagagggtcttgtttaaattaagttttcgtgctatttagctttttacagtgaagaagctctgtgtcttcagagagccttgtgcagtgatgcttgtttttggaaggacgggacaggag

SEQ ID NO: 354228 - DNA, 797 bp, Homo Sapiens
  misc_feature (705)..(705): n is a, c, g, or t
  misc_feature (750)..(750): n is a, c, g, or t
tcaccagcttggatggccgtcacctcagacatcactccagggagcacccgcaggagctgggccccctcacgcctgccttcctgggccagcttcctgcttgcagtcactcgcatagcacagaggcggggcttcgggcagggagcggagattcctcataggtgagtccaaatgacctccagcctctcgaaggcatcaagacaaattgaaagaaagcaataactcaccaaagctcaacgctgcccctgcctcgacctccatgggtctcttcgtgttcctcgtttcaccccagaaagtggaggtttcctcttggcattttcggaggaaacttgtaggacacccaaggcgactaagagacagcctccttggcaagggcaggcaccactttgtagcaacttgggcaccagcttttctggacagcctggcttcttactggcattgtccaactcatcccttctcgaagcatgtctttgccatgggctgtgtccttccagggaaattgtggtctccggcctgggtgagacaatgaagtgacttccaaccgacagttgctagaattcacagggcagaaaaggggttgaccttctccccttccggctttccacccggcctgctgcttgctgtcgccactcatgtctcctccacatgcggtccacacatcagtaagggccgggagatgtgtaaagacacagcaaggggcaagcagantcttgggccacgtgtttccagtggcttgggaccacgccgacaacnggggatctttgagataacccagggaaggggaggctgttttgggccgg

SEQ ID NO: 354229 - DNA, 630 bp, Homo Sapiens
ccgacaccagaccagaatgcctccccttatcacaccatcgtggacttccatggctgtcttgtcgacggtctcactgatgcctcttctgcattcaaagttcctcgacccgggccagatacactccagttcacagtggatgtcttccactttgctaatgactccagaaacatgatatacatcacctgccacctgaaggtcaccctagctgagcaggacccagatgaactcaacaaggcctgttccttcagcaagccttccaacagctggttcccagtggaaggcctggctgacatctgtcaatgctgtaacaaaggtgactgtggcactccaagccattccaggaggcagcctcgtgtcgtgagccagtggtccacgtctgcttccctgtaaccgcaggcatgtgacagaagaagcagatgtcaccgtggggccactgatcttcctggacaggaggggtgaccatgaagtagagcagtgggctttgccttctgacacctcagtggtgctgctgggcgtaggcctggctgtggtggtgtccctgactctgactgctgttatcctggttctcaccaggaggtgtcgcactgcctcccaccctgtgtctgcttccgaataaaagaagaaagcaat

SEQ ID NO: 354230 - DNA, 814 bp, Homo Sapiens
tggctggtaccgccccgggagattatgggatggcctgaatgcctatcaagagggcactgcttaaagaaacgattgtccctccaaacaacagaattctgtgcagcagactggcgcctgagcgatctttgagaactactgcagatgcctggcccagctctggccccggtgctgcctgcatgccaagcgcttcattagccgggaaagaagactcttgccctccttcgtctaatcctcgccagtgaccttcaggaaccaggcaccttctgacgttgggagcctgggatggtgcaatcatcaattacgccgtggcctccgcagctgttcctgaatggatttcttgctcagagaagcgtgtttgaaaagcatctaatggaacggatcatcaatttgtttgaatacacatctaatctgattagaggagaggcactggccaccagggcagcatagtgcaacatgagccttgacatggccccagggaatcataagtggggtggcggggccagtctagggaaggagggctgagtgccctgggcctgccaccgagaccactcctatgagactcagcccatggaacgtaccagaccaaaaaagtcacagagaaaagcagaacacatcacacagatgccaggagagctgggcccaagactccatgtaaaactatagacctggacactgggcacagagacctgagacaaagaagatgcttgggaaatatgtggaaaatgaatgacaagtaaggcccaacatggaagacaagggatgtataataaagtcatctgtgggaaaagaataggtgatgaatagaatagggtta

SEQ ID NO: 354231 - DNA, 1345 bp, Homo Sapiens
  misc_feature (36)..(36): n is a, c, g, or t
  misc_feature (67)..(67): n is a, c, g, or t
  misc_feature (92)..(92): n is a, c, g, or t
  misc_feature (96)..(96): n is a, c, g, or t
  misc_feature (104)..(104): n is a, c, g, or t
  misc_feature (121)..(121): n is a, c, g, or t
  misc_feature (142)..(142): n is a, c, g, or t
  misc_feature (144)..(145): n is a, c, g, or t
  misc_feature (148)..(148): n is a, c, g, or t
  misc_feature (159)..(159): n is a, c, g, or t
  misc_feature (175)..(175): n is a, c, g, or t
  misc_feature (179)..(179): n is a, c, g, or t
  misc_feature (193)..(193): n is a, c, g, or t
  misc_feature (203)..(204): n is a, c, g, or t
  misc_feature (270)..(270): n is a, c, g, or t
  misc_feature (278)..(278): n is a, c, g, or t
  misc_feature (289)..(289): n is a, c, g, or t
  misc_feature (295)..(295): n is a, c, g, or t
  misc_feature (340)..(340): n is a, c, g, or t
  misc_feature (343)..(343): n is a, c, g, or t
  misc_feature (387)..(437): n is a, c, g, or t
  misc_feature (669)..(669): n is a, c, g, or t
  misc_feature (716)..(716): n is a, c, g, or t
  misc_feature (1095)..(1185): n is a, c, g, or t
  misc_feature (1279)..(1279): n is a, c, g, or t
  misc_feature (1334)..(1334): n is a, c, g, or t
ggatcttgtggaatggaagacaatgtgggatggggnccatgaccccgatctgaggtacagtcactgngccttgccctctccttttctgccancagnctctgggnggtgtggtttggggtgngtgtttataaagagggtctcntnngantaggagttggngacatggttttctttntttnggttttgtgttgtntgtgtgttgnntctctgtcccccactttgtgtggtgtggtgttaccagggtggagtgttcctacagtcagagctgangctgcggnctctcagggtnccttcntgacagcagatgggtacgcagggggaaatacagctagtcaccagntancggacagctggagccagggggctattgctggtcacagtcgctgnnnnnnnnnnnnnnnnnnnnnnnnnnnnnnnnnnnnnnnnnnnnnnnnnnngtgcgtctgagtgtctgtgagggcggtcaggtagcctttgggaggtacagttggtggagaggccaggaagtgatagaccagcaagctcacacctgtgggccagctgcaaaggccccaagggcagctggctggtgccgcaggtggggaaatcaaggccaaggggagtggtggcaagggtagggcaaagcactgaaacagacaggtgactcctgccaccagtctgacagttggnatggaagcacccattggcccaggagggggccagaaaatccagggtgntggagggacaggaaaagtgggaaggtctcaggccactgagccagcgatggggcctctggctacaggaagctggtggttgacagcagggaagcccagagcctagatggaggtcccccacttactcacaaaggctgaatgacagcttgacaggtgagtgcgatgcccctccccactcccaacctgccaggagttgccctttcgacagggggaaggggtagtgtgcgtgcatatattgggggaagcagggagcctggtaagcctctcttcacagcttccactgcagagcctcatacctacctccagccagaggtgagaggcaatagggttggggacagtggacatgggggttttgggggcgggaggacggctgagtcccttnnnnnnnnnnnnnnnnnnnnnnnnnnnnnnnnnnnnnnnnnnnnnnnnnnnnnnnnnnnnnnnnnnnnnnnnnnnnnnnnnnnnnnnnnnnagccagttgacagcctgagctaagagagaggggtatggggtggcgggagtgggtcacaatcggaaacgtgaacgggtggcgagaatggctgtanaaagatgcataattttgcgttatccctcacagtgatgggttctctgaagatcttncttcctctgcc

SEQ ID NO: 354232 - DNA, 319 bp, Homo Sapiens
  misc_feature (83)..(111): n is a, c, g, or t
  misc_feature (283)..(283): n is a, c, g, or t
  misc_feature (295)..(295): n is a, c, g, or t
tggaggggagcaccctgagatgcaccgcgcaggcccaccccctctccgagcagccccacttctgcccccaggagctcgggggnnnnnnnnnnnnnnnnnnnnnnnnnnnnnacctcttcctcctcgccttcgggaggaggcagaagagcaggagagcacctgccccatctgtctgggggagatccagaatgccaagacattggagaagtgccggcattcattctgcgagggctgcatcacccgggctctgcaggtgaaaaaggcctgccccatgtgcggccgnttctatgggcanctggtgggcaaccagccccagaat

SEQ ID NO: 354233 - DNA, 816 bp, Homo Sapiens
  misc_feature (647)..(673): n is a, c, g, or t
gcaatggcggcgctgacgagagctgcatttggaagtgttgtggagacagccccgtagcccaatgcgaccagactcagggaaaacatcaggcccctccagctgagcccttgttcctgggtcagctgagtggaaatagaaggatttctgctgccatcatcttccatgggctttccaggtcacacgacctacaagtagggagcagggaaagaagagtgagcctgcatgccaattctaagctcttcaggatcaaaaatggcaacctgtgaaggcacctgcaaaaacaaagtgactgtgtccaagcccgtgtgggacttcctgaacaaagagaccccaacccggctggcccggcttcgggaggagcaccgtgtgtccatcctcatagatggcgaagacttctgacatctatgttctccagcttttccccacagggtcctcccccggcccctccaaatgggctctacctagcccggaaggctctcaaggggctgctaaaagaggcagagaaagagctgaagaaagctcagaggcagggggagctgatgggctgcctggctctggggggtggaggggagcaccctgagatgcaccgcgcaggcccaccccctctccgagcagccccacttctgcccccaggagcctcggggctnnnnnnnnnnnnnnnnnnnnnnnnnnnacctcttcctcctcgcttcgggaggaggcagaagagcaggagagcacctgccccatctgtctgggggagatccagaatgccaagacattggagaagtgccggcattcattctgcgagggctgcatcacccgggctctgcaggt

SEQ ID NO: 354234 - DNA, 942 bp, Homo Sapiens
  misc_feature (67)..(103): n is a, c, g, or t
  misc_feature (752)..(813): n is a, c, g, or t
aagggggctctgtggtgatgtatagactcctatagggcgaactggagctcaacgcggtggcggccgnnnnnnnnnnnnnnnnnnnnnnnnnnnnnnnnnnnnnatcaggccaaatcggccgagctcgaattcgtcgagagcggagtaatgtgaccggcaatggcggcgctgacgagaggctttcttgggggcctcagagctggggaagaaaggaggaagtcctggtcagctgagtggaaatagaaggatttctgctgccatcatcttccatgggctttccaggtcacacgacctacaagtagggagcagggaaagaagagtgagcctgcatgccaattctaagctcttcaggatcaaatgtcgttcgtcctgtccagaatggcagcctgtggaggcacctgcaagaacaaagtgactgtgtccaagcccgtgtgggacttcctgagcaaagagaccccagcccggctggcccggcttcgggaggagcaccgtgtgtccatcctcatagatggcgagacttctgacatctatgttctccagctttccccacagggttcctcccccggcccctccaaatgggctctacctagcccggaaggctctcaaggggctgctaaaagaggcagagaaagagctgaagaaagctcagaggcagggggagctgatgggctgcctggctctggggggtggaggggagcaccctgagatgcacgcgcagggcccaacccctctccgaacagccccacttctgnnnnnnnnnnnnnnnnnnnnnnnnnnnnnnnnnnnnnnnnnnnnnnnnnnnnnnnnnnnnnnccttcgggaggaggcagaagagcaggagagcacctgccccatctgtctgggggagatccagaatgccaagacattggagaagtgccggcattcattctgcgagggctgcatcacccgggctctgcaggt

SEQ ID NO: 354235 - DNA, 1265 bp, Homo Sapiens
  misc_feature (118)..(224): n is a, c, g, or t
  misc_feature (1231)..(1231): n is a, c, g, or t
  misc_feature (1251)..(1251): n is a, c, g, or t
gtggaccggtccggaattttcgggatccccctccttgttgctaaggtccggaccgtcatcccagcaacagcctcagtcatgtgaccggcaatggcggcgctgacgagaggtaggtgannnnnnnnnnnnnnnnnnnnnnnnnnnnnnnnnnnnnnnnnnnnnnnnnnnnnnnnnnnnnnnnnnnnnnnnnnnnnnnnnnnnnnnnnnnnnnnnnnnnnnnnnnnggctccgggctccccgctccgtgcccggccgatcatctttctagcaccctccagccttggcctccattcgggggttctgagggctgcgatcgggccgacatgcacccccacccggcggtggggatccgggggctttggctactgagggatgtggggagttggttccgggtcgggtcttggaggaggccgtggggggagggcgggagctgcttcagtggatgcccccagggacccttgcccatccgggctgtgcctccctctggcctctgtctggagggagagactggttccttgtccggcctgggttgccacagaggaatcacagacccacgcctaaactggggccccgcctcccttttctgtgccagcaggacttggacctaggacacctaggtcctgggtcccccgtgatggggagagaagtgttgcatcgcggatagactgtatgggctgagactctagggttccattttcacttatgaatctcgaggtgcatctggccttgggggacgatgatggaggcatgaagggacagctgctccttcttggatcagccaataaagggaaggtcacactaaagggccctttctttctgtttgagctgcatttggaagtgttgtggagacagccccgtagcccaatgcgaccagactcagggaaaacatcaggcccctccagctgagcccttgtgtgagccccgcccctccctaaatgccagacttgggagctgacagacagcactgcctgtgctgggtttaaaagtcctggtcagctgagtggaaatagaaggatttctgctgccatcatcttccatgggctttccaggtcacacgacctacaagtagggagcagggaaagaagagtgagcctgcatgccaattctaagctcttcaggatcaaatgtcgttcgtcctgtccagaatggcagcctgttggaggcacctgcaagaacaaagtgactttgttccaagcccgtgttgggacttcctgagcaaagagaccccagncccggttggccccggttttngagaagggagcaac

SEQ ID NO: 354236 - DNA, 961 bp, Homo Sapiens
  misc_feature (45)..(45): n is a, c, g, or t
  misc_feature (84)..(84): n is a, c, g, or t
acatgaggcccgggaactggcctgtgttgccctttcgggcaccanccagagcaggagatccagcccactgaatcccccaacctngggataccaatggcctggaggacaaagagcacatccgggacgaagaaaatgaagaagaaaacgaaagaaagtgaatgaacgtgtcacttccggaaagcccttatacatggggcggtaccagcagacaaaggagcagggagtgaaaaggaggacccagaggatagaaagcccaaagcctgcgccattgttggtttccacacagaagctggccaggcaggcgaggaagttcaggagaagagccagcgtgctgcacatccagaggtagtacatggtggatacagtcttctgaaattcttgggggatctccatggagatgtcctggaaaaagcagggctgaactggacaaaaagaaggtagagggggccaattgttctgtcgagtagctgtgccccccagggcagcatgctgcagctctcgctcccttcggtccaactcctctgccttccggttgagctcctcctgtttcttcagcagctcagctgtggctgctgcagctgaggcctgagtgctgtatgagccatagttcttaggttctgtggggctgagctttctcgagggctgcaaggagggagctgagggtggaggcaatggggcaggggctggaggctcataggctggtggtggctgaaaggggttgtcaagctcgctgggctcggcgaacgggtttccgccgtctctgctctgagccatgtttgcaactgcggcctccgcggccctctgccctccacgcccctgccgcagcagtggcggtagcggtagccctcagagtccacttcactcgcctcagttcgccccgcttctctgtgcacggattggttccatcgaccggaagggccacaaggatccccgcagcagccgtggttgcgcctgcgtcttg

SEQ ID NO: 354237 - DNA, 840 bp, Homo Sapiens
gcaggcgcaacccactggctgctgcggggatccttgtggcccttccggtcggtggaaccaatccgtgcacagagaagcggggcgaactgaggcgagtgaagtggactctgagggctaccgctaccgccactgctgcggcaggggcgtggagggcagagggccgcggaggccgcagttgcaaacatggctcagagcagagacggcggaaacccgttcgccgagcccagcgagcttgacaacccctttcaggacccagctgtgatccagcaccgacccagccggcagtatgccacgcttgacgtctacaacccttttgagacccgggagccaccaccagcctatgagcctccagcccctgccccattgcctccaccctcagctccctccttgcagccctcgagaaagctcagccccacagaacctaagaactatggctcatacagcactcaggcctcagctgcagcagccacagctgagctgctgaagaaacaggaggagctcaaccggaaggcagaggagttggaccgaagggagcgagagctgcagcatgctgccctggggggcacagctactcgacagaacaaatgggccccctctaccttctttttgtccagttcagcccctgctttttcccaggacatctcccatgggagattccccaagaatttcagaagactgtatccaccatgtactacctctggatgtgcagcacgctggctcttctcctgaacttcctcgcctgccttgggccagcttctggtgtgcgaaaccgaccaatgggccccaggcctttggggcctttctaatcctcctggggttccttccttttttccaattccc

SEQ ID NO: 354238 - DNA, 1563 bp, Homo Sapiens
atcacgtgggggcactttcgtcttagcttttggacaagacgcaggcgcaacccacggctgctgcggggatccttgtggcccttccggtcgatggaaccaatccgtgcacagagaagcggggcgaactgaggcgagtgaagtggactctgagggctaccgctaccgccactgctgcggcaggggcgtggagggcagagggccgcggaggccgcagttgcaaacatggctcagagcagagacggcggaaacccgttcgccgagcccagcgagcttgacaacccctttcaggacccagctgtgatccagcaccgacccagccggcagtatgccacgcttgacgtctacaacccttttgagacccgggagccaccaccagcctatgagcctccagcccctgccccattgcctccaccctcagctccctccttgcagccctcgagaaagctcagccccacagaacctaagaactatggctcatacagcactcaggcctcagctgcagcagccacagctgagctgctgaagaaacaggaggagctcaaccggaaggcagaggagttggaccgaagggagcgagagctgcagcatgctgccctgggaggcacagctactcgacagaacaattggccccctctaccttctttttgtccagttcagccctgctttttccaggacatctccatggagatcccccaagaatttcagaagactgtatccaccatgtactacctctggatgtgcagcacgctggctcttctcctgaacttcctcgcctgcctggccagcttctgtgtggaaaccaacaatggcgcaggctttgggctttctatcctctgggtcctccttttcactccctgctcctttgtctgctggtaccgccccatgtataaggctttccggagtgacagttcattcaatttcttcgttttcttcttcattttcttcgtccaggatgtgctctttgtcctccaggccattggtatcccaggttggggattcagtggctggatctctgctctggtggtgccgaagggcaacacagcagtatccgtgctcatgctgctggtcgccctgctcttcactggcattgctgtgctaggaattgtcatgctgaaacggatccactccttataccgccgcacaggtgccagctttcagaaggcccagcaagaatttgctgctggtgtcttctccaaccctgcggtgcgaaccgcagctgccaatgcagccgctggggctgctgaaaatgccttccgggccccgtgacccctgactgggatgccctggccctgctacttgagggagctgacttagctcccgtccctaaggtctctgggacttggagagacatcactaactgatggctcctccgtagtgctcccaatcctatggccatgactgctgaacctgacaggcgtgtggggagttcactgtgacctagtccccccatcaggccacactgctgccacctctcacacgccccaacccagcttccctctgctgtgccacggctgttgcttcggttatttaaataaaaagaaagtggaactggaactgaaaaaa

SEQ ID NO: 354239 - DNA, 1067 bp, Homo Sapiens
  misc_feature (927)..(965): n is a, c, g, or t
aattcccgggatggaagtccatggaagaggggcggtagttggttgtgggcactgggttagaggatcacgtgggggcactttcgtcttagcttttggacaagacgcaggcgcaacccacggctgctgcggggatccttgtggcccttccggtcgatggaaccaatccgtgcacagagaagcggggcgaactgaggcgagtgaagtggactctgagggctaccgctaccgccactgatgcggcaggggcgtggagggcagagggccgcggaggccgcagttgcaaacatggctcacagcagagacggcggaaacccgttcgccgagcccagcgagcttgacaacccctttcagccaccaccagcctatgagcctccagcccctgccccattgcctccaccctcagctccctccttgcagccctcgagaaagctcagccccacagaacctaagaactatggctcatacagcactcaggcctcagctgcagcagccacagctgagctgctgaagaaacaggaggagctcaaccggaaggcataggagttgcaccgaaaggagcgagagctgcagcatgctgccctgggaggcacagctactcgacagaacaattggccccctctaccttcttttttgtccagttcagccctgctttttccaggacatctccatgggagatcccccccgaattttcagaagactgtatccacccatgcactacctctggatgtgcaccacgctggctcttcctcctgaacttcctcgcctgccctgggccagcttcctgtgtgggaaacccacaatggtgcaggcttttggggcttttctatccctcggggtcctcccttttcccctcccggcccccttgacctggctgggaccgcccccatggtataagggctttcccggaagggacagcctcatccgaannnnnnnnnnnnnnnnnnnnnnnnnnnnnnnnnnnnnnnggaatgggcccccttggtcccttccagggccaattgggaattccccccgcttgtggggaattctcccggctctggaactctttgccctccggcgcggggccc

SEQ ID NO: 354240 - DNA, 3340 bp, Homo Sapiens
  misc_feature (1772)..(1772): n is a, c, g, or t
  misc_feature (2526)..(2535): n is a, c, g, or t
cggtcccggtgggccgacttccggcgagcgggcaagcgggaaccaggtggccacccggtgtcggtttcattttcctttggaatttctgctttacagacagaacaatggcagcccgagtacttataattggcagtggaggaagggaacatacgctggcctggaaacttgcacagtctcatcatgtcaaacaagtgttggttgccccaggaaacgcaggcactgcctgctctgaaaagatttcaaataccgccatctcaatcagtgaccacactgcccttgctcaattctgcaaagagaagaaaattgaatttgtagttgttggaccagaagcacctctggctgctgggattgttgggaacctgaggtctgcaggagtgcaatgctttggcccaacagcagaagcggctcagttagagtccagcaaaaggtttgccaaagagtttatggacagacatggaatcccaaccgcacaatggaaggctttcaccaaacctgaagaagcctgcagcttcattttgagtgcagacttccctgctttggttgtgaaggccagtggtcttgcagctggaaaaaggggtgattgttgcaaagagcaaagaagaggcctgcaaagctgtacaagagatcatgcaggagaaagcctttggggcagctggagaaacaattgtcattgaagaacttcttgacggagaagaggtgtcgtgtctgtgtttcactgatggcaagactgtggcccccatgcccccagcacaggaccataagcgattactggagggagatggtggccctaacacagggggaatgggagcctattgtccagcccctcaggtttctaatgatctattactaaaaattaaagatactgttcttcagaggacagtggatggcatgcagcaagagggtactccatatacaggtattctctatgctggaataatgctgaccaagaatggcccaaaagttctagagtttaattgccgttttggtgatccagagtgccaagtaatcctcccacttcttaaaagtgatctttatgaagtgattcagtccaccttagatggactgctctgcacatctctgcctgtttggctagaaaaccacaccgccctaactgttgtcatggcaagtaaaggttatcctggagactacaccaagggtgtagagataacagggtttcctgaggctcaagctctaggactggaggtgttccatgcaggcactgcccttcaaaaatggcaaagtagtaactcatgggggtagagttcttgcagtcacagccatccgggaaaatctcatatcagcccttgaggaagccaagaaaggactagctgctattaaagtttgagggagcaatttataggaaagacattcggctttcgtggccatagctttcctccagcagcccagggagtttgacttacaaggaatctggagtagatatcgcagctggaaatatgctggtcaagaaaattcagcctttagcaaaagccacttccagatcaggctgtaaagttgatcttggaggttttgctggtctttttgatttaaaagcagctggtttcaaagatccccttctggcctctggaacagatggcgttggaactaaactaaagattgcccagctatgcaataaacatgataccattggtcaagatttggtagcaatgtgtgttaatgatattctggcacaaggagcagagcccctcttgctttccttgattacttttcctgtggaaaacttggacctcagtgttaactgaagctgttgttgnctggaattgctaaagcttgtggaaaagctggatgtgctctccttgaaggtgaaacagcagaaatgcctgacatgtatccccctgaagagtatgacctagctgggtttgccgttggtgccatggagcgagatcagaaactccctcacctggaaagaatcactgagggtgatgttgttgttggaatagcttcatctggtcttcatagcaatggatttagccttgtgaggaaaatcgtggcaaaatcttccctccagtactcctctccagcacctgatggttgtggtgaccagactttaggggacttacttctcacgcctaccagaatctacagccattcactgttacctgtcctacgttcaggacatgtcaaagcctttgcccatattactggtggaggattactagagaacatccccagagtcctccctgagaaacttggggtagatttagatgcccagacctggaggatccccagggtcttctcatggttgcagcaggaaggacacctctctgaggaagagatggccagaacatttaactgtggggttggcgctgtccttgtggtatcaaaggagcagacagagcagattctgaggggtatccagcagcacaaggaagaagcctgggtgattggcagtgtggttgcacgagctgaaggttccccacgtgtgaaagtcaagaatctgattgaaagcatgcaaataaatgggtcagtgttgaagaatggctccctgacaaatcatttctcttttgnnnnnnnnnnggccagagtggctgtcttaatatctggaacaggatcgaacctgcaagcacttatagacagtactcgggaaccaaatagctctgcacaaattgatattgttatctccaacaaagccgcagtagctgggttagataaagcggaaagagctggtattcccactagagtaattaatcataaactgtataaaaatcgtgtagaatttgacagtgcaattgacctagtccttgaagagttctccatagacatagtctgtcttgcaggattcatgagaattctttctggcccctttgtccaaaagtggaatggaaaaatgctcaatatccacccatccttgctcccttcttttaagggttcaaatgcccatgagcaagccctggaaaccggagtcacagttactgggtgcactgtacactttgtagctgaagatgtggatgctggacagattattttgcaagaagctgttcccgtgaagaggggtgatactgtcgcaactctttctgaaagagtaaaattagcagaacataaaatatttcctgcagcccttcagctggtggccagtggaactgtacagcttggagaaaatggcaagatctgttgggttaaagaggaatgaagccttttaattcagaaatggggccagtttagaaagaattatttgctgtttgcatggtggttttttatcatggacttggcccaaaagaaaaactgctaaaagacaaaaaagacctcacccttacttcatctatttttttaataaatagagactcactaaaaacaagactagtccctgcagcatatctgagac

SEQ ID NO: 354241 - DNA, 988 bp, Homo Sapiens
agcaaggcagtgactaattaagtcactaagtttaattttatattcttcacagtcatttcataatcatgtaatggtaaacaatattttcagccactttggagataagttaacttttgaaaagaatagaattctagtagtcgtcattgaattttataaaagaggtttaaaacattaaagtttccagaaataacacagtaaagaaatatgaaaataaactgggaaaataaaatatacccacccatccgaaaaatctacatcatctctttcatttgtccccaatgcctttcttttacctctccatttacttttcctagagtgcaaacagattacttagcaattaagaaacaactactgctttgtaggggcgattttgagcctaagtgctgctgttcctttaatctctcagttaatcctagaaatagtcttctgagataaacattatttgcatttcaaagattaagaaaactgcagttgagagaaagtcaaatcctttagccaaaatcatacatacagttattgaaagctgaactatgatttgaacccaggtctatccaactttaagtctgcctatgctcttttgttgcttcatggtcaggcaggtcaccttcctgggaagactggcatgtggtatttctcgagctaataataataaggctctttaggtttaaaagtgttcaattcggggctagaggccactctggtcctcaggcacttgcagttccctccccgcaaccctaaaaaaaccctccctcctgccccaaaaggattagagttgttccccggccttcatgagccctaatacctataaaaccaagcagctactccctgtcaagggcattaatgtagtaaatggggaactgtgtgtttgcataactttagtaaaggctgcctaaaaactgttctatacaacaaaattttgcaagatatgtgtccatttaatgtatctttcacattgaaaacaaaagccaatatattttataattacagc

SEQ ID NO: 354242 - DNA, 1073 bp, Homo Sapiens
gctgggtggcgaattcggcacgagggtggctggaagttactgtgaggcggcggctaagaaggcggctctggtggcggcggtggaggctgaggcggcggccgaggcggcgacggaggaaacagaagatggcagattttttgaaaggactgcctgtctacaacaaaagcaattttagtcgatttcacgcggactccgtgtgcaaagcctcgaaccgacggccctcagtctacctgcctacccgcgagtacccgtctgaacagatcatcgtgacagaaaagacaaacatcctcctgcgctacctgcatcagcaatgggacaaaaagaacgctgccaagaagagagaccaggagcaagtggagctggaaggcgagagctccgcacctccccgcaaggtggcgcggaccgacagcccagacatgcacgaggacacttaagactctcaactccacaggcgcctcctgccaggtctgctcctcggtcgcccacccgcctgcccgccatgtgtaagcaccccgcccgcccgcctccctgccggcccatccacaccctgcgtccacaccacttccaacctcataggagccgatgtatttattttccttgagtttttatttatgctgtaacctgtatcaagcgttggttaaaggggacatcagacccagtagtgtgatgttggtagatgctttttaaaaaaaacaacattgtccccccgacccccgccttccatcgggccagttccccgattcctgcccccagttctccagagaaccagagtgtgtctgtgagagtctctagcgggggctttactgtggccgggcgacaggggcaggcccggggtggcctgacctaccaggacagccgagtggccttctcccccccaacaccggtccaggccattgagactcggtcttgtcccacgcttcgcccggaactttcccatgcccagacctcactcagcgtgcacgcacgttggggagaagtcggcccttgggatctttctcttgagtcattttatttttatcatggactagtgcgtgctccgtgtccaccccaataaaagggtctttcctaaaaaa

SEQ ID NO: 354243 - DNA, 460 bp, Homo Sapiens
tggtgcttcgcctcaagcgccttggcgggaggcaggtgggggccctgggaatgaacctgtgccccgagttcctccttagaaagcaggtggcggccctggccttgtttctaatatcttcctccacctctaaaaattaggtggcagagccagctccactctgcgtgtgcccccgactctattccgcttgtgagccccactcggaaagtaggcagcggtccggacttcccttagagtcttctaacttaaaaatcgggcggcggcacattcctgggaaagggaatgtgtcttccctgtgaatgtgtctttcctgtgaatgttctctgcaaaagtcagatagcttaatcagaccaagtcagatgtaactacgatctggctgcagaaagccggcgtctgggctccttgctttatgtcttatatcccttttacattccccacaagttcgagaccgtagacctgtaat

SEQ ID NO: 354244 - DNA, 4353 bp, Homo Sapiens
  misc_feature (3862)..(3862): n is a, c, g, or t
  misc_feature (3872)..(3872): n is a, c, g, or t
  misc_feature (3877)..(3877): n is a, c, g, or t
  misc_feature (3935)..(3935): n is a, c, g, or t
  misc_feature (3969)..(3969): n is a, c, g, or t
  misc_feature (4012)..(4012): n is a, c, g, or t
  misc_feature (4032)..(4032): n is a, c, g, or t
  misc_feature (4111)..(4111): n is a, c, g, or t
  misc_feature (4161)..(4161): n is a, c, g, or t
ttttttttaatctcaaaggcaattgagtgggtcttctgggccagacctatttaatttacgaaacatagtaccttgcagagaataggcattgaaatattatttaaacaatcaaaccaaagatgttcttctatcttcagctgtcagtgatctaatgccctcatctctcttatcctcaggacccagaatggtatattccacataaaagatgctttgtttatcaaatgaatcaaaaagcacgcctgaggcatttatttttactcctttacttctgtaggccaggtcaaggtgggtctaattcacttttatcatcagcacttaagaaactggatggaagaccacaacaccttgttttttgcaaaaattttccatctcctcaatcaggccaggaagcatgtatcttctggacaggactttatctctctactcagcttagtacactgccttatattagtccatttgtcccatgttttcatcactgaataaacttgttaaatgacttttggtctggatctcaaacctatattacttcatttccttctgtgagcactctataatgataacatcatttttatatcctagggcatgtagttccgagccccacagaaagtaatcaccattcagtaagccaatagttcattcctatctgtatagaactgtaggcttcgtaaatctacacatagatctctgttgtaggttcaataatgataataaatgtttgtgcccccagttgttatctctaaggataagagtaatcaatgatcattcagcagatatagcttatatatgggtggcagtttacaaattataaattgattttacacatattttcttctgctacccaagacacaataaagatggtttatctttgcatccccaatgcctagcaatgagattggcacacaatagataactactatagtggcattcttcagacaaccaatcccttgcgtatgcgtattcaaaagataatcattgttattcaaattttcctactttatttgcacaatataataactatcatacaattttataaacctagtacccagcaccaagtgagaaaatcaacagttacatttatatggtgccttagagttcacaaaatgctaacataggtattgccttatttttggctgtggctaaatgaaatatgataaattttcagtgcctttaacagtgagttcacatagtaggcaatcaaaattgatctatttaacaggtatttaaacccttggtttgtataactacttatagaacccttctcactgtggtttaactatacaatgagaattttgtagagacaatacctagcttacagaaagttttattcatacagaaagcatcaaatttttcatttacaagtgctttataatttagaaagcacattcgcaagctgaattaagtgactttcggtctggatctcacatctattacttcatttcctcatactagctctttcctggttacctggaaaaatgtatcagtaataatttaacttaacctcaccagtaaagtcttgattgtttaaaattaagcaatatatcattccttacatctgaatagtatagaggataaactttcctcttattacataggagaattaatcttgtattttacagtacccaaaatagctggtatgtaagaggcacttaatattcattcatccattcattcattcataaatatgtagcccattgacatttgtatcatgctttagtttacaaagcactttaatatgcacctttctgaaattttttgttctatgagaatacttttccccctttggtagctctagcacccagcatggtatctggcacattataggtgaccacaacaagcttagtcccttatgttttcagtatattttaaagtttaaaagcagtttccatgtgttttcgtttctgatacctggaatactgcatttttactcaaaattaccagagcagcaaacacaaattggcctcaaatatacatataatttattcatttatcaaacaattccttgtgtctgcatagtactatatccttttgaaagagcacttttttatgcttgctcctttctttgtatccacaacgcttatcacagtagaatacaagtgctttacagtttacaaagcacattcactattttttttcaggtcacctagatatcaataatcattgcatttttagtgcctagcacagggacaggcacagaaaaggaaactagtagtattcagaaattttctctgaataacaaataatacatcagggggtggtaagctatgaacagcaggccaaatccaattggctcaaaaactaagaatgattttgaccttataaaaacgttgtttaaaaaacaaatatgtaacagaaaccatatggcccacagtctaaagtatttatgatttgaccccttacagaaaaactgtggacccctgatttacataatgcttcacaatttacactgcactttcaaatgttaactgcatgattgccaatacactaattggtttttctcttatgttttacagtgctttcatacacattatcagtcatttaaatcaacttcccacataaacaggaagaaaaaaatcaaggaaagtattaaacatgctcaacagtcccaggttctctcatctttaagcctagagatgggtattaaacccaggagtagcgttggcacagtccaccaaattatttggccactactatgagcagggagttcaggctgtccccttgggacctcgctttgtcccaggcacagtcaccctttccataaccatcactagaaatcccaaaccccagaatcctgctcacctaagctcaaagaaggaagctgttgctggcaggtgcttctcagaagtctggcacatctgtgtatttcttgtctaattcttctcattggcctggagcatctcttcacatttttctctagagagcctggcacttttttttccccaacaacctgaccattttatcttctcagtctagggcttctggggtcaaaagaaaggactgaaatacagtatcacctatatgaatgtctgctcctgagggaagttaacaaaagccagattagatactgactggattttggtgtctctctcaagtggagaagatgtgaatagaaacagaagtttacaaaacactatagcctaacaaataggtaaaagctgtgatttaaagctggctcaagactggcccaggcataatactgtcaatctaaaggtaaccggcaacatcaaaaagtacatctcaaaagaatcaggcttaaagataaacaggagaactggaaatatctaagagtaagaagtgtaaacaatagaaaagaggtagggtttagggttctcatcttgggatttccccaggtcttcaagcttctatccttcctgggttctgggtcatgggcctccagattccggccgttagtcttgagatacctttttcgcttgggtcctctatccatctaggtaggctttgtgacaggggccttccatccttgggttgtaggtcttccagctacaaccctgggctaatcttaggtcgttggccttgtgtcacaagtctcagttcttaggccttccatgtgtcctgtcccaggtcttaagacttctaactcaagccttgagacttccatccaactcaggaccttcggtccaattcaggccaccctctgttttcgtggctcttgaggcttttgttggtttcaggcctgaggcttctatctatcttggaacatgggctttccatcttagtcctcgggtctcaagtctcaaaccatctgtcttatactttgggccttctatccatatgagccttccaccttctgccctacttgagttctgggttttactgcagtctagggccttgttttggtcttggntcatctcacntggcngcctggcataaggaaccgctccacaatgcttgctctgatagccgacgttctgcacctntcaggcaggggttaggaagcccctctgccacacntgacacacacacacgtacacttgcccacatatgcaaagaaatntttaaggagagattacatgnaatcaaagagagggagatagattcatgaagaggctgaaatactcaaaggtgagtagaaagggaagaagcagagaacaantacaagccaacagagattaatactgaaatagaaaatcacaaacagcaagngatgctgaggcacgcaggggaggagagagagaatagcccaagagaggcagaaaggaaatgcagaaatgagaaatgtgagataaaaagtagaaacagcagaaaggaggccagactcagaaaaaaggtgaaatttaaaacgaacgagaaggggaaggggtaacaaataatcacagttcacaaagagaaaagaga

SEQ ID NO: 354245 - DNA, 862 bp, Homo Sapiens; identical to SEQ ID NO: 102260

SEQ ID NO: 354246 - DNA, 574 bp, Homo Sapiens
ggtttacaacccccacccctttgtaactgtagtttgcttacactgtggattctaaagagacatgtaaatctggggccgatttcatctgtttaatgattactccccacccgatagagctattctatactgttgctaaaatttcattaagtctctcaagatgcattgatgagatgagacaccatgaataacacattcatcaactcaagtatggcaactgttcagagagcttcagagctttggtacccgagtgcagacttggtaattaccgggaatttgtctcccccgtataaattctggcgaacaacgagaaaacaccatctgtgatcgtttccacatcacgtttgctaacagagcacttctggagagcaatggccagtccaactggaaaatcagccagaggagctggttcctcagcactcacaggctgaggtgcctttcgggggcagcgccaccttctgaaggggaaccaagacagatttggaggggacttgctgctaaaagcatgtgaacagagaggagaggcaaaagcacattgaaaatggtgcatgtttctttgagagaaagaaaagccagc

SEQ ID NO: 354247 - DNA, 574 bp, Homo Sapiens
  misc_feature (199)..(231): n is a, c, g, or t
ctgcctcagtgctcacaaccttccagtgtggatgttacagggtggcccccattctaccgatgtgaaaactgaggcgccaggacacagtggctgccctgtcgctggatcagtagcagagccagagctgcctccgagcgccatgccgccctcgggaatcatacaggaagagcacagtggatccagggtgggggcctctcannnnnnnnnnnnnnnnnnnnnnnnnnnnnnnnntcagctttacggcggccagtgctgaatggccctgtggccctccctgggccttttggtcttggccagagaagacagaaggacccggcttgggcttctgcatgtcctacccctgaccccagcctcaaggggcccctcaaaggccctctctgggggctctggggctcagcacagctttcctcatggatctaagcccctgtctttcccacctgactctgagtggatgttttgggggatggcccctgtggggaggagctgccatgccggccgcctgctcacggcagaaggttgctattaaaatgacataggattgcagactgctgctgttaatacgagcattttaagc

SEQ ID NO: 354248 - DNA, 489 bp, Homo Sapiens
taaagatgaaaaaaggtagtatccagtaggttaaaactaccatattcttaagatgatatttagtgttggtgaaactgtaggggaatgtaaaacagaatatagcctttccagcaagtatcagattttcaaaatgtgaacagaatcattcactgtcatcctctaattcctagaatacaaatcagactaatgaacatggcttaccaaatcctgaaaggttgtgctctcgcctcctgtcagtttgagctcctccttaattcctggtttagctaggctgctcttccaattcctgcaccttccagccccggactttttaaattgctgttctttttgctgcaaacacacacaagtttcctcccttctttgcctcactagcactaatgactcatcagatctcagcataattgccaattctttgggaggcttttgcctggaagcacagtttattactttgcctttaacactgttgcattttacatttattttcttgtg

SEQ ID NO: 354249 - DNA, 1787 bp, Homo Sapiens
  misc_feature (1777)..(1777): n is a, c, g, or t
taaaatattgggtttattttaaaaactcagcacagtacaaactgccacacaaattactttatactagcaacaaccggtgctcctattaattcaagtgtacacatttaactccccaggttaaacaccctgtaatttaccttgaagctctttacattctgaagttatataaaattaagcaggaaaacattaacattaaatgaaaatcaattttgcacaaataagtgtgatcaagcagcttaaatcacctgaaattcttgtacttcagagaaaaatcccagatgacagcactggacaggttataaagagttcccttattccctgggggcgtctcaggcattctttctgcatgtttccttcactgagcctcaggctacgaattgagagaaagtctttccaggcagtggcctgattcttacgcacattccgtttctttttctgaattcagagtttctgaaaacacaggcttttctcttggaaaacatgatctgtaagatgttggaggaccaggctatgatggttcttaagtttcttcctttctctggggagacacagaggtcttcgcgccatccatctgttccctactcccacttgggttcctttgtggtatgaaatagagacacttctgacctcatcggagacacagcgaggtctgtaccttcacccaggcacaggagaaggcctggtcctctcctgattcctcaaacttcctctgaatccagagaaagttttttataccagattgtgtcaacacacagcaataaaatatgctgaggaactaaaaatgtgaaaatcacctaggaatggaacgttgaagaaatgtgtgtctattattgtgcactgacagccagggggctcctgtttggaataaactgcagcagaggagaggtttggcagcacagccagactgtgctctccctgagtctacagcctagtagggccagaggtcctgacaggaaatcgccaaagatgcaaaacaggggccccgtgatgggaccagctagtagccgcacttgtgttggtatcaatgccagcaagggttcaacagcaacctgaatccttgtgtgaaatatacgtatcgattatctttcaaaacattttcatcaccaaactgagccagaggaatgaacatggtatttcaataggaaaagtacacattctgaaaatattgccataatcaagttgtgttgcctgggcactgataagtgtgatacattgcatcatacatttccagaaccattgccatgacaaaagaaaatgcaaagtgaggatgacctccccggcactgccttcctttcagtgggcagcaccttctgggcctggatggacagctgaggatgaaaatttcctgtgggccaaaacaaagggtggtgccatcccttctccagtgtgacacaaactggcctcgccctcagaagagcctttatgtagcagcctcctaagaattctgaggtgaacacagcttctgcataatcttcgcacatatcctgaagttcagcagccacagcacccagagcttcatctaccagctcttctgaaaagctggaagacaaacaacacaactaaaggtatgtacaaggccaggcgcggtggctcacacctgtcatcccagcacttttgaagaagaaaaacaaggtgagaggccctgctctcctagacagaaggatggtggtgcttagatcccaaagtcctgctagagggacaggcctaaaacatacacaggatggacttcatcctcaatgtgtttgaaacgagaggcgaccagaaactaaccagctgnaacctagccc

SEQ ID NO: 354250 - DNA, 433 bp, Homo Sapiens
  misc_feature (11)..(11): n is a, c, g, or t
  misc_feature (30)..(30): n is a, c, g, or t
  misc_feature (38)..(38): n is a, c, g, or t
  misc_feature (47)..(47): n is a, c, g, or t
  misc_feature (55)..(55): n is a, c, g, or t
  misc_feature (82)..(82): n is a, c, g, or t
cactcccccgnaaagactttcctcctcaancccgtaanctgaggccncagtgaanggaaaccatgccagaaagaaatgcccngaagaccgccccccccgggaataagggaactccttaataaccctgtcccagtgcccgtccatcctgggatttttcctctgaagtacaagaatttccaggtgatttaagcctgccttgatcacacttatttgtgcaaaattgattttccatttaatgttaatgttttccctgcttaattttatataacttcagaatgtaaagagcttcaaggtaaattacagggtgtttaacctggggagttaaatgtgtacacttgaattaataggagcaccggttgttgctagtataaagtaatttgtgtggcagtttgtactgtgctgagtttttaaaataaacccaatattttaaagt

SEQ ID NO: 354251 - DNA, 971 bp, Homo Sapiens
  misc_feature (297)..(323): n is a, c, g, or t
ggaaggtgccccagtccttctggaggcctgggctgctactgttggccaccctgtgtctagtgatgctctctgtgctcacctcctaggccatggagcctgagggggcctgcaccgggtttgctgaaactgacagagcctgggctccagacctctctccctcctacagtgctctccctccctgggcagattggcaggacaagtgggagcagatggcctgcctttggctgagagggctacctgcccagcccctcccccaacaagatctcttggactcaggcctcagagcctggcctggtnnnnnnnnnnnnnnnnnnnnnnnnnnntgcgggaggggaggactggggcttggaagtccagcacccagggaagatctgtcctcctgttcttgggaagcgttgcctgacggcttctcggctctaccctcacccttctggccaggatcccgcagggcaacagccccatctgcttggctgaccccacacccaggaccactgtccggctctaacacagctattaagtgctacctgcctctcaggcactctcctcgcccagtttctgaggtcagacgagtgtctgcgatgtcttcccgcactctattcccccagcctctttctgctttcatgctcagcacatcatcttcctaggcagtctcttccccaaagtctcaccttttcttccaatagaaaattccgcttgacctttggtgcactgcccacttcccagctccactggcccaagtctgagccggaggcactttgtaatagagagggcggggggagagtaggatgtgattgcccttgaagaacaaggctgacctgagaggttcctggcgccctgaggtggcttcagcaactgcccaggtaatgcctggcatgaggggttaacgtcagccaatgtcagctgcttctcttggagcctctcaagtctatctccctaagacaggaagggcaaacgcaatttctagttcacca

SEQ ID NO: 354252 - DNA, 1816 bp, Homo Sapiens
  misc_feature (1275)..(1275): n is a, c, g, or t
  misc_feature (1278)..(1278): n is a, c, g, or t
  misc_feature (1286)..(1286): n is a, c, g, or t
  misc_feature (1293)..(1293): n is a, c, g, or t
  misc_feature (1350)..(1350): n is a, c, g, or t
  misc_feature (1383)..(1383): n is a, c, g, or t
  misc_feature (1419)..(1419): n is a, c, g, or t
  misc_feature (1480)..(1480): n is a, c, g, or t
  misc_feature (1483)..(1483): n is a, c, g, or t
  misc_feature (1490)..(1490): n is a, c, g, or t
  misc_feature (1492)..(1493): n is a, c, g, or t
  misc_feature (1561)..(1561): n is a, c, g, or t
  misc_feature (1572)..(1572): n is a, c, g, or t
  misc_feature (1579)..(1580): n is a, c, g, or t
  misc_feature (1607)..(1607): n is a, c, g, or t
  misc_feature (1612)..(1612): n is a, c, g, or t
cggcccgttggcgcccttcgtggactgggctgtacggtgcgcgtgacggctgcgtgcggcgggaatcatggctgctcgcagagctctgcacttcgtattcaaagtgggaaaccgcttccagacggcgcgtttctatcgggacgtcctggggatgaaggttctgcggcatgaggaatttgaagaaggctgcaaagctgcctgtaatgggccttatgatgggaaatggagtaaaacaatggtgggatttgggcctgaggatgatcattttgtcgcagaactgacttacaattatggcgtcggagactacaagcttggcaatgactttatgggaatcacgctcgcttctagccaggctgtcagcaacgccaggaagctggagtggccactgacggaagttgcagaaggtgtttttgaaaccgaggccccgggaggatataagttctatttgcagaatcgcagtctgcctcagtcagatcctgtattaaaagtaactctagcagtgtctgatcttcaaaagtccttgaactactggtgtaatctactgggaatgaaaatttatgaaaaagatgaagaaaagcaaagggctttgctgggctatgctgataaccagtgtaagctggagctacagggcgtcaagggtggggtggaccatgcagcagcttttggaagaattgccttctcttgcccccagaaagagttgccagacttagaagacttgatgaaaagggagaaccagaagattctgactcccctggtgagcctggacaccccagggaaagcaacagtacaggtggtcattctggccgaccctgacggacatgaaatttgctttgtcggggatgaagcatttcgagaactttctaagatggatccagagggaagcaaattgttggatgatgcaatggcagcagataaaagtgacgagtggtttgccaaacacaataaacccaaagcttcaggttaacggaagacatgatgcagagcaagcctctgtgattcctgcccagcacctgtgaggcctgacgtgtcagttcccaataaatgctcttctgatttgtttcccgtacaggcaaggaggcttgggtagtgcagatttgtgtatttcaatctttgaaagctctgatgtaatttagaaatgaaatccaatcatgagtccaggtagagaacgcctgctgtaatctacactgttgctgggactgcgcattctgtatataactgtgttggatgagtgacagatgattgtccagactaggacagcggcatgaacatgacttnggntgggattncggatanttagggttacctctgaatcgtgtagcttttatgagagcagctgtgcaagtgaatccncattaatgccttgtcgtggtgccattcccagcncctgacgatacgctcttctattgtcttattctggcnggttttgacgttttaaattttttaaagaaattttattccttggaccaaaaggcccgcccanccnccccccncnnccttgctttcacattttgagtgtccagaggaaacagcacaaggaatgagtgtgtgacgttgctgcacncctgaccctgngcgagcnnctttctgggtatatattttgttttatnttttnccgtgtatatttttaatcccgacagaacatcatgtgagatttctttaaaatggattaaacgatttcttcagcctgaaaaaaaaggttttgaaaatgttttcttgtagttttgtttggttctaaacaacaaataggttttaatcactcgaaatggaattatattgtgtattcattgaataaattttttttgaaagtaagcttctg

SEQ ID NO: 354253 - DNA, 434 bp, Homo Sapiens
atccaatcatgagtccaggtagagaacgcctgctgtaatctacactgttgctgggactgcgcattctgtatataactgtgttggatgagtgacagatgattgtccagactaggacagcggcatgaacatgactttggttgggattgcggatagttagggttacctctgaatcgtgtagcttttatgagagcagctgtgcaagtgaatccacattaatgccttgtcgtggtgccattcccagcgcctgacgatacgctcttctattgtcttattctggcaggttttgacgttttaaattttttaaagaaattttattccttggaccaaaaggtttgggtttaaccacccccctctttattgcttcccatttgagtgtccagaggaaacagaaaggaatgagtgtgtgacgttgctgccgcctgactctgtgcgag

SEQ ID NO: 354254 - DNA, 2335 bp, Homo Sapiens
  misc_feature (1156)..(1156): n is a, c, g, or t
  misc_feature (1158)..(1158): n is a, c, g, or t
cgccatttgcagagtgggcaggatcttaagacccgataggtgcagaacccatctggacacggagaccaggaatggagttccatggaggcctggctggcactgcacccgggcatgaggacacatccagtaagaagacctgcctcaagaggtgcactgcggtgaccagtggaggtgactggttggagcctggaattggaagcagattccaagctctggtggacaaactctccaggcctggtgggaatcacagctggggcagacctcatcctggctgcctggccacaggcccccactctctgccactggtggtaggacgatgcctgtgtggagagctggcttctctgctcccgcctggtccaccacttggctagagttcagagacaggaagtgattggtctaagctaacacagcaagttggtggcagacctggttctagaggcaaaaccttcttccagatgtgaatgaaacctgcaggcttcattttccttctgagcggtgcttcttagctctttggagacacgaagcccttggaaaatctgatgaaggttacggaccttccctaggaaaacagataactgacgtagactcaaaaaccccaagcaatttcaggagccactggactccctgaatgaaacccatccctggactccaggctaagaacctcagccctggggacttcacctgctgccctttccttacctgtcacacattgagcgtcgagtcaaggccactgtacaagtagtgcccctccctccccctggccaagcctccttcccttgttcaggaataaagaattccgaggagccctttttagtcattcccttctcccagacctaacgaatggtgcgtcaggtttctggagccttcatttcccttccccagacattggcagaggtcccttgggctagattttctcttctggttttgtttcttgttctgcctgactggccgctggcttccacaaaggagccctttgctcctggcctgggctctgatttcactgtgtggtctcaggggaagctggactgctgtggacgctggtgggagcttgagtctggtctgagtctgccccagggagaaagaatcctgcttccaccaaccaagcccagtcagcggttactcccaactgggccaagtgttcagcccagtggtgggngnaggaagaggatgagggcctcgctcctggtgcctgtggctctgggcagggtgagaggtcggtggaggatctttctgtgtgttctctgagtatgcagcagtgcagtttgaaagggaacagggcccaggcaggcagcaggacgaggactcctcccatcttcacacctgaaccagtcagcctggaagctacaagttctcacctgcctccccagaatgaacatcagaaaaggcaaaactgaccagggctgggatgggtttgggtcagcgtggttggagggcagcctgtggatccctgcactggagtcttgctgtcttcgatgcaggttggatcatacattgttacctcctactgtatgcctcaccctggaatagcagaatgctcagggggagatccgagaacgagaaggtgctgcccagcccaaggagcttccaagtctcggctctgatccgtggccgacctagaggaaacctccacacacgcccctataagtgctaatggtgcagtttgtgtccccctctggcccatcactgtgctgtgcttgttcctgcctctgtgccttcccctatactgctcggacatgtcccctttcgtctcctctacccagctaagcccttatgatccagcggggcccaggctgtcccaaaccacccgagccaacagtcctcggttcctgctcacgaacaggtcccgtgtgagcacctgcaccaagaactgcatgctgtcccatggacgctccagtctcttccgtgtgtgtcttgagtccctaactagacagttagctccctgagggcaagggactgtcatttcctcttgagtcctaccagggtctagcacaggactgggctcctaactctcaggaaacacttgtcggctgactggtgcctcaagcgctggagcttgtcggtggccggtaatgggcagtgcacgtggggagagggtatgtgagttaactcaagggtgccttttcttgggctgtgggctggctcccctgggtcaaaagtggatgtcggaggcctcaggctcttacctccttggggcagtgggagcatcagggacccccacccccaccccggctctgcaggagtgcacggaagtggtcgtccagcctggatatttctacaggttgctgactctgcgggagctgactgagtggaataaatgttctctcaacaaaaaaaa

SEQ ID NO: 354255 - DNA, 857 bp, Homo Sapiens
  misc_feature (50)..(50): n is a, c, g, or t
  misc_feature (290)..(299): n is a, c, g, or t
  misc_feature (326)..(340): n is a, c, g, or t
  misc_feature (779)..(779): n is a, c, g, or t
cgtgtagatagaaaagaggactggtcttgggaacatctttggaaaaaccnacaaacaatagttctagggagatgagaaaaaaattcaccttacagtgctaagaaagtgcattagaatggaattgccctttccttaaggagacagtttgggctctccccttgccaccggctctggtgttttggcttatgcgttccttcaggttgagctgagcagtgtgttatgggaagctgctcaatttcctttcattcaattccacctccttcctgaactctaatagaggttaaaagggnnnnnnnnnnttctgtagatagcaaattgtgtgtgtnnnnnnnnnnnnnnntgtgggtgcatggaggacaacctgcaactctgagctccctacttcctgcctcatttcatgcagtcttttctgaacagcctatgctgctgccctgctggccccttgtgcacggcagctggccgtgtccgtagctgtcagtatgacttagatctagctcctacctactggttgatgtgttttttccttttgccaagtgattgagtctgtttagtagtttccatcattctagtctttaagtaaaaatgacactattgaggaaagtcagtctactcccttcttcctccccccaaacacgtgttctcttttgtcaggaaactcagccagtggactgtggcagagaaagtcctccactcagaggcagagactgagttaagtcataggtggccttaggcatctgcatgtgtttgcaggggttaagttttccttccagtgagggctnggagggatgaatttagctgggacctgaagccccgcttaggttcttgacaatttggccaacaacctctgattctaaggt

SEQ ID NO: 354256 - DNA, 1061 bp, Homo Sapiens
  misc_feature (228)..(228): n is a, c, g, or t
  misc_feature (232)..(232): n is a, c, g, or t
  misc_feature (490)..(490): n is a, c, g, or t
  misc_feature (492)..(492): n is a, c, g, or t
  misc_feature (613)..(621): n is a, c, g, or t
  misc_feature (916)..(965): n is a, c, g, or t
ccctgggggctcccagctctcacaatcactaaagggcccaaagttcgggatggttttgggcaggggacaaggaacatccatcagggaatccctggagggatgatagcctggcacctttccctcctgggggattcccgggacacccctagggcctactgcttctctcaaccctaacctttgaggagggactaatgattgggtggggaagcttaagtcttgctctgtgcnaggnccagcccctgggctgttcgtctatctatggtttaagatgctttcagaaactggggcattctccctccccaactccagaggggtggcttgaagaaagagaaaccaacgaaggggccaactgtataaatctggggaacccatgaatagggtcaaaggtgtgagcccccgcccctgcccccatcctttggatgagatagtggctaggagcctccattcccacctgctttccagaaggctgggggccctgcctcccccagcncncagcccccaggcccccactagacccacaggcctgcagtgatgaaatggcagcatgggcagcgtctcagagatggtttccaggcttgaaatgggctgagatgagcatctgcgagagggtcannnnnnnnnaaactttggagcaaggagaacccgaggctgggccctcagtcagcacagctggcttttctgccctggtctcccaggcaccgccaaagtacttactgttcacaccagctgcgggcaccggaggggcgcacgcggggctggggtgggttgggggttgctgggcatttccttgggtttagccctgagggatctgcccagctggggactcaggaaaaaagtctcaggctaaatggggacagtctgtgagacacgagcagggaacaatcacgagaaccggcacaagtcatgcaacaaaacnnnnnnnnnnnnnnnnnnnnnnnnnnnnnnnnnnnnnnnnnnnnnnnnnnatgtgaacaacacggaaaagaacacccatgcctggcccctggcgtcacttcatttctccgctacttcccccacagcccacctgaggacaacaaaga

SEQ ID NO: 354257 - DNA, 479 bp, Homo Sapiens
  misc_feature (22)..(22): n is a, c, g, or t
  misc_feature (31)..(31): n is a, c, g, or t
  misc_feature (86)..(86): n is a, c, g, or t
  misc_feature (111)..(111): n is a, c, g, or t
  misc_feature (128)..(128): n is a, c, g, or t
  misc_feature (130)..(130): n is a, c, g, or t
  misc_feature (142)..(142): n is a, c, g, or t
  misc_feature (268)..(276): n is a, c, g, or t
  misc_feature (403)..(403): n is a, c, g, or t
  misc_feature (461)..(461): n is a, c, g, or t
acagcaacacagggttatggcngcctaagcngtaaggatctgaggtagccgtcatcaagatgagaatggagttacagagaactaantcagatactagataatgttgtcccntgagggatttcctgaantnttaagctgtgcnacaggttaggaaggaaagcagactagtcacatagtgttgtagaattctcaagataacttctgaatctccattacaattcctccattaaatgggctatttattgtaagtactgtttttgtggtattnnnnnnnnntgtagtgcttcccaggcttctacagacgtgaacatattgaagcaaaatatgaatcatagaactctttatccaaagagaaggaattatgctggaaagtaatccaactcttgaaacagtagaccaaaanaaataagtgtattagagttaccaatctttcaaggctttaggtgaaagcaaacagatantcaagtatccaacttatg

SEQ ID NO: 354258 - DNA, 1809 bp, Homo Sapiens
  misc_feature (1693)..(1693): n is a, c, g, or t
  misc_feature (1704)..(1704): n is a, c, g, or t
  misc_feature (1748)..(1748): n is a, c, g, or t
  misc_feature (1778)..(1778): n is a, c, g, or t
  misc_feature (1788)..(1788): n is a, c, g, or t
  misc_feature (1796)..(1796): n is a, c, g, or t
ggaatttccgggatcggggggtggggaaagatgctcttccgtgacccacaattattggtgactattgcctgtccataacaggaaaagcgattacggattggctgaggcgaagtagtagggcagaaaagtgggtatagctgcctgcacgcacgcttggtgcgtgcgcggcgactgcgacgggcagtggcagtcatggcggctcagtgcgtgaggttggcgcggcgcagtcttcctgctttggcgttgtctctcaggccatctccccggttgttgtgcacagccacgaaacaaaagaacagtggccagaacctggaagaggacatgggtcagagtgaacagaaggcagatcctcctgctacagagaagaccctcctggaagagaaggtcaagttggaggaacagctgaaggagactgtggaaaaatataaacgagctttggcagacactgagaacttacggcagaggagccagaaattggtggaggaggcaaaattatacggcattcaagccttctgcaaggacttgttggaggtggcagacgttctggagaaggcaacacagtgtgttccaaaagaagaaattaaagacgataaccctcacctgaagaacctctatgaggggctggtcatgactgaagtccagatccagaaggtgttcacaaagcatggcttgctcaagttgaaccctgtcggagccaagttcgacccttatgaacatgaggccttgttccacacaccggttgaggggaaggagccaggcacagtggccctagttagcaaagtggggtacaagctgcatgggcgcactctgagacccgccctggtgggggtggtgaaggaagcttagctgctgttgatggggtgggtgtttttaaactcacttgatgtaactctcaaggctggttcattgtttctcatctatgagtacgtgtgaccttttcccaaaccttattggaaaccttaagtaaccagtggctaaacagaaaagccggttgcccaactgcattaatgaactctaattcgggagtctgttcccttttagtgccacgcgttgaatagttccacatactttcagaagagctcagcagggccctgcctggtctcccgagcatcatgagtaacgtgtctgctcagactctgctgacaccaaagtattttaaacaaataaaaggtcttggggaattctgtttggctacctgggcacgccagtctgcaccatgtgtccctgcggcgcatgagtgactggcgtatttagcccgtcacatttcattcgctgaaggaaaggcaagagagttgaaacatttttcttacttaaaaaaaatgatctttgtgaagaacatagtgagttcgtttgtcttcagtcaacagcggctgaaactgaccactgagaaatgggtgtgggcactgacagttctcccccattatttggccaggaattgagcttggcttggcaaagttccttttaccctgttctgttcatctaaatgcagacatatttaaatcatattcaactagttactaatgacctcaagttgtattccctggcaaaatggactttctcaaaataggactgcacgcttggtgtactttaaatgttaatgtttaatttaaaatttttatttaagaggattaaagccctaatgtttattttcctactttctgaaaacaattttgtgtcctctcatggagatccntgccgctgagngaggccatgggcttagcctttcccattctctactccagcccagnaggtggtcagcttgacacgtgcgtgcgtgnacattcacgnaccacacntttacagggtttt

SEQ ID NO: 354259 - DNA, 785 bp, Homo Sapiens
gaggaacatggcgttgctggtgcgagtcttaggaaccagactagcatttctcagtgggttccagtatgcagccgattgatacctgtgtctcctacccaaggacagggggacagggctctgtctcgcacttcccagtggccccagatgagccagtcccaagcatgtggtggatcagaacagattcctggaatagacatacagctgaataggaagtatcacaccacacgtaagctttctactaccaaagattccccacagcctgttgaggagaaggttggtgctttcacaaagataatagaagccatgggattcacgggacctttgaaatacagtaaatggggtgtcagatgcctgatacattcaattcatggtttcttataaccctactccacgtctggatgtgtctagtccgaatgaagcaggaaggccggagtgggaagtacatgtgtcgtatcatagttcattttatgtgggaggatgttcagcagcgcggcagagtcatgggggttaatccctatatcctgaagaagaacatgatcctcatgacaaatcatttctatgcagcgatcttgggatatgatgaggggatcctttcagatgatcatgggctggccgctgccctctggagaaccttcttcaaccggaaatgtgaagaccctcgacatcttgaattgctggtagagtatgtgaggaaacaggtgagcgaccctttccctcccctcccaagtcctggcaacagtgggtcctcctcttgggcgtacggggaggggataactctagagcga

SEQ ID NO: 354260 - DNA, 837 bp, Homo Sapiens
  misc_feature (821)..(821): n is a, c, g, or t
tttttgaagtctctgtttcttttaatggccaactcaaccccatggctgaaagccgagggacaacgcgtggtcaccgaccggactcggcagcattacaatctgctcctaggccacagcaggccctggggggtttcccttttgaacctacaccatcccttccttggcctttgggaaaagctatcagtcacatgtagttgctggagggggttggggagtgtgtgctgggggactctcactcggggcttcccctaagggagaggacaccccgggagagctaggggttctcccagccctgtaccccagcagatcagactcctgggcacactaagaggaaactcaacacaaatggggccaggtatttgacagatgctgttcagaggtcagttcaggccactttctgcagggtcctggaccaacaggcacttctctcctggaggttcctcgaagccagctggcgggccgtgcggagggcccagcccatcaaagtccctcgtcgttgtaagtcggagaatggggcttcaggatgctctgaggattcttctccactagagggcgccagctcacctcccctgtcagaagcagatcctccccgttcatggagtccaggtactgtatctgtttcctcacatactctaccagcaattcaagatgtcgagggtcttcacatttccggttgaagaaggttctccagagggcagcggccagcccatgatcatctgaaaggatcccctcatcatatcccaagatcgctgcatagaaatgatttgtcatgaggatcatgttcttcttcaggatatagggattaacccccatgactctgnccgctgctgaacatcc

SEQ ID NO: 354261 - DNA, 1000 bp, Homo Sapiens
gggacccggaaatggttattgaggaacatggcgttgctggtgcgagtccttaggaaccagactagcatttctcagtgggttccagtatgcagccgattgatacctgtgtctcctacccaaggacagggggacagggctctgtctcgcacttcccagtggccccagatgagccagtcccaagcatgtggtggatcagaacagattcctggaatagacatacagctgaataggaagtatcacaccacacgtaagctttctactaccaaagattccccacagcctgttgaggagaaggttggtgctttcacaaagataatagaagccatgggattcacgggacctttgaaatacagtaaatggaagattaagattgcggccctgcgcatgtatactagctgtgtggagaaaactgacttcgaggaattctttctaaggtgtcagatgcctgatacattcaattcatggtttcttataaccctactccacgtctggatgtgtctagtccgaatgaagcaggaaggccggagtgggaagtacatgtgtcgtatcatagttcattttatgtgggaggatgttcagcagcgcggcagagtcatgggggttaatccctatatcctgaagaagaacatgatcctcatgacaaatcatttctatgcagcgatcttgggatatgatgaggggatcctttcagatgatcatgggctggccgctgccctctggagaaccttcttcaaccggaaatgtgaagaccctcgacatcttgaattgctggtagagtatgtgaggaaacagatacagtacctgggactccatgaacgggggaggatctgcttctgacaggggaaggtgagctggcgccctctaatggagaagaaatcctcagagcatcctgaaagccccatttctccgaccttacaaccgacgaagggacttttaatggggctggggcccctcccccaccggcccccccaacttgggcttccaaagaacacctccacag

SEQ ID NO: 354262 - DNA, 1052 bp, Homo Sapiens
  misc_feature (902)..(913): n is a, c, g, or t
  misc_feature (930)..(984): n is a, c, g, or t
cttgtgggtatacctaccccaaaattgttttctcattcacagcattagcatattcagcaaatccatctgtggtgggaattaaaaatattattggtattaaagaaatccattcaccccaaaacttgttttacaggattacaattttaattcaaaatttccagatttgggctatttctgtatgatccaataacttattttgtcacagggcttaatttgccatttttggggatttgtcgactcattttgtctgaattttcacaactggtattatgtcactagctacctgatacggctatttcccttataactcaatagtaccttaacacaaagtataactctgtagagttggtgaatattttagggaaatattagcaaaatgcatgtagtaaagacatcttatgaaaactgtattcatggaatttgatttagcatgctcagttgccagttcccattatcgatactctttctttgcagaataccttagaaccgttatttccctcagtgtagattgctcttaaaatgtattcagttatttagtggcccccacaggagtggagtcttgaaatctaattctaaatgccagtcagtgatgatcgcatcacagttgagtgaaatggccttcctgttcagctgttagagactgaagattgttagggcaccttagaatgtctcatcttttctaggttgtcaacaggtactatttgtcacataactaactttcgaggcactggaacatacctgaactaagaattaaatcttttactttatactcacttaaaatcaagaatcccatctaaaacacataggtaccttatctgaaactcttgcacttccccaaccagggcagaaatgaggtgggagaagtttgactaaaatgagggatgggggaaagtaaaagatgnnnnnnnnnnnngagactcgctttgtcannnnnnnnnnnnnnnnnnnnnnnnnnnnnnnnnnnnnnnnnnnnnnnnnnnnnnngttcaagcgattctccctgcctcagcttcccgagtaattgggaataacagcggcctggcctccaggcc

SEQ ID NO: 354263 - DNA, 897 bp, Homo Sapiens
  misc_feature (174)..(174): n is a, c, g, or t
  misc_feature (189)..(189): n is a, c, g, or t
  misc_feature (658)..(764): n is a, c, g, or t
  misc_feature (774)..(787): n is a, c, g, or t
tttgcctaaaacaacctaagatgtattggttatggaatcatgtgttggataggttcttaagacctgtttcctcaaatcttgacacagttttcaagggtggcttattgacttgcacggttgggcagataatccagatttacctaagattgggtaaaaaagtcatctgtgactttnctggcagggcatttnctaagtggagtacaggatctaaaagggttttcttagaaagggcaatattgtccaatgaagtaagcagaaggactctgggttagaagcatctgcacaaaaactggtgagacctactctccactgctctgcagctggatggctgatggcaggctgagcagtggggaagcaggttttaacaacagggagtccttccaggtcactgtatattgagaagaaacataaaactattgtctgttacattccgaggtcagccttcttcttaacgttttataatatgcaaatgccagcttctggaaagcaagtatcatcatgtaccaaatgctttatacaccatcacattcatgaattttttagcatggtcagaacttgtgtaaatatgtctcttagatgattttggggagatgtgatttatttttcatattttcaaaatgcatttcatttcaaataaagttatctattgagacaaccnnnnnnnnnnnnnnnnnnnnnnnnnnnnnnnnnnnnnnnnnnnnnnnnnnnnnnnnnnnnnnnnnnnnnnnnnnnnnnnnnnnnnnnnnnnnnnnnnnnnnnnnnnnttttgggggnnnnnnnnnnnnnnaaaaaatttttaaaaccttttttttggggccgggccccaaaagggaaagaaaaggggccaaactgttttccaaagaaacccgggccaagaataggggtgggattcccccc

SEQ ID NO: 354264 - DNA, 809 bp, Homo Sapiens
ggcacgaggtttttgtcagtccataaaattctacatgtttaaattttttgtggacctaccaaccaggaacatgttgcttctcaggtcctagtatatcctccaaagaatataccacaagtttttccatttgactttgagctgctgttgaagtggtgagtgctgtgttttgagcttattttgaacctagatccttgtgaaaggtacaaatagaggtaatagttaagttatggcatttattagaagttttattatttggcttcctttagaattattgtgaagtttaaaaatagcctttctcctgcaaattttcctagtctttagtaactgttagtgttctatatagcacaaacttgaatctctcagccaaaaaagggaacatatatactgtttaagtatggcaagttttctttggtaccaatttgtttagataattttaaaaatgttttttagttctagctactaaaacctgtatgaactcaaatggataggcatcttgtgagggtgtgtttttcccagtgtgaattggcttgaagagccatgggctaaatgggtactagaacaacaactgcccctcatgtacgccaaggatgagctctagatcatttgagaggcacagtgtttccggagtcagggactgcagctgagcgcaactgccccatctgaccactgactcaaatacgaactgcttgagacagacttcttttatgtagttctttgcagtgtccattgagacactataaccagccttgtaacaatatgttttctccttttggtgctaaaaaataaaaatattagaaagtagtctacga

SEQ ID NO: 354265 - DNA, 314 bp, Homo Sapiens
  misc_feature (68)..(84): n is a, c, g, or t
  misc_feature (87)..(87): n is a, c, g, or t
  misc_feature (218)..(261): n is a, c, g, or t
tgaaatgagtgatgagatacatatacatatacacacacatatatttgtgttgctaagtataccatttnnnnnnnnnnnnnnnnnttntacatagttttacgtacacacactaaactgacaggttattcttttctagatgggagagaacaagacctttgtaatggaaaatggtggttcctgtctaatccattttaaagcagaatgaatgtgtctggcannnnnnnnnnnnnnnnnnnnnnnnnnnnnnnnnnnnnnnnnnnntttatcaaaatgcaaatacttcaagcttcagtcagaaactctagggggtagag

SEQ ID NO: 354266 - DNA, 542 bp, Homo Sapiens
gaggcagctcagtggggctgctgaaccttgggaagagtgtgagtgtgaacgtgtgtaaatgtgcgtgtgaaagggagcaccccttcccgacttctagaaacaaaattccttttggggcgctttccctgtgtgtccccagagaggcctctagccaggagccttcagttgggatagtttcatttgtgactttaccaataccctcccagttcttgatagacagctgtaggttgctgggttcaagaatatgggtgggatatggaatgctctttcaatgtctagcttcagttttcattcatcctcctgctcagcactgtcagccaagagcttactcagcagacaccacatactgcagcagttcctagtgagaaaatctgtgccactagaaaatgcttcacttccatttcctcacctgggcagttctctgtttaaaattgtgggctgatttggtcttcctctcctcctcccactgttactgccctgcagcccttgttcaggtgtacagacccttattctggcctctagtgtccttgtctgtcatgaca

SEQ ID NO: 354267 - DNA, 504 bp, Homo Sapiens
acaggggactgggagctggacaggaggtgtggggtcaggggctccccagaggccacaggacactgggtgctggacaggaggtgtggggtcaggggctcccgagacatcccagggagacggcgctggcaggaagtgtgcctggggccctcgggctctgagccccctgctcagagtggctttggactcgggttccctgtgcgaggagcggagctgctcatccctcccagtcctgactgtgaggagccaaaatctataaaacacacaggcctgggcccacagcatcgcctccactccccacccacgggtgtcctgggcagcgctgcacattcatcccggcgtgcagagtcttccggatggtcttggtgataacccacccctgccacttcagcagggtaggcagccagtggccacgggaggctgagatccgggagccccgggctgggcctccccagcctctctttgtgagtggtcagccgtgccgtctctcccccacagagagagcgt

SEQ ID NO: 354268 - DNA, 1535 bp, Homo Sapiens
  misc_feature (1437)..(1484): n is a, c, g, or t
cagggcgagaaagtgtcaaacatatctggccataatagtcatcgaaggcacgaggcagggggagggtcccacccgagacagcggagaaagtgggatacaaaggggggagcgtagagggcagtagggggggaggactgcaatagaatacagacacggaggtgtagggaggagaggacacggcgtagtggggggccacggcgcgccgagggaatgaattagtgttaagtgtcgccgataatcagccgcgcggcgaccgaggtgtgtgagttgtaatgggcggcccggagcggcgccatagaacagggatgtggctacagtcggactaagtgaaggaggagaaaatagcagcggcggggtctatcgctcgttagcggggcgcgcgagcggagcgctcgccgacgtaagccggggcagtagcgcacgccagggactgggatgcgcggaagcgggagagagcactagagtgtagtaggggcgcgagtggcagccatatagtcgccggcaagagggggaaagcagacgggggctccccggcggcgcgggtgcagcgggcccaaggctacgcggggaggacccagggacgtcgtcgtgggggggaagcagcgacaaacgaggggtagcttgcgccgcccgggtgccgggttttgtgtttggtgggggagccggccccaccgtacgttgtgagcaagtatgtggaggaggggcggaggaaggtgggaaagggatgcgcataagacgacagggtgcgggcggggtgtggggtgggcatttgggaagacattgtgggggtagaggcgggggcaggcggaacctcttttctctttgtgccagcgtacccaaggaaatacgcatgtgcggtcacgagggcttcccgttgaaagcacatattgcggcgtatggtggggggttttgtgatagtggtgtgcactgtttgtgtttatggtttgttggacttgtattgtggtggtgttttgtgtttgagtcagacgatcttcctttaatacaaagtcgatatatctacatacacgggggtgggaaaaccacccggctgcttccgctggaataaacagtgttgaaagtaaccgcagacctgcccttgtacaaagaggaacaactcgcttgctcagggtaggcgggtagaggggggcctgtccttctggttttgctcccaaactgccccatagtcccagggggaaagggtccctgatgtggggcagcacagccatacagccactgtccccgaagaagtaggatcctctctgtctccttgggggcgggagacggggagacagctcaggctctcagaggaggaccactgtcatctctctcctcttacagcagcgtccccctcaaccgcacccaacgccactgggtccgagctcccccatgaccttaccctcagaactgtatttgatatgtctgaaaatttaatttatnnnnnnnnnnnnnnnnnnnnnnnnnnnnnnnnnnnnnnnnnnnnnnnnacatcccattcttctgtgagcaaagcacactttctgatggtaggaaaaatt

SEQ ID NO: 354269 - DNA, 1338 bp, Homo Sapiens
  misc_feature (740)..(740): n is a, c, g, or t
ggagtccggggcctcctggcgtcactcttcgccttcaagtctttccgggagaactggcagcgggcttgggtgcgagcgctgaacgagcaggcctgcagaaacgggagctccatccaaatcgcctttgaggaggtgccccaactcccacccagagccagcatcagtcatgtgacctgcgtagaccaatctgagcataccatggtgctgcgttgccagctctctgctgaggaggtgcggttcccagtctctgtgacccagcagtcccccgctgccgtctccatggagacctaccacgtcactctgacactgccaccaacacagttggaagtcaacctggaggaaatccctggtgaggggctgctcatatcctgggccttcactgatcgcccagatctcagcctaacggtgcttcccaagcttcaggccagggagagaggtgaagaacaagtggagctctccacaattgaggaactgatcaaggatgccatagtcagcacccagccagccatgatggtcaacctcagggcttgctctgccccaggaggcctggtacccagtgagaagccacccatgatgccccaggctcagccagccatccccagacctaaccggttattcctacggcagcttcgggcatctcacttgggaaatgagctggaaggcaccgaggaactgtgctgtgtagctgaactcgacaaccccatgcagcagaagtggaccaagcccgcgagggcaggatnccgaggtggagtggacagaagacctggcactggatctgggcccccagagccgggagctgacccttcaaagtgctgaggagcagcagctgtggagacaccgaactcctaggccaggccacactgcctgtgggctccccctccagaccactgtctcgaagacagttgtgcccactcaccccagggccagggaaagccctgggaccagcagccaccatggcagtggagcttcactatgaggagggctctccccggaacctgggtactcccacctcctccactccacgccccagcatcacacctaccaagaagattgagcttgaccggaccatcatgcccgatggcaccattgtcaccacagtcaccactgtccagtcccgggccccgtatagacggcaaattagactccccctcccgctccccgtccaaggtggaagggtgaccgaaaagacgacaactgtgctgaagtgaaagcagtggccccagcaatacctcccactacaagcagccggggcagcccccttttccaagggtttggaacccctggaacaaaaacagccaattcccccactgaaaaaagccccggggggcgggttggccc

SEQ ID NO: 354270 - DNA, 1447 bp, Homo Sapiens
  misc_feature (1393)..(1393): n is a, c, g, or t
aggctagggggccgggtggtgaatcggacgagggaggaactgtgctgtgtagctgaactcgacaaccccatgcagcagaagtggaccaagcccgcgagggctggatccgaggtggagtggacagaagacctggcactggatctgggcccccagagccgggagctgaccctcaaagtgctgaggagcagcagctgtggagacaccgaactcctaggccaggccacactgcctgtgggctccccctccagaccactgtctcgaagacagttgtgcccactcaccccagggccagggaaagccctgggaccagcagccaccatggcagtggagcttcactatgaggagggctctccccggaacctgggtactcccacctcctccactccacgccccagcatcacacctaccaagaagattgagcttgaccggaccatcatgcccgatggcaccattgtcaccacagtcaccactgtccagtcccggccccgtatagacggcaaattagactccccctcccgctccccgtccaaggtggaggtgaccgagaagacgacaactgtgctgagtgagagcagtggccccagcaatacctcccatagcagcagccgggacagccacctttccaacggcttggaccctgtagcagagacagcgattcgccagctgacagagcccagtgggcgggtggccaagaagacacccaccaagcgcagcactctcatcatctctggtgtttccaaggtgcccattgctcaggacgagttggcgctatccctgggctatgcggcatccctggaagcctcagtgcaggatgatgcagggaccagcggaggcccctcttcacctccctcagacccaccagccatgtctccaggaccgctagatgccctctctagtcccacaagtgtccaggaagcagacgagacaacccgttcggatatttctgagaggccatctgtggatgatattgagtcggaaacggggtccactggtgccctggagacccgcagcctcaaggatcacaaagtgagtttcctgcgcagcggcactaagctcatcttccgccggaggcctaggcagaaggaagctggcctgagccaatcacacgatgacctctccaacgcaacggccacgcccagtgtccgaaagaaggccggcagcttttctcgccgccttatcaagcgcttttccttcaaatccaaacccaaggcccatggtaaccccagcccccagcttctgaggacccagctctgaaaaggcacgagttctctcagcccattccccacctccccttcataccccttccctggatctccagtgcctggggcaggaaagccctctgggtttcgggggaggccccgtccaacctggggcaagggggcccggttggaangggatacttggaacggggaagcaccatgagagggggggcacccggtggccgagg

SEQ ID NO: 354271 - DNA, 1404 bp, Homo Sapiens
  misc_feature (266)..(276): n is a, c, g, or t
ccaaataacttgttaaatgtaatgggaaggtggcagacttaagaacgtggatatgaagtgcctagaaccaccacaacctggctgtgcgtctgtccctgtgggtgtatgtgcttgtgtgtgtgatgcatgtgagcgtctctggcacacacacttggacatacagttctgtgtgcgctcattcttattacaggagtgagcaaaggaagcatttaccccgatggttacctagaccacgattatttggattggggggaggggggatccgnnnnnnnnnnnaaattttttgttatttctaagcaaacctcttttgtacttttcttacttctaatatccatccctggactttttgtattccaaatgtttgtgatgctgagaagtgaagttcattttatgtgatcttcatgcgtcgtaatctacttttggtagataattaagattattaaaccctcatttaaatgtgacataaaatacagctttaagcacataaatataaagcagcttccatcaggaacatggagcaggcagggactccattttacagaattactgagatttctcagttgtaaaacatgatgtcatcctgcatgcctcctggaattctccaatggggtcgccaaacaacaaatggagaaaaaaagttttacttccttgcattcttctacctttaaatagcaaagtaccactaccaccaccacctcttgcccccttccctcttttcttaaacttctggcatttcagaactcaagcaggctacccctggtttctggagagttgggctaggcctgaagctccccctcccccacctctgctaggcagcccaggcctggtctgggagacagcccctcaccctgcctgggctcttggccaagcggccttggatggatgaagtcagagaggtggggtgagggtgagcttactcagggcccccagaggaagccctcagcctctgccctccccccacacagggcgggagcccaggcctgttcctggcagctgtggctgcagctgtgctcctgctccctcctggaatgtgcgacaagcccaaatgttccagggaggcggccggggcagggggcttagaagtgctaatatggttctgtgttttgcctgaaacgataccaggttcccctgaatagcaactttacaaggtccatgtgggagggaccaacccagatgccctgctgagtgtccctgaaaccatggcagctccatctgtcaagatggcaggggccggagtgagggggctgctggcttaacagcaggcatctgggcaggccagtcctcaaagcagctcctgaaggtctgtgttgcactgtcaccagtctcaagctatgcctctaatttcaccagggatattgactaagaagacaataaaatctttttctttgtgtaataacctcaaaa

SEQ ID NO: 354272 - DNA, 983 bp, Homo Sapiens
  misc_feature (52)..(88): n is a, c, g, or t
cgatgtatacgactcactatagggcgacccggcgctcacgcggtggcggcgnnnnnnnnnnnnnnnnnnnnnnnnnnnnnnnnnnnnnatcaggccaaatcggccgagctcgaattcgtcgagagcggagtgcagcgcagccgcggggagcgaggagcgcgcggagccggccatgggcaagtcagcttccaaacagtttcataatgaggtcctgaaggcccacaatgagtaccggcagaagcacggcgtccccccactgaagctctgcaagaacctcaaccgggaggctcaacagtattctgaggccctggccagcacgaggatcctcaagcacagcccggagtccagccgtggccagtgtggggagaaccttgcatgggcatcctatgatcagacaggaaaggaggtggctgatagatggtacagtgaaatcaagaactataacttccagcagcctggcttcacctcggggactggacacttcacggccatggtatggaagaacaccaagaagatgggcgtggggaaggcgtccgcaagtgacgggtcctcctttgtggtggccagatacttcccagcggggaatgttgtcaatgagggcttcttcgaagaaaacgtcctgccgccgaagaagtaacttgttaaatgtaatgggaaggtggcagacttaagaacgtggatatgaagtgcctagaaccaccacaacctggctgtgcgtctgtccctgtgggtgtatgtgcttgtgtgtgtgatgcatgtgagcgtctctggcacacacacttggacatacagttctgtgtgcgctcattcttattacaggagtgagcaaaggaagcatttaccccgatggttacctagaccacgattattggactggggggacagggggaatccgtttattttaaaatttaggtcattctaagcaaactctttgggaactttctaacctctaaatattccatccctggacttttgtgattcca

SEQ ID NO: 354273 - DNA, 472 bp, Homo Sapiens
ctgacccaggcccccaatcctgggctcttacagagcctccatgagtcaagccccctccccacacctggactccagaattcaccctctcccctgcagtctgggttcccagactgagtcctctccccaaatcagggctctagacccgagccctccaaacctggactctgggacttaggcccccttaaatctagacttctctttataggtttcaggtctcctatgggtgcctgggaagtccttgaaagtggactgttctcaggcttgacctgccccaccccatccccgcggttgaggctgtgggggcagcagatcaggagcccactgataaggggccctagggtacagggtgctgcccagcaggtcgccaccgagtgtcttttcattttatttcagctccattttgcccatagatgggcagaggggtgagattggctcatcccccttccagattttgcaataaagcggtgtgagg

SEQ ID NO: 354274 - DNA, 824 bp, Homo Sapiens
  misc_feature (78)..(201): n is a, c, g, or t
cctttgctcaagcgatcctcctctgtcagcctgccaggtttctggggctataggcgtgtgaccccatgcccagctaannnnnnnnnnnnnnnnnnnnnnnnnnnnnnnnnnnnnnnnnnnnnnnnnnnnnnnnnnnnnnnnnnnnnnnnnnnnnnnnnnnnnnnnnnnnnnnnnnnnnnnnnnnnnnnnnnnnnnnnnnnncctgatataataaacattttacttacttgtattttacttaactcttccctccatcacctgaatatacaagggtaaggatttttgtctttttcactgctactgacctagcccaagcaatatttggcaaatagtgctcaaatatctgctgaacaaaccaacctttgaagatgcttgagaaaacttctggatgaagcgaagcatactggcccctattgaaagtcttgttcaggaagatgccaggtagttctgattaacatgttacagctaagcagaggcactgaatcaggggcatgtttctgtgtataacacaaggtgtcacttaattttcctcattttatacattaatttttaaatagtagtaattcatgaatataacactttcctttgaaaagaatcattaatgttttcaaactgtcggtaacacagtaacaaaatagatccttttagtatctgaactgttcttttagctttggctgtctagtgtaatagaaagagtaatgcacatagagattttacagatacttccaccatttcctagctgtgtgacactgggcaaattgcttgagtactggttttctcatctttaaaatgaagggtcttctaagtggtgtttttgtgaaatt

SEQ ID NO: 354275 - DNA, 499 bp, Homo Sapiens
cagtgggaacagagttgtcacctacctaacagggctctgagagagccgggaggcccaaagtggctggaagaaggtaaaggaaaaatcctgtcttgggctcaaggtcacagagtggggcccagggggagttcctgctgagggcagggccttgccaggcttcagtctccagtgccaaaggaggaaatgcccaggctgtcagcatttccagatgagagcagaagggagaagcttaaacccaagtcacacatccagcaatggagtccgacagcccagcaccatctgggaactgagaagcacctctgcccggcccccacaccgtgtggaaagtgaggagcacctctgcctggccgccaccccgtctggcaagtgaggagcgcctctgcccggccgctgtgcaaccttccaagtgtgaagtgacagccttgtgtgtgatgttttctgccttccccaagtttgcactttcgacattaaagtttactttttagttaaaagttttaaa

SEQ ID NO: 354276 - DNA, 1244 bp, Homo Sapiens
  misc_feature (950)..(1065): n is a, c, g, or t
gggacttgccggaagtgcctttccagtggacctgggctgttgttgcggttgttttccttctctccgtgcaacgctggcaagtctcaaagtcgccacagaaacatgcccctgattcagtgcctctgcttagctgtaacatgttaatcagaactacctggcatcttcctgaacaagactttcaataggggccagtatgcttcgcttcatccagaagttttctcaagcatcttcaaagatactgaagtactctttcccagtgggactaagaaccagcagaacagatatactttctctcaagatgtctctccagcaaaacttttccccatgtccaaggccttggctttcctcatcatttccagcgtatatgagcaagacacagtgctatcatacatccccctgcagctttaaaaagcagcagaagcaagcacttctagccagaccctcaagcaccatcacttacctaactgacagcccaaagccagcattatgtgtaactctggcaggactaatccccttcgttgctccaccactggtcatgctgatgacaaaaacttatattcccatattagcttttactcagatggcttatggagccagtttcctatctttcttgggtgggatcagatggggttttgctctaccagaaggtagtccagccaaaccagactaccttaatttagctagcagtgcagctcctcttttcttttcatggtttgccttccttatttctgaaagacttagtgaagccatagtcacagtaataatgggtatgggagtagcattccaccttgaactttttctcttaccacattatcccaactggtttaaagccctgaggataggtagtcactttattggccactttttcatttataatcactttagtagttaaaagtagttttccagaaaaaggacataagagacctggtcaagtataaaaaatataaaannnnnnnnnnnnnnnnnnnnnnnnnnnnnnnnnnnnnnnnnnnnnnnnnnnnnnnnnnnnnnnnnnnnnnnnnnnnnnnnnnnnnnnnnnnnnnnnnnnnnnnnnnnnnnnnnnnntgtgcaaccttccacgtgtgaagtgacacccttgtgggcgatcttttctgcctccccaagtttgcattttccacattaaaggtttactttttagttaaaagttttaacaatatatatatattaaatacactgtagaatacaatttggatgccagcctacaccctttttctacttccggg

SEQ ID NO: 354277 - DNA, 2609 bp, Homo Sapiens
  misc_feature (1011)..(1011): n is a, c, g, or t
  misc_feature (1716)..(1725): n is a, c, g, or t
  misc_feature (1883)..(1917): n is a, c, g, or t
  misc_feature (2065)..(2065): n is a, c, g, or t
  misc_feature (2136)..(2136): n is a, c, g, or t
  misc_feature (2153)..(2153): n is a, c, g, or t
  misc_feature (2220)..(2220): n is a, c, g, or t
  misc_feature (2242)..(2242): n is a, c, g, or t
  misc_feature (2420)..(2420): n is a, c, g, or t
  misc_feature (2449)..(2449): n is a, c, g, or t
  misc_feature (2458)..(2497): n is a, c, g, or t
  misc_feature (2519)..(2519): n is a, c, g, or t
  misc_feature (2530)..(2530): n is a, c, g, or t
  misc_feature (2542)..(2542): n is a, c, g, or t
  misc_feature (2554)..(2554): n is a, c, g, or t
  misc_feature (2563)..(2563): n is a, c, g, or t
gctgggtggcgaattcggcacgaggcacacacagccacagtgaggagtgtccacttctgcagtgatggccagtccttcgtgacagcctctgacgacaagacagtcaaagtgtgggcaactcatcgccagaaattcctgttctccctgagccagcatatcaactgggtccgctgtgccaagttctcccccgacgggcggctcatcgtgtctgccagtgatgacaagactgttaagctgtgggacaagagcagccgggaatgtgtccactcgtattgtgagcatggcggctttgtcacctatgtggacttccaccccagtgggacgtgcattgccgctgccggcatggacaacacagtgaaggtgtgggacgtgcggactcaccggctgctgcagcattatcagttgcacagtgcagcagtgaacgggctctctttccacccgtcgggaaactacctgatcacagcctccagtgactcaaccctgaagatcctggacctgatggagggccggctgctctacacactccacgggcatcagggaccagccaccactgttgccttttcaagaacgggggagtattttgcttctggaggctctgatgaacaagtgatggtttggaagagtaactttgatattgttgatcatggagaagtcacgaaagtgccgaggcccccagccacactggccagctccatggggaatctgccagaagtggacttccctgtccccccaggcagaagcaggagtgtggagtctgtgcagagccagccccagggagccccgtgagtgtgccccagacactgactagcacgctggagcacattgtgggccagctggatgtcttcactcagacagtcttccattctggagcaacggttgacactgacagaagaacaagctgaagcagtgtctggagaaccagcagctaatcatgcagagagcaacaccatgatcaggggagcaggaatcaagagctcggtgggatttgcaaggtggcaggccagggatttntaccatgggacttgggtaaataaaggggactgaactctgtgggaatcacatccatactggagccctggatttttgcagttctgccctccaccttgctatctgcaccaggaggctctccacctggcagccagaggtccccagtgggccgggctcacacacaaatgatgcttcagacccgaatgaagaggaccacattttgcttaatgtaaaggagccacttgaaaatgtctgctccttcggggtcctgagattgtggctccccctctggaggaggtggctccacgatgccttgattttcactcatcatttggacatgtgactggcttttcctacctctgccatggtgtagaaattgattgcacattgattggatgagccgggggttttctctaaatctgactaaaggcccaaagtgggcccatctgagtcaggtttgttgagaacaagccctctcaagtgggtggtggcttttcagtggccctgatttctgttccacacgtgttcactggagccaggtgacttcctccttgcgtgagtgagggcacaggaatctcaaaattaaacctgacttcattgcacaaaaacccaaaacggacagacgcccaccacccacccccagtcgcacaccaaatcggccccccgccacaagacaacaagggcgcactcccccaaacccacagcgcaaccccaccatctcgccggcgnnnnnnnnnnaccctccaaaaattttatataaccccctcctttggggcgcgcggccggcccagctggcgcaaccccccggcgtccgtacaacactgttttccccagggggaacctccgggtaaacaccgcctcagtggttttggaaatccttgcgctgagctgaaaannnnnnnnnnnnnnnnnnnnnnnnnnnnnnnnnnngtctctcaaaaacaaacactcccgatgggtggggtattttttccacagcgccccctccctcacgcgcggaaatatttaaaacaaaagacgaggaagacgttggtcgcaaggcaggaggagccccctcgcacacctggttaggacaganccaaaaaagggcgcaacccccgcgtagcgcctactctatactatcttcgttttttattactacgagcgcanacaaaaggtgggggggngtgggcgacacacctctctgttgtgtttgtgctcggccccacactctgtcccccgcccaggcgcggntgcaggtgggaccgagaggcgnggagctatggcacgccaaatgggtggtgcgggttcaggtcaactaacataaaccccctcgccccaacaactctgagccccgcgcgcgctcggccgctcaccgagcagccagcactcccccctcctctccttcgtcacctctccctctgtcaccaacacatcctacctgtcctgtgtgngccgcgcgctcgccagggccgtggcggangacaaaacnnnnnnnnnnnnnnnnnnnnnnnnnnnnnnnnnnnnnnnntttagccgatgatacgtaatangaaatacacanacggccgcctcntatgattcgccntgggtatgnggggccggcgggggggcccgacacctctcgccaacgcacgtgcggg

SEQ ID NO: 354278 - DNA, 2735 bp, Homo Sapiens
  misc_feature (1690)..(1738): n is a, c, g, or t
  misc_feature (2644)..(2661): n is a, c, g, or t
atcagctcattgtgtttggggagcagctgattcagaagagcgagcccctggatgctgtgctgattgaggatgagctggaggaactccaccgctactgccaggaggtgtttggaagggtctcccggttccaccggcggctcacctcctgcactccgggcttggaagatgaaaaggaggcctctgagaatgaaacagacatggaagaccccagagaaatccagactgattcttggcgtaaacggggagagagcgaggaaccgtcatctcctcagtccctgtgtcatctagtggccccagggcacgagcggtctggctgcgagacccctgtcagcgtggactccatccccctggagtgggaccacacaggcgacgtggggggctcctcctctcacgaagaggacgaggagggcccatactacagcgcactgtcagatgtagaaatccctgaaaatcctgaggcatatcttaaaatgaccacaaaaactttgaaagcgtcttctggtaaatccatttcggatggccactcgtggcatgttcccgacagcccttcctgtcccgagcatcactacaagcaaatggaaggtgacaggaatgttccacctgttccccctgcgtccagcaccccttataaaccaccctatggaaagctactattacctccaggcacggatggtggcaaagaaggcccgcgagtcctgaatggcaacccacagcaggaagacgggggactggccggtatcacagagcagcagtcaggtgccttcgacagatgggagatgattcaagcacaggagcttcacaataagctcaaaataaaacaaaatttgcaacagctgaactctgatatcagcgccatcactacttggctgaaaaaaactgaagcagagctggaaatgttaaagatggcaaagcctccctctgatatccaggaaatagaactgagagtgaagagactgcaggagatactgaaagcctttgacacttacaaggcattagtggtctctgtcaacgtgagcagcaaggaatttctgcaaaccgagagccccgaatccacagagctccaaagtagactccgccagctgagcctgctctgggaagcagcacagggcgcagtggacagctggagagggggcttacgacagtcgctcatgcagtgccaggacttccaccagttgagtcaaaaatctgctgctgtggttagcgagtgccaagaaccggaggcagaaggctcatgtcaccgatccaaaggcagacccccgggctctcctagagtgtcggagggaactaatgcaactggaaaaggagctggtagaacgtcaacctcaagtggacatgttacaggagatttcaaacagccttctcattaagggacatggagaagactgtattgaagctgaagaaaacggtgcatgttattgagaagaaactcaaacagtttacgggagcaagtgtcccaagatttaatggccttgcagggaacccagaacccagcctcacccctgcccagcttcgacgaggtagactcgggggaccagcctcctgcaacatccgtgccagctccccgagcaaagcagttcagagcagtgagaactacagaaggcgaggaggagacagagagcagggtccccggcagcacacggccacagcgctccttcctctcaagggtggtccgggcagccctacccctgcnnnnnnnnnnnnnnnnnnnnnnnnnnnnnnnnnnnnnnnnnnnnnnnnncgaagaagactacagctgcactcaggccaacaactttgcccggtccttttaccccatgctgaggtacaccaatgggccaccccccacatagagggcatagctggccacagtgctacaccacctgcctgattgccaagggtgcccagcacgtggccccagaccaatctgagtgacttagtgttggcaaggtcccgggacctgtgcagacttcttctgggcttacccagcacgggctccctggagcccagggcagctttcagattgtgttcctccccaggagcagggaacctgtgtggcaggtgccccgggtattttggcagaactagttgattagtttagggatctctggaaatgtcagtttcctgaagagccaagcactttgtgaattctggtttgtttgtaaaacagcattattataatgtaggtatggtcaatgagcagtggtgtccatcacatatattatagaagcaagcgagcacattccaccctagaaatggttcagaaactcataggcacccttagctgatggaaacaatcaatcatatttaatacgcttagaatcagttttactccaatcagctggcaattttgagctgccggttatacaccaaaatgttctgttcagtacctagctctgctcttttatattgctttaaatttttaaagaaattatattgcatggatgtggttatttgtgcatattttttaacaatgcccaatctgtatgaataatgtaaacttcgattcttttttaaaaaaattagatcccacctgcagcttctgactaatgtaaagtaaatgccaaaccaccgacttgatagggatgtttttgtaagttaattgtctaagactttttcacatccaaagtgatgctttgctgtgggctttaactgtttggccacggcnnnnnnnnnnnnnnnnnnttggtacaaaaacttgaagctgtttgtgatatgtacaactcagatgtttctcattaaaaaacataattacccag

SEQ ID NO: 354279 - DNA, 1127 bp, Homo Sapiens
  misc_feature (228)..(493): n is a, c, g, or t
  misc_feature (495)..(790): n is a, c, g, or t
  misc_feature (899)..(949): n is a, c, g, or t
  misc_feature (1052)..(1064): n is a, c, g, or t
ggtccggaattctccggatgtttctcccaccttagcctcctgagtagctgggactaaggcacacacactgtacttggcagctggcgaagcattgtttctgagtgtgtgaggatgttttcagtggactcagtgaagatctgccctcagcgtgggcaggcacatccacttggttggggacccagatggaacacaaagggagaagacaagcaaattctcttttctggaggnnnnnnnnnnnnnnnnnnnnnnnnnnnnnnnnnnnnnnnnnnnnnnnnnnnnnnnnnnnnnnnnnnnnnnnnnnnnnnnnnnnnnnnnnnnnnnnnnnnnnnnnnnnnnnnnnnnnnnnnnnnnnnnnnnnnnnnnnnnnnnnnnnnnnnnnnnnnnnnnnnnnnnnnnnnnnnnnnnnnnnnnnnnnnnnnnnnnnnnnnnnnnnnnnnnnnnnnnnnnnnnnnnnnnnnnnnnnnnnnnnnnnnnnnnnnnnnnnnnnnnnnnncnnnnnnnnnnnnnnnnnnnnnnnnnnnnnnnnnnnnnnnnnnnnnnnnnnnnnnnnnnnnnnnnnnnnnnnnnnnnnnnnnnnnnnnnnnnnnnnnnnnnnnnnnnnnnnnnnnnnnnnnnnnnnnnnnnnnnnnnnnnnnnnnnnnnnnnnnnnnnnnnnnnnnnnnnnnnnnnnnnnnnnnnnnnnnnnnnnnnnnnnnnnnnnnnnnnnnnnnnnnnnnnnnnnnnnnnnnnnnnnnnnnnnnnnnnnnnnnnnnnnnnnnnnnnnnnnnnnnnnnnnnnnnnnnnnnnnnnntaaaaatccccctctccctaggagaggacaacgcccacgttaacccgccaccaaccgaccccgccccgtctaacagcccccctatgttcgtctgattgtgagctacctnnnnnnnnnnnnnnnnnnnnnnnnnnnnnnnnnnnnnnnnnnnnnnnnnnnggtttacgggcgacccctcctttctttttaaaaaaacggccccccccaaagaggaccctattattaaacccacaccccgtccgccgtgttttttctccacctnnnnnnnnnnnnnaaaaaatcttatttcgccggggactctcgttaaaaagaacacctccctcctccgggggagccc

SEQ ID NO: 354280 - DNA, 780 bp, Homo Sapiens
  misc_feature (145)..(174): n is a, c, g, or t
  misc_feature (213)..(266): n is a, c, g, or t
  misc_feature (287)..(456): n is a, c, g, or t
cagccgttgctcagctcttccagcccgggggttggggctgtggtggaaacagctgggacttctgaatagacaggtctaggcttcagtccttgacttggcagctgtgtttagagctttgatttctttttacttttcttttcttctnnnnnnnnnnnnnnnnnnnnnnnnnnnnnnattcgttcgtccttccttccttcctcacagcatctctgnnnnnnnnnnnnnnnnnnnnnnnnnnnnnnnnnnnnnnnnnnnnnnnnnnnnnntgggctcaagggatcctctgnnnnnnnnnnnnnnnnnnnnnnnnnnnnnnnnnnnnnnnnnnnnnnnnnnnnnnnnnnnnnnnnnnnnnnnnnnnnnnnnnnnnnnnnnnnnnnnnnnnnnnnnnnnnnnnnnnnnnnnnnnnnnnnnnnnnnnnnnnnnnnnnnnnnnnnnnnnnnnnnnnnnnnnnnnttgagccactgcacctggcctagagccttatctccctctctgtcaggtgagaatggtaattcttcttgcccactgttgtgaaggattcaagattgaatagttaaatggtctcagtgtggtctgtggcgccagctgcagtgtccctgtgttccccggaccgttcccctagttcattctttcatctattaatttacttggagaacttgtgctgttttcctggtcctcctccctggccctacttctctgccaattcctgcttgtccttcatgccttagatgtcacttcctctgggaggctccgtctcctgggactgacatggaccct

SEQ ID NO: 354281 - DNA, 357 bp, Homo Sapiens
  misc_feature (20)..(20): n is a, c, g, or t
  misc_feature (39)..(39): n is a, c, g, or t
ggaaacttaaacagggaagngttaaattaatttgccaanagctagcaggtggcaagaactgggccttcaaaatcccaggctttgtttgactccaaagtcaggttctgaaacatcacgctgctgtcccctgcagcagagcccaaagttaagagttcactgaacttgtgaaatgagagttccttggctggaacggttaatgccttaaaatgatgccatttctcatcttccagtctaacatctcagcaaggaaggaccgacggctggaaaggcacccaattctgtgcttggtgctgtagggaagacagagaaaaacaccacgcacttcccgtccctttgtcctacggccacccagggaag

SEQ ID NO: 354282 - DNA, 606 bp, Homo Sapiens
  misc_feature (414)..(414): n is a, c, g, or t
  misc_feature (532)..(532): n is a, c, g, or t
  misc_feature (578)..(578): n is a, c, g, or t
ctggactttgacgagaagacgatgcagaaagcccggaggaagcagtgggatgagccgagggtgtgctcccggaggtacctgaaggtggacttcgcagacatcggctggaatgaatggataatctcaccgaaatcttttgatgcctactactgcgcgggagcattgtgagttccccatgcctaagatcgttcgtccatccaaccatgccaccatccagagcattgtcagggctgtgggcatcatccctggcatcccagagccctgctgtgttcccgataagatgaactcccttggggtcctcttcctggatgagaatcggaatgtggttctgaaggtgtaccccaacatgtccgtggacaactgtgcctgccggtgagaccactccagggtggaaagaagccacgcccagcagantgccttctcggagccttctgcaaccaggacttgtggtgcagctgcagacacagagcacagtcatgggcaacatcactggggcccagagagagtgtccgccagtgcatcattagggggnttcattgtagtgatagcccttaaatgcagctgagtactgaaggaantgggaattagcctggcctgaaagtggcc

SEQ ID NO: 354283 - DNA, 5082 bp, Homo Sapiens
  misc_feature (4400)..(4400): n is a, c, g, or t
  misc_feature (4454)..(4454): n is a, c, g, or t
  misc_feature (4492)..(4492): n is a, c, g, or t
  misc_feature (4507)..(4518): n is a, c, g, or t
  misc_feature (4596)..(4596): n is a, c, g, or t
  misc_feature (4621)..(4630): n is a, c, g, or t
  misc_feature (4663)..(4663): n is a, c, g, or t
  misc_feature (4695)..(4695): n is a, c, g, or t
  misc_feature (4698)..(4741): n is a, c, g, or t
  misc_feature (4833)..(4841): n is a, c, g, or t
  misc_feature (4886)..(4886): n is a, c, g, or t
  misc_feature (5008)..(5008): n is a, c, g, or t
ttccgcgcagttcgtctgggcctgtgccggtactgtaccggtgccggtgtcacgagccacgaactggcagcgcagtggaggggccctgtagttggccatggtgccggtggacacgtgctgctcgagggcatgcccgcgccttgccgagtgttccctgccccgtcccggccggcctggcttgtcttgtcagtcactggggcggaggcagcggctgtagcggggctgtagccgggcgttgagcacagcgcgggccaggccgaacggaagggacctgccacagcccctcaactccacggactcttcgccctagactagcggagctgcatctccgcgcttcgttggacgcctccgtaaccacgaagggctctctctctcccgtgaccctccagccccatgacctgttcatagcagccgagagctcacccaggcgggggtgttgtgggtacaggccatcgaccctgtgacccctcaagagccagggactcggtttcccccgcaggcctccctcccctgtgactccctccacacagattctggggacagagctgttacctgccactaggatccccgcctgagagctcctcactgacggctccctcctcggagtccccttcattgggtctcctaagagcaccaattttggtctctggcaagcctcccacccccaaacgaggtggggaggcctcggcagccatgcccgccctgggccccccctcaccccaccactccctgggcacccaagccggggtctagcagggggccagcagccaaggggctggggcaggagacagatcagggcccacctccctgccagggagggagcaaagatggagcggcgggaggagcagccgggggctgcaggggctggagcagcaccagccttggacttcactgtggagaacgtggagaaggcgctgcaccagctctactatgatcccaacattgagaataagaacctggctcagaagtggctgatgcaggcccaggtctccccacaggcctggcacttcagctggcagctactgcagcccgacaaggtaccagagatccagtactttggggccaagtgctcttcacatcaagatctctcgctactggagtgacatccccactgaccagtatgaaagcctaaaggcacatgcacttcacccaaatcacccgctttgccagtggctccaagattgaactgactcgtgtgcgtcgtggaactggcctcactggatctaaccatgatgcctgatgcttggccatgtgctgtggcagatatggtacgactcttccaggctgaggactcaccagaggatgggcagggccgctgcctagccctgttagagctgctgacagtgctgcctgaggagttccagaccagtcgcctaccccagtaccgcaaaggcctggtgcggaccagcctggcggtggaatgcggggctgtcttcccgctgctggagcagctgctacagcagcccagctcacccagctgtgtgcgtcagaaggtgctcaagtgtttctccagctgggtgcagctggaggtgccgctgcaggactgtgaggcgctcattcaggctgcctttgctgctctgcaggactcggagctcttcgacagcagtgtggaggccattgtgaatgccatctcacagcctgatgcccagaggtacgtgaacacactcctgaaactcatcccgctggtgctgggtctgcaggaacaactgcggcaggcagtgcagaatggggacatggagacctcccatggcatctgtcgcatcgctgtggccctgggcgagaaccactcccgggccttgctggaccaagtagagcactggcagagtttcctggcactcgtcaacatgattatgttctgcacaggcatccctggccactatcctgtcaatgagaccaccagctccctaaccctcaccttctggtacacactgcaggatgatattctatcctttgaggcagagaagcaggctgtataccagcaggtgtaccggccagtctacttccagctggtggatgtgcttctgcacaaggcccagttcccttctgatgaggaatatggattctggtcctcagacgagaaggagcagttccgaatttacagggtgggacatctcagacacgctcatgtatgtctatgagatgttgggggccgagctgctcagcaacctctatgacaagctgggccggttgctcaccagcctcaaaggagccctactcctggcagcacacagaggcgcctcctctacgggcttccaatccatcgcagaaaaccattgacgtcaactattctgatgtggtgcctgggctcattggcctcatcccacggatcagcatcagcaacgtgcagctggcagacactgtcatgttcaccattggagctctgtctgaatggctggctgaccaccccgtcatgatcaacagtgttctgcccttggtactgcatgccctaggaaatcctgagctgtctgtctcttctgtgtccaccctcaagaagatctgccgagagtgcaagtatgacctgcctccctatgctgccaacattgtggctgtgtcccaggatgtgctgatgaaacagatccacaagacaagccagtgcatgtggctgatgcaggcgctgggcttcctgctgtcagctcttcaagtggaggagatccttaagaacctgcactcgcttatctcaccctatatccagcaactggagaagctggcagaggagatacccaatccctccaacaagctggccattgttcacatcttggggcttctctccaacctcttcaccacactggacatcagtcatcatgaggatgatcatgaaggccctgagcttcggaagctgccagtgccacagggacccaaccccgtggtggtggtgctgcagcaggtcttccagcttatccagaaggtgctgagcaaatggttgaatgatgcccaggttgtggaggcggtgtgcgctatctttgagaagtctgttaagacgctgctggatgactttgcccccatggtgccacagctgtgtgagatgctgggtcggatgtacagcaccatcccccaggcctctgctcttgacctcactcgacagctggtccacatctttgctcatgagcctgcccactttcccccaattgaggccctcttcctgctcgtcacctccgtcacactcactctcttccagcaagggcccaggatcatcctgatattgttgattcatttatgcaactcctggcacaggctctgaagcggaagccagatttgttcctgtgtgaacgattggatgtcaaagctgtgttccagtgtgctgtgctggccctcaagttccctgaggcacctactgtcaaggcctcctgtggcttctttacagagctgctgcctcggtgtggggaagtagagtctgtgggaaaggtggtacaggaagacggtcgtatgctgctcatagcagtgctggaggccattgggggccaggcctcccgcagcctcatggactgctttgccgatatcctgttcgccctgaacaagcactgcttcagcctcctgagcatgtggatcaaggaggccctgcagccacctggtttcccctctgcccgcctcagccctgaacagaaggataccttcagccagcagatccttcgcgagcgagtgaacaagaggcgggtgaaggagatggtgaaggagttcacactgctgtgccggggtctccatggcacagattacacagctgactactgaggggtgcccccatcccatccaccccttctcttcatccttccctattcccaaagagtaaacctggaccctcactgctgtctctgcctcctttctgctgccaccaccacctaactgaaagcctgcgtccagaaggcctgggggaaggatgggaggatgcttggacccaggccttgggagggaatggcgggaacatcctctagctccccgggtggaacagataccactgtaccccaacccccctaggctggagcccctccgcataccgccattggccccggggcgggccggttgccgcaggggaactaacgcccccgcgatccccattaaatccatcccgcccccgccggctccaaacccgcctgcgcggccgccgagaaatgctggcccgggccggcccatggcggttttcccccaaagtctcgcccaacaccccgccctaccccagcgcctcgtgtacgccccatattacgcgcggatccggagcgcccccgccctaagaacggccgggcgtccgcccgaagcgcgagcgagtctccggcgcgcgcggcgggatgaacgcgtaattcatgcttgaacccgcgcacccttggcgacgccgtacgcgcaggcacccgaagcataggtatgtacggcctttgttcccgccgcgaccaccgacccaagcgttgaaagtncgccccgtaaggggtgcatgagggaggggcgtggatgggattattcttcggcanaatccagcgcggctctatcgcccccttctccgccctgngccgcacagacgcgnnnnnnnnnnnngcatctcggcgggtatgaatatttttccttccgaccccccacccccggcatagcgtgcgcgcgcagctctgataaaanaatccttgaacttaatcgggtgcgnnnnnnnnnntcaaatgagcagaaagcccgatggacggacganccacatatgtcgccaccccccgccccgcctcnaannnnnnnnnnnnnnnnnnnnnnnnnnnnnnnnnnnnnnnnnnnntcatttggattatttcccccggccccgtgtgtaggctacatgttctcgcgtagagcgccgcgtgctctcaaggtgcgatgtggagtagtatnnnnnnnnnatgatgtcacgtcctggctggctggtgggagacacccgggcgcangcggcgggctgcctgagatggtttttataagccacgcgccgcgcttatggcgccgtggttgaaccccctgcacacggatgagtgccccgcggggcatagtcgccgccccgcctcgccgccgnagcggctgtgcgcgcaatggtacgcgcccgccccaggtggccccacgcgagacacaaatcgcgccgccgacacg

SEQ ID NO: 354284 - DNA, 1256 bp, Homo Sapiens
  misc_feature (1160)..(1160): n is a, c, g, or t
  misc_feature (1215)..(1215): n is a, c, g, or t
agcgggttccattcccgggggattggagtagcgttggagtcaccgacgccatcccctcccgcctctggcgtgcatggagcatgcgcttccttcctcacttcctctccaggagggagcgagagtaaagctacgccctggcgcgcagtctccgcgtcacaggaacttcagcacccacagggcggacagcgctcccctctacctggagacttgactcccgcgcgccccaaccctgcttatcccttgaccgtcgagtgtcagagatcctgcagccgcccagtcccggcccctctcccgccccacacccaccctcctggctcttcctgtttttactcctccttttcattcataacaaaagctacagctccaggagcccagcgccgggctgtgacccaagccgagcgtggaagaatggggttcctcgggaccggcacttggattctggtgttagtgctcccgattcaagctttccccaaacctggaggaagccaagacaaatctctacataatagagaattaagtgcagaaagacctttgaatgaacagattgctgaagcagaagaagacaagattaaaaaaacatatcctccagaaaacaagccaggtcagagcaactattcttttgttgataacttgaacctgctaaaggcaataacagaaaaggaaaaaattgagaaagaaagacaatctataagaagctccccacttgataataagttgaatgtggaagatgttgattcaaccaagaatcgaaaactgatcgatgattatgactctactaagagtggattggatcataaatttcaagatgatccagatggtcttcatcaactagacgggactcctttaaccgctgaagacagttgtccataaaatcgctgccaggatttatgaagaaaatgacagagccgtgtttgacaagattgtttctaaactacttaatctcggccttatcacagaaagccaagcacatacactggaagatgaagtagcagaggttttacaaaaattaatctcaaaggaagccaacaattatgaggaggatcccaataagcccacaagctggactgagaatcaggctggaaaaataccagagaaagtgactccaatggcagcaattcaagatggtcttgctaagggagaaaacgatgaaacagtatctnacacattaaccttgacaaatggcttggaaaggagaacttaaacctacagtgaagnccaactttgaggggacttccaatattttcccaaattttctt

SEQ ID NO: 354285 - DNA, 933 bp, Homo Sapiens
  misc_feature (49)..(85): n is a, c, g, or t
cgggagtatagactatatgggcgaactggagcttacgcggtggcggcgnnnnnnnnnnnnnnnnnnnnnnnnnnnnnnnnnnnnnatcaggccaaatcggccgagctcgaattcgtcgagagcggaggtacttcagcacacacagggcggacagcgctcccctctacctggagacttgactcccgcgcgccccaaccctgcttatcccttgaccgtcgagtgtcagagatcctgcagccgcccagtcccggcccctctcccgccccacacccaccctcctggctcttcctgtttttactcctccttttcattcataacaaaagctacagctccaggagcccagcgccgggctgtgacccaagccgagcgtggaagaatggggttcctagggaccggcacttggattctggtgttagtgctcccgattcaagctttccccaaacctggaggaagccaagacaaatctctacataatagagaattaagtgcagaaagacctttgaatgaacagattgctgaagcagaagaagacaagattaaaaaaacatatcctccagaaaacaagccaggtcagagcaactattcttctgttgataacttgaacctgctaaaggcaataacagaaaaggaaacaacttgacgaaagaaagacaaatctatccgaaagctccccacttgactaactaccgttgaatgtggaagatgttgacttcaacccaagaatcgatgcatctgatcgcacgacttatgactcttcctaagagttggcttggactccatagagttccaggatggctccccatggtcttcatcacactagacgggactcctttaacccgttgaagacctggcccctagaatcgctgccaggatttatgacgaccattgcccagccgtgttgacagattttctaacctacctactcggctttcc

SEQ ID NO: 354286 - DNA, 1838 bp, Homo Sapiens
agcggaaaacgccagagggatgcgggcggcagagctcgagaggcggctgccgggctgcggggcgccttgactctccctccaccctgcctcctcgggctccactcgtctgcccctggactcccgtctcctcctgtcctccggcttcccagagctccctccttatggcagcagcttcccgcgtctccggcgcagcttctcagcggacgaccctctcgctccggggctgagcccagtccctggatgttgctgaaactctcgagatcatgcgcgggtttggctgctgcttccccgccgggtgccactgccaccgccgccgcctctgctgccgccgtccgcgggatgctcagtagcccgctgcccggcccccgcgatcctgtgttcctcggaagccgtttgctgctgcagagttgcacgaactagtcatggtgctgtgggagtccccgcggcagtgcagcagctggacactttgcgagggcttttgctggctgctgctgctgcccgtcatgctactcatcgtagcccgcccggtgaagctcgctgctttccctacctccttaagtgactgccaaacgcccaccggctggaattgctctggttatgatgacagagaaaatgatctcttcctctgtgacaccaacacctgtaaatttgatggggaatgtttaagaattggagacactgtgacttgcgtctgtcagttcaagtgcaacaatgactatgtgcctgtgtgtggctccaatggggagagctaccagaatgagtgttacctgcgacaggctgcatgcaaacagcagagtgagatacttgtggtgtcagaaggatcatgtgccacagatgcaggatcaggatctggagatggagtccatgaaggctctggagaaactagtcaaaaggagacatccacctgtgatatttgccagtttggtgcagaatgtgacgaagatgccgaggatgtctggtgtgtgtgtaatattgactgttctcaaaccaacttcaatcccctctgcgcttctgatgggaaatcttatgataatgcatgccaaatcaaagaagcatcgtgtcagaaacaggagaaaattgaagtcatgtctttgggtcgatgtcaagataacacaactacaactactaagtctgaagatgggcattatgcaagaacagattatgcagagaatgctaacaaattagaagaaagtgccagagaacaccacataccttgtccggaacattacaatggcttctgcatgcatgggaagtgtgagcattctatcaatatgcaggagccatcttgcaggtgtgatgctggttatactggacaacactgtgaaaaaaaggactacagtgttctatacgttgttcccggtcctgtacgatttcagtatgtcttaatcgcagctgtgattggaacaattcagattgctgtcatctgtgtggtggtcctctgcatcacaaggaaatgccccagaagcaacagaattcacagacagaagcaaaatacagggcactacagttcagacaatacaacaagagcgtccacgaggttaatctaaagggagcatgtttcacagtggctggactaccgagagcttggactacacaatacagtattatagacaaaagaataagacaagagatctacacatgttgccttgcatttgtggtaatctacaccaatgaaaacatgtactacagctatatttgattatgtatggatatatttgaaatagtatacattgtcttgatgttttttctgtaatgtaaataaactatttatatcacacaatatagttttttctttcccatgtatttgttatatataataaatactcagtgatgagaaa

SEQ ID NO: 354287 - DNA, 1700 bp, Homo Sapiens
  misc_feature (178)..(178): n is a, c, g, or t
  misc_feature (1348)..(1348): n is a, c, g, or t
  misc_feature (1357)..(1357): n is a, c, g, or t
  misc_feature (1365)..(1365): n is a, c, g, or t
  misc_feature (1382)..(1384): n is a, c, g, or t
  misc_feature (1408)..(1408): n is a, c, g, or t
  misc_feature (1484)..(1484): n is a, c, g, or t
  misc_feature (1535)..(1535): n is a, c, g, or t
  misc_feature (1545)..(1545): n is a, c, g, or t
  misc_feature (1547)..(1548): n is a, c, g, or t
  misc_feature (1556)..(1556): n is a, c, g, or t
  misc_feature (1623)..(1623): n is a, c, g, or t
  misc_feature (1636)..(1636): n is a, c, g, or t
  misc_feature (1678)..(1678): n is a, c, g, or t
attgcacatcaccctagtctgcagcaccaaggactgaatgagctcagtcctcttataatttaggctggactgtcacagacactggcagacacagcatacgtggtgcagccaaagtgcaaacatgccagcagcggccatgctccccagggtgggggtccagttagtaagccacgcgcancaagaggcgaggcatgccctgtgccacacacggactcaccctgctcactgtgcccgtggtatcgaaatgtacccacgtttaattcataaaggagaggctgctgtcattgaaagaaaagtttgttacttgcatttctggagaaaaggagcgcaccaggccacgcagggccacaggaggaggacgcaccagagtggtcaggaggcagaactaggcgagcagctttccactgtgtctccatggcaaaggcgaagatgggcgggggcagagtgtaggattggcaggtttgaatgtcttgggcagtagctacaggggtggtctccagctgcctggtgcctggccctgggtgatcagggtgaggggatactgccttctgcagtggaagagtcaaatcgaggagatggactctgagttggttagtgtgcaaaggtgcactcccaagggacccctttgctatctctaagaattggcctgccctgggaagggcagtctctccccagtcagtgaggtccccaagatgtgaaaacattatacattataaaaaagcatgattaatataagctcattctagcatttcaggttacagcttctagaagaggtttgtagtctcaaatgagtaggtttttcctctagagaggggcgggcctggaccttcaagcaccccttggtgtgtttaggagctcaggagcagaagcacctgcctgcagccctgcagctaaggaagttctctcagtcactcagagcagggaggggctgagagagtcatgtgaggctcccggggtactacgacagccctcgaggtgaaggattggccctgatcataatagagaaccctgaggaagtttactgtcatgagtctcggctggttggcgcatgtgacctttgaaggatgaagatggagtttgcaacatgagtatctctaaccttttgcttttcagggatcattttcaaaaattgcattggggccttcgttatttaccatagtattttcactttcatagttttgtcacctttttgtactgtgaacagctcaaccagtgaccgacttctctctcatgctgtttaccccacacacaatttcccactcaattctgaaaataagaacctgttaataggttggaaagctgtgtactctattcatatattgctctctcatgctagtggagagtggtnccattagcnccccaatntcagagttgcgaaatgnnnttaccaattaggaattgaatgtgnattttttttctgtttaataagaagagcaaatttgaataaataagctggtgtagataaacttaataatcatgctttnccctgtttggagataggtgatgtgttgtcatatcctgtgatacaggtcacncatctggccntnngtgtctgnagtttaagtctggtttgaatatgtaataatactactcagcatttcttgttgcctaagtgagacgatnttttattgttatnatatttacttcatgtattcttgtactgttcatttcaattaanttggtattgtatataataaaat

SEQ ID NO: 354288 - DNA, 447 bp, Homo Sapiens
  misc_feature (23)..(23): n is a, c, g, or t
  misc_feature (94)..(94): n is a, c, g, or t
ccaggccaagtggagagtggtgncaattagccaccctaattttagaagttgtgaaatgattttacccaattaggaattgaatgtgtattttttnccctgtttaataagaagagcaaatttgaataaataagctggtgtagataaacttaataatcatgctttttcttgtttggagataggtgatgtgttgtcatatcctgtgatacaggtcactcatctggccttctgtttctgaagtttaagtctggtttgaatatgtaataatactactcagcatttcttgttgcctaagtgagacgaaacttaaatgttatgatatttacttcatgtattcttgtactgttcatttcaattaattggtattgtatatctaatatgtgatatttgaactgaataaaacttacagtgttgtaaatgttctttaataaataatcacacctaagtaat

SEQ ID NO: 354289 - DNA, 882 bp, Homo Sapiens
  misc_feature (157)..(172): n is a, c, g, or t
  misc_feature (175)..(234): n is a, c, g, or t
  misc_feature (245)..(296): n is a, c, g, or t
catgagttctaccaagaaaaaattagttgggccaggcccaatggctaacacctgtaatcccagccctttgggagcccaaatgggcagatcacttaaggtcagaagtttgagccaagcctcgccaacatagtaagaccctgtctctactaaaacgatnnnnnnnnnnnnnnnnttnnnnnnnnnnnnnnnnnnnnnnnnnnnnnnnnnnnnnnnnnnnnnnnnnnnnnnnnnnnnctacttgaacnnnnnnnnnnnnnnnnnnnnnnnnnnnnnnnnnnnnnnnnnnnnnnnnnnnnaaagagcaagactctgtctcaataatataataatagttattatttaattgcaacatgaagttggaagccattttctgttacttctttaaggagctaaatcttttatatttttgttttctctccccttgcgtttcatattttagcttatgatctaaatatatattttgtatattataatattttaggaatagcttaattaagaactcacagactttgacaaagtggtaactagacttttaattactagattcttcaaattaggcttaatgcctgctagcatgccaatccaatcccatgactgatgttattatacactatggcaaatacaaagttgtagtattatggttcttgatggtgtgatttacttatgtaaattatgtacaaatttaagttcaatgaaacactgatttaatgtactgaaaggtaaatagtaccatagtgaattattttctgtcttgccttaggtttatttttattatcttcaatattagaataaatgctaaattattttcatttaaggatttatgtagttgaatattatcatttagtaatatttaatcatttaaaataaaatttaaagctttaa

SEQ ID NO: 354290 - DNA, 2809 bp, Homo Sapiens
tcactgtgtacacactgtctctgaaggaactcactttctagagacaatagagactccaagacctggaaaactcttccccaaagatgtaagcagctccactccacccagtgtcacatcaaagagccgggtgagccggctggctggtaggaaaacaaatgaatctgtgagtgagccccgaaaaggctttatgtattccagaaacacaaatgaaaatcctcaggagtgtttcaatgcatcaaagctactgacatctcatggcatgggcatccaggttccgctgaatgcaacagagttcaactatctctgtccagccatcatcaaccaaattgatgctagatcttgtctgattcatacaagtgaaaagaaggctgaaatccctccaaagacctattcattacaaatagcctgcggttggtggttttatagccatttccatcatcagtttcctgtctctgctgggggttatcttaatgcctctcatgaatcgggtgtttttcaaatttctcctgagtttccttgtggcactggccgttgggactttgagtggtgatgcttttttacaccttcttccacattctcatgcaagtcaccaccatagtcatagccatgaagaaccagcaatggaaatgaaaagaggaccacttttcagtcatctgtcttctcaaaacatagaagaaagtgcctattttgattccacgtggaagggtctaacagctctaggaggcctgtatttcatgtttcttgttgaacatgtcctcacattgatcaaacaatttaaagataagaagaaaaagaatcagaagaaacctgaaaatgatgatgatgtggagattaagaagcagttgtccaagtatgaatctcaactttcaacaaatgaggagaaagtagatacagatgatcgaactgaaggctatttacgagcagactcacaagagccctcccactttgattctcagcagcctgcagtcttggaagaagaagaggtcatgatagctcatgctcatccacaggaagtctacaatgaatatgtacccagagggtgcaagaataaatgccattcacatttccacgatacactcggccagtcagacgatctcattcaccaccatcatgactaccatcatattctccatcatcaccaccaccaaaaccaccatcctcacagtcacagccagcgctactctcgggaggagctgaaagatgccggcgtcgccactttggcctggatggtgataatgggtgatggcctgcacaatttcagcgatggcctagcaattggtgctgcttttactgaaggcttatcaagtggtttaagtacttctgttgctgtgttctgtcatgagttgcctcatgaattaggtgactttgctgttctactaaaggctggcatgaccgttaagcaggctgtcctttataatgcattgtcagccatgctggcgtatcttggaatggcaacaggaattttcattggtcattatgctgaaaatgtttctatgtggatatttgcacttactgctggcttattcatgtatgttgctctggttgatatggtacctgaaatgctgcacaatgatgctagtgaccatggatgtagccgctgggggtatttctttttacagaatgctgggatgcttttgggttttggaattatgttacttatttccatatttgaacataaaatcgtgtttcgtataaatttctagttaaggtttaaatgctagagtagcttaaaaagttgtcatagtttcagtaggtcataggggagatgagtttgtatgctgtactatgcagcgtttaaagttagtgggttttgtgatttttgtattgaatattgctgtctgttacaaagtcagttaaaggtacgttttaaatatttaagtttattctatctggggagataaaatctgtatgtgcaattcaccggtattaccagtttattatgtaaacaagagatttggcatgacatgttctgtatgtttcagggaaaaatgtctttaatgctttttcaagaactaacacagttattcctatactggattttaggtctctgaagaactgctggtgtttaggaataagaatgtgcatgaagcctaaaataccaagaaagcttatactgaatttaagcaaagaaataaaggagaaaagagaagaatctgagaattggggaggcatagattcttataaaaatcacaaaatttgttgtaaattagaggggagaaatttagaattaagtataaaaaggcagaattagtatagagtacattcattaaacatttttgtcaggattatttcccgtaaaaacgtagtgagcacttttcatatactaatttagttgtacatttaactttgtataatacagaaatctaaatatatttaatgaattcaagcaatatatcacttgaccaagaaattggaatttcaaaatgttcgtgcgggtatataccagatgagtacagtgagtagttttatgtatcaccagactgggttattgccaagttatatatcaccaaaagctgtatgactggatgttctggttacctggtttacaaaattatcagagtagtaaaactttgatatatatgaggatattaaaactacactaagtatcatttgattcgattcagaaagtactttgatatctctcagtgcttcagtgctatcattgtgagcaattgtcttttatatacggtactgtagccatactaggcctgtctgtggcattctctagatgtttcttttttacacaataaattccttatatcagccttggaaaaaagcggattttttcattacaaaatttataagctta

SEQ ID NO: 354291 - DNA, 616 bp, Homo Sapiens
ctacaaacttcttcttgcctcaacatcatgagtaatcattgttaaactgctaggaaatgctgtgtgacattgttagctagagtcagtatgtatgtaatcatgttttaaggaattaactcacagtatatctagctacaaataaagctagtatactgtcctataaatttttctaaaaactaatctgtagttctaaaaacttaaatgtcactcttattttcccttacttttttttaaaggtacctgaaatgctgcacaatgatgctagtgaccatggatgtagccgctggggtacgattgattggagagatgcctcaagaagatctgcacgcggtggtgaagaattgcttcgcggtggtgaatagctctgtctctgaaggcatgtcagctgcaattttggaggcaatggatttagaagtaccggtattggccaggaacatccccgggaatgctgccgtggtgaagcatgaagtcacagggctactgttttccaatcctcaggagtttgttcatcctggcaaagagactggttagtgatcctgcattagaaaaaggaaatcgtagtgaacggaaaggggaatacgtgagaaatggtatcatttcattggcaggtggaaaa

SEQ ID NO: 354292 - DNA, 584 bp, Homo Sapiens
ccgcccttcccatcccccactgcacttcactcatgtaagacgtctgcccggtgctggtccaggcgggcatgtgagtttgtagcctctgctccaaaggatggtttacacattattttttcattaccttcagtattcctgtgaatggttcaagagagaaagtcttcatttactaagatttgggttctgcctcccaagtgacaatacggggctgagatccctctcagcttctttgagatgtggccaccataagcatcatcgttgtagggacagtctcattgctgtcttctagcagacagaagagttaggtgccagaaaggacaatcttgatggtgggtcccctccctgaaggactttaagaaggcataaaggggttggggtggagggtggcgtgtgaaggaggaggcccttgattaggtcagtggtccctgggagccatcggcgagaggcctccagccgggtgacagtctgggctctcgggtactaatctttctaatatggcagtggttgtggcacttctgacttgaattgataattctcatatctaataaaaccaagaagtacctcgttgatatcttatagaaaac

SEQ ID NO: 354293 - DNA, 1324 bp, Homo Sapiens
aggtggctttcggtctagaactcctggatcccccgggctgcaggaattcggcaccaggatgtcttggcaagtttaagctacttctgcagtgtagtagacttacatattgttgtttatcttgtttggaagtgtgtttcaaaataaacatgtctagaatttaaagttttcagagattgttaaaactggttccaattttttggtcatttctcagaaaaataaaatacttataaatcctatattttactttttgggggtattacatttaaaatttagaaatcatcagtccagtgaccatatttatgaaaagctgtagccctccaaggtctgggaatttatcgagaagctctttgatagctctgcatttgttttcccttaggtgaacaatgtaggaaatcctcaaagtggctttgaatttaatgctccacttcagttaccagaggttatgggttttgttgtttcctgtgcattctcaaactcatttattagatagaacaatctttctatatttaatttttttaatatataggtcttaagtggtgctttaaaaagaaccctcacaagttaaaaattaagagttgtttcagtgctagatcttgccagctaaagacttgtgataccactatatagtatagttgttccagaaatcttcattttaaatagaagtgtttacaatgccttttttcccccagtattggttttcaatacctgttttcatatacaattacaaacctttcaaacctgtattccttctttatactcaggaaaatgtcaccaagcaccctcctccccagttcacaaaaggaagaagatgaagattctgtctccctgctccccctccgccagttttccaaagtgtctgagcatatgcctggctgtcctcagatcatcaccatgccacatccctgctccctacttcctggcagccaagaaaagccctttctacatgctagaaggaaatacatccaaaaagttagcattggagtgttagaaactagaatagacctctccgccaccgagctgctgtgtcacgccctcagcctgctagggagtgacaagcccaagtcattcttgatccaccccttctcccaccccagatcccagggactcatcctgtgactttgtaaccacactcattcctttcaaacacagaggaggaattattgcttcatctgactttattcaaatctagttatgtattggcctaaattatttgtgcaaaatttgaaatgttttttatttaaatattagaaatagcacaaagtcatggagtttttaaaaattgttataattaagtaaaaataaagctgaattgtgtcctttgaaa

SEQ ID NO: 354294 - DNA, 1309 bp, Homo Sapiens
tgggggtggagcctcatgccccgccccgcggctgggccctgccgcgccgctgcggctcctcctccctccttccgtcctccgcgccttccgtcggtcggtccttgcttcctgcttcgcctccgcgcctcgcgctatgggacagagcccccgatccgccagcaccacctgaggatccagaaaccgccccagcgatggaagaggatcaggagctggagaggaaagcaatagaagaactgcttaaggaggcaaaacgtgggaaaactagagctgaaacaatgggacccatgggttggatgaagtgtcctcttgctagcaccaataaaagatttctaattaacacaattaaaaacacattgccctctcataaagagcaagaccatgaacaaaaagagggcgataaggaaccagccaagagccaggcccagaaagaagaaaacccaaagaaacacagaagccatccttacaagcacagcttccgcgctcgaggttccgccagttactccccgccacgaaagcggagcagccaggacaagtacgaaaagcggtccaaccggcggtgaggctggaaccagggccagccagccctgcgggcctccgtgctccttcggggtgcggtgtgcggagaaggcctgagctggcagggcaaacacctgagagtgactttgacattaggtcctttgttgtttttaaagaggctgctggccacaggcaaaaaaaatgacctagcaactcttgaggaaacaagtgcaaaggaggatgtcttggcaagtttaagctacttctgcagtgtagtagacttacatattgttgtttatcttgtttggaagtgtgtttcaaaataaacatgtctagaatttaaagttttcagagattgttaaaactggttccaattttttggtcatttctcagaaaaataaaatacttataaatcctatattttactttttgggggtattacatttaaaatttagaaatcatcagtccagtgacccatatttatgaaaagctgtagccctccaaggtctgggaatttatcgagaagctctttgatagctctgcatttgttttcccttaggtgaacaatgtaggaaatcctcaaagtggctttgaatttaatgctccacttcagttaccagaggttaaaaatgggttttgttgtttcctgtgcattctcaaactcatttattagatagaacaaactttctatatttaaattttttaaaataaaggtcttaagtggtggcttaaaaaagaaccctcccaagtttaaaaattaagagtttgtttcaggtgctagatctttaccgcc

SEQ ID NO: 354295 - DNA, 1450 bp, Homo Sapiens; identical to SEQ ID NO: 70183
  misc_feature (1437)..(1437): n is a, c, g, or t

SEQ ID NO: 354296 - DNA, 2735 bp, Homo Sapiens
  misc_feature (1043)..(1043): n is a, c, g, or t
  misc_feature (2318)..(2318): n is a, c, g, or t
cacagttgccacagggaagcagccagcttgtgtttactttcaactcaaagtgttttctgttgtatatccatgtcatcacctcttatttatcaggaagtgacacaaagtaacaggcttcacaatgccatcaatgtcattttgacagcattcatgtcacaatacacaatcatgtactgtaattatacaaaatccaaagaataaaatgttactagttacactcgttaaaatgaaactgacaaccaaaagaataacaaaacaaaaagaaatctctgtcagaatccatagagacatttgacaatattacaaaaaaagtagtcaaataattgtcccagcatgctgcagttcattgccataacttcataaattcccagctctttgggggaaagaaagtgcgttttcacagcctatatagttcttaaagaaatagctctcacatgtatgcaggtcaacagaacaaggaatgcaaagtctaggcaccacgattgctcagacagcaacagagttcaaagagtccaacttgacactcttctgaaccagatgtggtttcttgagaaagaacttggacagtaacattagtccaaaagggccaaggaagaaacaccaactgttaataaggaacaaaaccatcaagaactagaacagttaacacaatcttttttctactctactttgaagctgaattatagcttgaatagtaaaagattacacagttgatctgtgggtagaacccctctcttccctgaccaacctccccaatccagatccggtaatgttggagtacagatagtgctggctcaatttctttgaagtagaatgaccatttcttcatgtgtggccatgcctccttttaataataaggaataatctgatgctaacaatgcctgtcccttcctgggttatggggctaatgaacggtgtagacaaaaaacaattcaactttctgataagaatcacacaccacacaaaaattattgcactgaaaaacaaacacctaaagataaaaaactcagcccaaccagcaaagggccaactaaactcttcgnaagtgctgtacttcctgccctttggagagcgtcttgaccttcctggtgttctgttgaatttggtccattattaaatgtcccgaagtgaaagagtccaaaaggacactgtaggctctttaaggctaagtcttcccggtgcttctgtgagataaattatctccttggccacatattacaaagcagggcctctgtttagaaaaatgaccatcagggcccactaaaacaatctggaagcaagggaggatgggcgcacatcatgtcctctcacctccaaaatctgatctcgtagtcaaaactggagtacaggacgttgaatatgttacaagtgtcttcatgaagctctcaaataagggctcacataatgggggagaccaaggtattttcagactctgctatcctgagactctattgtcactgttgtttttggttttaggagtgtccaatccagctcatgtctttttgtaaccccgtatacagcccttgtaatcaataaaatatttgcacaagatatctagatagatttggatggtagtatcctgatattacaggcacagatccaataacagaataatttagggttctgggtagagggaatggaggtaaagtcatcatgatgtgcagaagctcctgtttgttgccaacaccaaccaaggtgcattgaaactcaaagatctgctacagtacttgtttctccctgtgaccacccatgtgaggccaggagctgggaagaaatactcatgtgaagtcagagtcaatacaaatggctactgctgtcttttgtcccatccatcacatccccctctaatagttctaagactgaacactcgtggagagctcttctccacttactgctccggattctgaactaggacttgctaacattctcgtatatgacatcactgatgcagaactgctgcttcttcttcatccacatcagttgcacacactgatggataaaaatgtactgctcctctgtctgtaccatagacatccggtatgacctcatttctgacaccagccctaagatgtcaacaaactcatgatcccgaatgtgctgcaagagcctgtccagggcaatgaatgttcctgtccgtcccacgccagcactgcagtgaatgatcatgggacctttgctcttggtaccttgcggtcggaccaagtgtacaaactgcagaatactttctgcagcatttgctgtgggcaacaccagaatcaggccatgcagtgtagttaaaagccatcaacatcctgccacctcgtcagccatagttgaanccggaagtgtcctaacaggccccagtcgtccctgctcttcctctgaaatcatctcccacagtgatgtctccataggctataggttcttccgtgaatggccagtaatggtcacatttcaccctccttttctcattacactgagtgagcatgacaataatctgagacttttgttgcaggaccatcttccagaagtcatttctggtttcaggcagtggcccctgggtggcaatatactcctggggtgagttgtatccaggaatatagttggcattgatgtagtctgcaccttcctcttcattcatggagactaatctcacacggctgaagtcatatggtaggatgtttgtgtaacggtttttacatcgattcagtggaagatctgcagcaaagtgtgggatatccagtccaatcaatttc

SEQ ID NO: 354297 - DNA, 1039 bp, Homo Sapiens
  misc_feature (16)..(16): n is a, c, g, or t
  misc_feature (23)..(23): n is a, c, g, or t
  misc_feature (37)..(37): n is a, c, g, or t
tacttacatcccaccntaatgcngagtggcaacacangactaggtttaataattattttaattacaaatttccaccaattcttgccagtcatattattgtggatatcacaaatgaattatataatagtatattaccttatattcatctgcatgaaacttaggagaaaggagagcagaaatgtataagtttctgagaatgacaccataaagctcatatttacagtatggtagtctgtaaacatacaggcctgccagttaaagcccactcttctatcatcacccagctgcatgaccctgagcaagtcacttttgtttgctaatttttaatatcatctatcacctgacttctctatctacgagagttaactggctgcatgcaaaataccatgaaaaataccatgcacttttaagtgtgaagtagcactgtaaagtgacttatatattactggtctttctatttttagagtattaatattcatacatcagttaaaagtcaacatgtgtttgctaagtgatccttttgaaaggatccctttaaaagttcctaggcatcagcttcactgacaatctggtatgattctgaagccagcatttcaactcttggaaagatatacaatagtcacagcttgaattagtaactaataaaataaaatgccctcttattctccaaaatgtaataattcaggagtaatgacatcaagatttttctcctcaaactgaggagaaaaaaagccccaccgtggcttgtttaaatgacttaaaatacaagtggtaactatggtgactagggaaccaatgtttaaaacatcaaaagattattacaaaaatccaatttcccatgaatttctaaaaattaaaattctgagatgttgtgtctgagaaactgcttcttcagcaaaatatttagcacagactacatcatcccaaatctatggtatggccaggtatttaggtccttcaaccaacgtttttagaaagggtcccgttgctctttacttgcaaaatgactatctctagggcctcaaaattcaagagaccc

SEQ ID NO: 354298 - DNA, 1246 bp, Homo Sapiens
  misc_feature (1085)..(1094): n is a, c, g, or t
ctgcattttcacgctgtgctaagcagccctttggtctgcatgggggatggtcgtgctcccagcctgcagtctttggagcaaggctgctgcccgtgccttgggtgctggagttggaggaggctgttctcagccctttcccttttctgaaagctgttcctggccgggcatcccagggaagaaggaggggactgcgtgtatctcctccacctctcccattccatccccagtccagcctgggcaaccccacccctgggagggatgaggcaccctcttgctcagcctgctcagccttctctgagcctttgcagggatctgcagactcctgagggctagaggacagagaaagagaatagaatgaaatgactttgattcctgcgccttttagttttgaactctggaattcctctgccccctccccaacatttttttggaatctcaccctgttgcaaaactagagccatgtcccaagcatctcacaaaggaataactgctctgagcagagatgagtggtggttggcaggggcaggcaactttgggtgctgctgatgcctgcaaaagccatttatggcttgtggtggggggcacatagattccccggtgggttagacaggaagtaactgatatcacttcacccaaatatataaccgtgatggttatctatttaatttcagtttttgttaacgagcgtgtcttactaaaacgctccactttgagctcccccaccccctccaggtcctcagagtttgcagatctgggctttctaaagcaagtgacctgaaggctctgggctcaccatacaacacccacgttgtttatttcaaagaacttttcagcgaagggagaggagctttcagaaaaacctcactctttcccctcccttctcccctctttccttctgccggtccttttggctggggtctgagtctgcggttctcgcctgggcagtcttgacgaggagcaaaccccgccttcagagggcagacaaagcaggtggcatgaattgatccagcgagaaaggtggtgagccgaggccacttcctggggtttctgctacaaaagggaatgggaaagggaagggaaatttnnnnnnnnnnttggggctgtgggagaagttgaccggcattttgggggcaaaactcccatgacccccctccggaatcttggcaagggtcaaactcttgtttgtgaaaaacctcccccacctttttacttttttcgaaaaaccgggaacggaattttcccccct

SEQ ID NO: 354299 - DNA, 699 bp, Homo Sapiens
  misc_feature (382)..(395): n is a, c, g, or t
caaagtcttgagcagagttgggggccaatggtagcattgctgtcatctctgggaggagagtgagtatacaagtcagtgacagttcagccaggctcccttgggtttgggaagaggcactgcccttctgtgctgtggatcctgcttgtctgctctggagtccccccacccttgccaggagcttcacaaaccacagacgggctgtcagcaagagctcagacaggatgtggtgcaagtgcaggtgcacgagttttaaccctcagctgcaggagctagtctcaggtgttctggggatgcctcaggctaagaattttgccgactttctgggcttggttggctaatgccaaatgcccctgcttaaatatcacaaggtgctgattctccnnnnnnnnnnnnnncataccaatgtgctcaaactttgagctaggtcttgtgagtttgcctagcactcagacctgtttaagtaacgttctttacattgaaacaagtcaaccgaagctttgtggtgcaggagctgagggtgccccagactcagtgggagccctggttgggccccaaactctcccagcagggtcctcggtttcctcatttgtgaaataaatgagtgggccacgacgttaataagcccaagagaactgtgaaggtggtagtcccttgccctaattggtgctcaataaagttgttggcataaacgaaaaaaaa

SEQ ID NO: 354300 - DNA, 573 bp, Homo Sapiens
  misc_feature (454)..(470): n is a, c, g, or t
gactacccatgcctgtcagactctgctcagggacagagatggatgggtaaatggtgctgttggagacatttttatcttcataccaggctctgtttcatccctgcaccccgcacccccactcactcccctgagggggtaaaatgcagaggtggttgacctgaagggtctgattccctccttcccaagccttagggcctaccctggagtgctgcagtgtgtgagagctgctgcttgcttgtttctccactaggcctgctccaaatgcttagccaatctctggagccgacacagttgcctacggggtgacttagcaccaggttccattagctctccaagtgactgtttccacccagtacttttggcgcttgaggatggggggagggggattatttaaaataaataaaatccgaggtggcagtagaggattccttttgctttaaaaatctttggactnnnnnnnnnnnnnnnnngttttttatatataaatatataaagtaaattgttatgtaactattattgtttcttgtatgttctaattttgttttatgatgtaattaaagaaagtaagctgtg

SEQ ID NO: 354301 - DNA, 826 bp, Homo Sapiens
aggatcacaaggccctactcgccgaaccactcagggtcctgtggacagctcacctagtggcaatggctccaggctcccggacgtccctgctcctggcttttgccctgctctgcctgccctggcttcaagaggctggtgccgtccaaaccgttccgttatccaggctttttgaccacgctatgctccaagcccatcgcgcgcaccagctggccattgacacctaccaggagtttgaagaaacctatatcccaaaggaccagaagtattcattcctgcatgactcccagacctccttctgcttctcagactctattccgacaccctccaacagggaggaaacacaacagaaatccaacctagagctgctccgcatctccctgctgctcatccagtcgtggctggagcccgtgcagttcctcaggagtgtcttcgccaacagcctggtgtacggcgcctctgacagcaacgtctatgacctcctaaaggacctagaggaaggcatccaaacgctgatggggaggctggaagacggcagcccccggactgggcagatcctcaagcagacctacagcaagttcgacacaaactcacacaacgatgacgcactactcaagaactacgggctgctctactgcttcaggaaggacatggacaaggtcgagacattcctgcgcatcgtgcagtgccgctctgtggagggcagctgtggcttctagctgcccgggtggcatccctgtgacccctccccagtgcctctcctggccctggaagttgccactccagtgcccaccagccttgtcctaataaaattaagttgtattcattt

SEQ ID NO: 354302 - DNA, 1508 bp, Homo Sapiens
  misc_feature (671)..(679): n is a, c, g, or t
  misc_feature (765)..(773): n is a, c, g, or t
  misc_feature (1001)..(1001): n is a, c, g, or t
  misc_feature (1162)..(1162): n is a, c, g, or t
  misc_feature (1354)..(1354): n is a, c, g, or t
ggctggaccggtccggaattctccggattcgccaacagcctggtgtacggcgcctctgacagcaacgtctatgacctcctaaaggacctagaggaaggcatccaaacgctgatggggaggctggaagatggcagcccccggactgggcagatcttcaagcagacctacagcaagttcgacacaaactcacacaacgatgacgcactactcaagaactacgggctgctctactgcttcaggaaggacatggacaaggtcgagacattcctgcgcatcgtgcagtgccgctctgtggagggcagctgtggcttctagctgcccgggtggcatccctgtgacccctccccagtgcctctcctggccctggaagttgccactccagtgcccaccagccttgtcctaataaaattaagttgcatcaaacactaatatttaaacccttatatgtatcacaaataaaatatatatacacactatattcttataataaaaggggggcctgtgttcaatatcccctctaggggcctaagcttcaccgaacccaccttttttgataaaaatggtcccaatatgcaaataatattagtattcaagggtaccttgcccctaatttaaccacccccctctgccgtggtaaaaaactggcataacttttgggtatattttacatnnnnnnnnncctttatattccacaggagggcttcggccacctattttttgggctagttagctctgctcttgaccttatataatgttttaacacgnnnnnnnnntcagggtaagtatattatgacaacactctttttttataaatttacgtctcatacacagggcgaggtcaaaaacaaaatacacgattcgtaatccaatgttgttttatatattcacgaaacggtgtctcttttattgaactcacctgtttatgttctcacgctgaattatataactgtagggattaatttccctctaataaagtttatatatgtgtgtatacatgaaanaagttggtatatcctattgaaaatgtagggtgtctattgataggagagtgagagcgtatatactctggtgagtattttgttgtttctcgatatacttcatggtttttacacaaatgatacatatacacatacctccgtattaaatgaaaatgtctcttctngaagggctccgccccgactctctgactgttgtgtggtgaaccgctatgctataaaaatagaggacgtttgcccacctctagtaatatgtacctccccgtaccacacatgtatacccacttctttcgcgttctatcacaatgaatattttctcatctacacatcagtcacatagtacacgcatgtatcatgcncgcccacactttatctcgtctcacagttaccgcgttcgccctctaacacgcactgtgatatggtgtactccacacacacaacaaaaatcccgtgcgacctctacacgtgcgataccgattttacacgcattggccctgagaaatcaaacgattg

SEQ ID NO: 354303 - DNA, 159 bp, Homo Sapiens
tgaagtggtctagaggatccctgcagctctctctgatggggaggctggaagacggcagccgcggaagtgggcagatcctcaagcagacctacagcaagtttgacacaaactcgcacaaccatgacgcactgctcaagaactacgggctgctctactgct

SEQ ID NO: 354304 - DNA, 1092 bp, Homo Sapiens
  misc_feature (442)..(480): n is a, c, g, or t
  misc_feature (515)..(537): n is a, c, g, or t
aggccaccatcacctgacctgggggtcaaggcaggaggactccgaaggtgctacccgtgagcaaagtgtaattaccgaatcctgactgcaaggcccacctgcccctcccccacagagcctccagagctagctgaggccaacgcaggcccatccgtctcttcactctgtcgcaggccctttcatgggcttcgtctgccatctttgtgggtgccctagacttagtccttatcttgtcctggtttcctttcttgtgaccatctccccatgaaagtgctgtacaaattccacccgccccaggacccccgcacctgccctctggcaccagatgccagggaagggacagaggaaaacagccacaaacaagccaggggggctccccggagccccaggggtggggattggtggccactgtttgtatgttcttgagtgcaagtgttttatnnnnnnnnnnnnnnnnnnnnnnnnnnnnnnnnnnnnnnnttttgcagcgaagagaaatgaagaaaaactgaagnnnnnnnnnnnnnnnnnnnnnnngaaccatacaaaatttttccaccacacataccctctaagccagcaagatttcctctttgcaaaatcatatttttgtgggaatgggccctgctttttgtggcaaggcctgttctgattaataaaggatcgtgaaaaagtagggccttggttgtttcctccgtgggtcccagccctccctcacctccctgggggcagaggcagtggggtgaaggggatgggggccccggggctgagcctcccctcagtgtgtcacctttgggatttgacttcactggtgaccaggcccttcccgagtgtccagccatcctcagatctctatagaatatgatcccactggcttcccagaaagcagagaggcagctacatctcccagatcaggcctgacacaaggctttttggggagtagagtcctctctaggctttcaggggtgccctccagggttcacccaggcctggacgttccccttccctcagtttcccagagggacaatttgccaccctccaagggcagtttcagaacaaaaccaaagggggggacgttccagtttttcccac

SEQ ID NO: 354305 - DNA, 351 bp, Homo Sapiens
  misc_feature (204)..(204): n is a, c, g, or t
gatcccactggcttcccagaaagcagagaggcagctacatctcccagatcaggcctgacacaaggctttttgggagtagagtcctctctaggcttcaggggtgccctccagggtcacccagcctgacgtcccctccctcagttcccagaggacacttgccaccctccaaggcagctcagacaaaccaaagggggacgctccagntttcccaccaccatccatggggccactgtagtttcaggccagcacctccttcctggtccctgaggtgggaaaaggaaagacaatgagctctgtgtctgttggctggacctgcggcttctctcagccctcttctagtttcattcttta

SEQ ID NO: 354306 - DNA, 325 bp, Homo Sapiens
  misc_feature (158)..(158): n is a, c, g, or t
caaatttgggaaattgttactcctagctaaagtaaatcttcccttccccaatggacaataagatcctgaatcaatgcagggatgcaggtcaattcatgaaacatttataaagaacctagtttatgtctgtcactggctggcaaatactggattcaganccaattttagactctgtggggttggctaagagtagagccaaacaagaactccaagattggtactaaaatagattcaaattcttagcaggtgcagactggaatagagcctctcataaccgatctggtctagaattataccttatggggtagaaagcataaggcaattc

SEQ ID NO: 354307 - DNA, 1018 bp, Homo Sapiens
  misc_feature (836)..(836): n is a, c, g, or t
ggctgggcgcatcaggggccaaccctctgggtcttccctactacaatggcgtgggcactgtgcagaaggggcggccgaggaaacgtaagagcccgggccccggtgcggatctggcggactacaacgctgcgctaagctgcaacgaaaacgacgcaaaacacctggaccgtgaccagccataccccagcagccacaacaccaagcgcatgcgcacgtccttcaagcaccaccagcttcggaccatgaagtcttactttgccattaaccacaaccccgacgccaaggacttgaagcagctcgcgcaaaagacgggcctcaccaaacgggtcctccaggtctggttccagaacgcccgagccaagttcaggcgcaacctcttacggcaggaaaacacgggcgtggacaagtcgacagacgcggcgctgcagacagggacgccatcgggcccggcctcggagctctccaacgcctcgctcagcccctccagcacgcccaccaccctgacagacttgactagccccaccctgccaactgtgacgtccgtcttaacttctgtgcctggcaacctggagggccatgagcctcacagcccctcacaaacgactcttaccaaccttttctaatgactcgcaacccctcaccccacaatttctttaaaaaagaaattatctttagttgaattccaagtgtattttaaaatagaggctttgagcaactaactaaccacattttaggatctcgcctggaaacagaggtaaaaaaaagaagtgtgcgcccggctaatgcagcggtgtggaccgaggaacaacttggaagatctacctgcaacacaacantttgtgtcactgtacagttttgtggactgagcgaggaaaaacaacaaataatttaagttggctagagcttctgtattttcaaagactgccacgtgccttaggaatactgttttatctccatactttggatgacttgttcatttttctctccctctttttctctgtatatttatgaccagagc

SEQ ID NO: 354308 - DNA, 702 bp, Homo Sapiens
  misc_feature (545)..(545): n is a, c, g, or t
  misc_feature (660)..(660): n is a, c, g, or t
gctctttttgctttgttaatcagcaaggttttgaaaatcaggagatgtcaatttaaacaaacaaaccaatgaaaagtagtcaagactggaggtggggattgggcggagttggcggggggatgctcttcagcaatgagagactgtgccaagctggtgtagccaccaaaggggtgggctgggtagaagctgtctcctatcagctgggcaggagcgcccccaccaggtacactgacatgtttgcaacacctgccagctcctgggcacttaccggtcttcaacacctgcaaatgggtgatatgtaaaatatgtgcagagagctggcagtggcctagcctctgatccatcaaatcagacaccttctgaagggtcccggaggctcctggaggtggctcctgttaatcctttagttgctggacagtagggtggtccaggggtaccagggctggaatagattgatgggaacagcagggagtccaaatgggtgcactcccccctgaaaataagccctgcctataaaccacagcggagttccatctcgtcggganttcctggcacagctggcccaaggtggaaatttcctcatttaaggactgtagttaaaggtccggcttattctattctattctaagctagatccaccccaagaaaactggattccanggtaaatttaatgatgagtaaaactgggctttggcaaaggct

SEQ ID NO: 354309 - DNA, 637 bp, Homo Sapiens
  misc_feature (75)..(75): n is a, c, g, or t
  misc_feature (593)..(593): n is a, c, g, or t
tttccctggctgaatgggagtgcccttctggaaagtcaagtaaatgggaattccaatgtagccgggaggggtggncgggggctctcgaaacctgccctcctttcgtgcaatgagcccctttgtagtacttgatgccacagctatgtgggcaggcatggggacaggcttggtttcttccgtagtcacagacgttaggctactgctttcggcttcaatggaaacatcctttccacccctccgctttattgtgcctgtgtcaccttctgagtcttctccccagtaacctgtggaagacgcccagcttgctcgggactgggcttgttcaaggctctctctactttgattttgcctgttatactttgtgctatgatcagaaaacatacatttggtccatatggctgcttgatgcccataaacctgcaggatcccctgaataatcaaagtgagtatgcccgaatggaagagtctcccagcttctctggtgctggatcgtctgtatattatcatgggagccacttgagcatgacgtccagctcccacgaccactgtcagcagcatcaagtgacgcgcgatccccctgatcctgggaaagntcctctgtgcttggagaagaaattactgtagctgtagcatataa

SEQ ID NO: 354310 - DNA, 692 bp, Homo Sapiens
  misc_feature (175)..(175): n is a, c, g, or t
  misc_feature (257)..(257): n is a, c, g, or t
  misc_feature (585)..(628): n is a, c, g, or t
ccaaacctgttcgtgctcatctcttccatcttggggtctcgcaccgctggcccccacacccagttcgtgcagtggtcaatggaggagtgtgtggactgcctggaccagggtggccgtggcagcgtcctgcagttcatgcccttcaccaccgtgtcggaactggtgaaggtgtcanccatgtctagccccaaggtggttttggccatcacggacctcagcctgcccctgggccgccaggtggctgctaaagccattgntgcactttaaggggcttggcatggccacagtgggggctggggactggcgcagccccaggcgcctccaagggaagcagtgaggaaaaattaggcttcgtgcctcacatccgctccacatggtgcaaaagcctctagcggcttccagttccccgctcctgactcctgacctccaggatgtctcccggtttcttctttcaaaatttcctctccatctgctggcacctgaggagagtgagcagcctggaccccaagcccagtggtcacccctgtgtgcgcccgccccagcccaggagtagttttacctttgaggaactttttaaatgcaaannnnnnnnnnnnnnnnnnnnnnnnnnnnnnnnnnnnnnnnnnnnattttgtaatatgtaagggaaatctcccttcgttcatgtataaataaagctcctcgtggctccc

SEQ ID NO: 354311 - DNA, 690 bp, Homo Sapiens
  misc_feature (78)..(78): n is a, c, g, or t
  misc_feature (98)..(98): n is a, c, g, or t
  misc_feature (108)..(108): n is a, c, g, or t
  misc_feature (122)..(122): n is a, c, g, or t
  misc_feature (580)..(623): n is a, c, g, or t
acctgttcctgctcattcctcccatcctggggtctcgcacgctgggccccacaccaggttcgtgcagtggtttcatgnagaagtgtgtggactgctgnagcagggtgnccgtggcagcgtcntgcagttcatgcccttcaccaccgtgtcggaactggtgaaggtgtcagccatgtcaagccccaaggtggttctggccatcacggacctcagcctgcccctgggccgccaggtggctgctaaagccattgctgcactctgaggggcttggcatggccgcagtgggggctggggactggcgcagccccaggcgcctccaagggaagcagtgaggaaagatgaggcatcgtgcctcacatccgctccacatggtgcaagagcctctagcggcttccagttccccgctcctgactcctgacctccaggatgtctcccggtttcttctttcaaaatttcctctccatctgctggcacctgaggagtgtgagcaacctggaccacaagcccagtggtcacccctgtgtgcgcccgccccagcccaggagtagtcttacctctgaggaactttctagatgcaaannnnnnnnnnnnnnnnnnnnnnnnnnnnnnnnnnnnnnnnnnnnattttgtaatatgtgagggaaatctaccttcgttcatgtataaataaagctcctcgtggctccaaaa

SEQ ID NO: 354312 - DNA, 538 bp, Homo Sapiens
gataaacagacaaggtagaatagatttacgctaaaatttaaagaaagaacaagtgcaataaaaaataaaatggacacagtgagcgaatgccttataaaagcgtaccatttttgaaaagttggatcagttgtaagacctttcatctttagtattgtatgatataattctacattgaaaaataaacacttggcattaaatgggacttggagtcaaaagatctggttttatggtccatctttaccaatcatttgctgtggatctctttaaaggtcctggaacctttgagcctcagttacctcacttgtaaattggcaaaaatacctacctcacagggttgttgtgaggattcaatgagctaatgtatgttgaaagcactttgtgaattgtaaagtgctacacaaatgttagttgttgttgctgctgtatctgagatgtcttaattttctttttcttcagaaatagtctaataaacctccagggcttttctgttaaagtatactagttggtaaaatgttgaataaacagtttattacaatat

SEQ ID NO: 354313 - DNA, 2226 bp, Homo Sapiens
  misc_feature (936)..(959): n is a, c, g, or t
agcggggcggcggcggcgcgcgcctgagaagaggggacgccagcccggtcaggcctcggcgcggcctacacgctccgctcgctcgctcgctcccgcctcccgccccgcgcccggccatggcggagccgtcgtccgcccgacgcccggtgcctctcatcgagtcggagctgtacttccttatcgcccggtacctatcggcgggcccgtgtcggagagcggcccaggtgctggtgcaggagctggagcagtaccagttgttgccgaagagattggactgggagggcaacgagcacaacaggagctacgaggagttggtcttgtccaataagcatgtggctcctgatcatcttttgcaaatctgcgagcgcatcggtcctatgttggataaagaaattccacccagtatttcaagagtcacttctttacttggtgcaggaaggcagtctttgctacgtacagcaaaaggtaccttaatttgaagaagtgttctgctttgtattaatagcctaataattattataattgtgaagtaatgtaagcattgtggaagaaaggtgataatgtaactataaatcatgctgtggactataaaattctctgcatttagcatagaacattgaattttattacataagtgtttaatgggtccttctgcattaaaaagttgataaagatatagatgttaagctaaaaagcttgaatttattctgagatgttgtttgaggttttatcaatgtgagttcttaattttccattttgtagctcactcataacttcattgaatgtaattgtatgtgtctaataaactctttaaatgctagaggtatttcatttgatatttagcttctgaaagccctttgttataaagggaagtgattttctaaatttggtagcagcttgaaaacaagcaccacaaatgtaaaattgcatggttcnnnnnnnnnnnnnnnnnnnnnnnngccaagttatgtgctagcaaaatgtttgaaattgctattctttttctgttagcttggtatatatgacttagactaagtatatgtatgtgatataatatatgtgtacatgtggctaaactgctaatgggcaaagattgttggttcttctgatgctgagtatacatcaagttcatcccatgattattttttattacgagctattgctgatgtgatgctactcttagctgcaccaccagtataaagcttaactgagaaagaacacccctccctcttagttccgtgccagactggtttgttagctttagttgtttcttagtgctctagccatgtcaccctgtgggcactaaatcaggacactgtttatattcttcctcttctgtgtccctattcactttgtaattattctattttagctggttatatggtagttaattggtagcctgttttcctttgttttctttacttgtgtcaagctccatgtcgttgttttgtgatgagcagtgatttagaactggccagaccttagaagagtcttcagcaagctgccctagggtaggggcatattctctgtttgttttgtactggtaccccaggaggatgccttgtaactgctctttggtcatgatagtggtaatgaatccattcatgtaaaatgcaatatgtctgttagtttggggcacccgaggctcagtagaggtttagtatgatgccttccctttcttctttgagttatgaagaaactaatttctggcacagtgtgactgcttcaaacctatgttctgatgctatctcctatagaggagggcagacttttttttcttagtgcatttggctggtaggtcaaggagggatggactttgaattagtgttcagagtcacagatcctacgtatgtgctcttcagtagaggattttctgtgatcctacaatgaagggaaagctatataatttattggtacttcctaaagatagagactaaagtcatggtagtattggccaaattaattttaaaactgaacaagtcatgaattttcatataaatcaaagaactttttccttataaaagcttccatttttgaaaagttggatcagttgtaagacctttcatctttagtattgtatgatataattctacattgaaaaataaacacttggcattaaatgggaacttggagtcaaaagatctggttttatggtccatctttaccaatcatttgctgtggaatctctttaaagggtcctggaacctttgagcctcaagttacctc

SEQ ID NO: 354314 - DNA, 423 bp, Homo Sapiens
  misc_feature (25)..(25): n is a, c, g, or t
  misc_feature (83)..(83): n is a, c, g, or t
  misc_feature (92)..(92): n is a, c, g, or t
ccttaaagaatgggaatggaataanaaacccctacatggaaaaaaataaaacacctgggcaattaaaatggggcctgggaagncaaaaaganctgggtttaatgggccccatctttaccccaatcacttgcctgtgggatcctctttacaaggcccctggaacctttgagcctcaagttaccctcacttgtaaattggcaaaaatacctacctcacagggttgttgtgaggattcaatgagtctaatgtatgttgaaagcactttgtgaattgtaaagtgctacacaaatgttagttgttgttgctgctgtatctgagatgtcttaattttctttttcttcagaaatagtctaataaacctccagggcttttctgttaaagtatactagttggtaaaatgttgaataaacagtttattacaat

SEQ ID NO: 354315 - DNA, 866 bp, Homo Sapiens
  misc_feature (112)..(112): n is a, c, g, or t
  misc_feature (785)..(785): n is a, c, g, or t
gtgacagcaatgtgagagaattactgagaaccatgtgcatttgaccgtacaaggatactaattcgggtgtgcgaagggttgcttgataaggatttactgttctgtaaggggncggctggcaacttgccatcgtgaaaacttaaaagcaagtttttgaacacaatccattcttaatttaaaggctgcctatattatttcaaacaatacaggcagccttttaaatatatgtttaacaattattaaacttgttaattattaaatattaattattaaacatgttaatatatgtttaatatgtttacataatgttattttaaatataaaatcaacatttctacagatttactctgccatcactaacttttctttcatatccttcaaaataaataacacctgtaattgtttatagtagaaaaggtgctttattttacatatcattggtacacgatacataaaactgcctaaaatcagtcttgaaaaacacaacagtcagtcagttacaccttaaagggtcaaagaccaagtctattttgcaagctacttcatttatgatcaaatgactacaataattttaaatactaataatgccttcatatccaatgttacaaatgatttttgttacaagggctgtaattttttaaaataaaaatatctttagctatagaccttatttctaatcagaatgaatctttgctagtctacaagtctttgaaataatagatcaacaatttcaccttcctatagataattgtatttatgtaattgggtaatgaggcaggagtccntcatacatgcaatcagattatttcaatttttaaaaaaatgcagataaaattgagtttatatataccctatgtctaattaag

SEQ ID NO: 354316 - DNA, 932 bp, Homo Sapiens
  misc_feature (426)..(520): n is a, c, g, or t
  misc_feature (587)..(647): n is a, c, g, or t
  misc_feature (806)..(806): n is a, c, g, or t
attagtcaaacagcaccagaatggacagcacaagccatggaagcccagatggctcagtgaatccttgcagaacttctgtgcacatgacatctttttccatgttgtgcagatcagtttcactatctccaaagcatttgcatcatgaccttatacatttcaatcccttttatgctggattccgtttaaagaagacattattagagcaggaagtacaagcatttaaaatatgtagttcccatatatttcagggtctctgtgtattaagctaactcagatgttttgaaagctttttctttaaacagaggtgaaatatctgtggctaaaaagtttgagatttgtgataactttgtagtcatgtaaaacttaagtgcttcatgcctctccaaatgtggttattctaataaatggagaaatgagccaaaaccnnnnnnnnnnnnnnnnnnnnnnnnnnnnnnnnnnnnnnnnnnnnnnnnnnnnnnnnnnnnnnnnnnnnnnnnnnnnnnnnnnnnnnnnnnnnnnnggtgggcccgccgccgcgggcgccgtcccgcggcgcgcccattttttttcgcgcccctgcgcgcgannnnnnnnnnnnnnnnnnnnnnnnnnnnnnnnnnnnnnnnnnnnnnnnnnnnnnnnnnnnngcggggccaaccgcaccaccccgccgtgctgcttccccgcccctcgacgtgtatgcgtgcctaccattttcccgcctgtttgtcttccgcccccccttattataatcgcgcccgccgggcgccccggcctagcttatacctctagggacccttactaantagttgcttcatccccgctgacccccttatcgacggccgcacaacggtggcgcgcgcccccaagcgccgcttctcctccctctttctcgcgcatccggccgcctccctaccgccccggacacactg

SEQ ID NO: 354317 - DNA, 1628 bp, Homo Sapiens
gagcgaggcctgggtggcgaattcggcacgagggaaagatggcggcagccgtgcgacaggatttggcccagctcatgaattcgagcggctctcataaagatctggctggcaagtatcgtcagatcctggaaaaagccattcagttatctggagcagaacaactagaagctttgaaagcttttgtggaagcaatggtaaatgagaatgtcagtctcgtgatctcgcggcagttgctgactgatttttgcacacatcttcctaacttgcctgatagcacagccaaagaaatctatcacttcaccttggaaaagatccagcctagagtcatttcatttgaggagcaggttgcttccataagacagcatcttgcatctatatatgagaaagaagaagattggagaaatgcagcccaagtgttggtgggaattcctttggaaacaggacaaaaacagtacaatgtagattataaactggagacttacttgaagattgctaggctatatctggaggatgatgatccagtccaggcagaggcttacataaatcgagcatcgttgcttcagaatgaatcaaccaatgaacaattacagatacattataaggtatgctatgcacgtgttcttgattatagaagaaaattcattgaagctgcacaaaggtacaatgagctctcttacaagacaatagtccacgaaagtgaaagactagaggccttaaaacatgctttgcactgtacgatcttagcatcagcagggcagcagcgttctcggatgctagctactctttttaaggatgaaaggtgccagcaacttgctgcctatgggatcctagagaaaatgtatctagataggatcatcagaggaaatcaacttcaagaatttgctgccatgctgatgcctcaccaaaaagcaactacagctgatggttccagcatcttggacagagctgttattgaacacaatttgttgtctgcaagcaaattatataataatattaccttcgaagaacttggagctcttttagagatccctgcagctaaggcggaaaagatagcatctcaaatgataaccgaaggacgtatgaatggatttattgaccagattgatggaatagttcattttgaaacacgagaagccctgccaacgtgggataagcagatccaatcactttgtttccaagtgaataaccttttggagaaaattagtcaaacagcaccagaatggacagcacaagccatggaagcccagatggctcagtgaatccttgcagaacttctgtgcacatgacatctttttccatgttgtgcagatcagtttcactatctccaaagcatttgcatcatgaccttatacatttcaatcccttttatgctggattccgtttaaagaagacattattagagcaggaagtacaagcatttaaaatatgtagttcccatatatttcagggtctctgtgtattaagctaactcagatgttttgaaagctttttctttaaacagaggtgaaatatctgtggctaaaaagtttgagatttgtgataactttgtagtcatgtaaaacttaagtgcttcatgcctctccaaatgggttttctaataaaggagaaatagccaaataaagagactt

SEQ ID NO: 354318 - DNA, 437 bp, Homo Sapiens
  misc_feature (32)..(32): n is a, c, g, or t
cacttggtgtaggtttcaggatcgcctctttnaggaaggacttcaggaccaactggggcctgcataagaaaacttatctcattattagagtactcacagcttgtatctcccagctacatcctagaaccccattgtcctttattccaccaaaccagctccaggtgaccagactctactcagaaagcaaattcgtcatcaaagaacagagactggccaccacaaggacatgcaggagaactgtcgggaccaggaagactcattccaaaaagcccaggccgggcacagtcgtcaagcctgtaatcccaacactttgggagaccgaggtcgggggatcgattgagcctcggaggtcgagatcagcctgggaaacacagggaggcccccatcgctacaaaatattttaaaaattagccaggtgtggtggcttgtgcttgttg

SEQ ID NO: 354319 - DNA, 466 bp, Homo Sapiens
aaaaacccaaaccctagccagggctcctaggtgggaaaaagtcccaggaaagcaactcacttgattatgatgggaagacaaccaaaggcatgtggtgataggctcctccgttatccaagggaagccagcaatatgcgggcacgtcactggtgatgggctaggcatgtccaataataaacgagactcagggaatcagagaatcacaggattggaagggactttaagaatgatgatcaaattcatccctcaagcctttaatctccctttcaacatctctggcaaaggctctacactgtgtgttaaaaaaattccctggtatgggacatgcaaggaagacatcccattccaatttaggaccgatctaatttttagacactgctttcatgtgttaaacctaagtaggcttcttggtggaaaggaaataatgcttaaaggcaaaaatacaaaccacaaccctggagggttg

SEQ ID NO: 354320 - DNA, 1118 bp, Homo Sapiens
  misc_feature (16)..(16): n is a, c, g, or t
  misc_feature (18)..(20): n is a, c, g, or t
  misc_feature (26)..(26): n is a, c, g, or t
  misc_feature (30)..(30): n is a, c, g, or t
  misc_feature (37)..(37): n is a, c, g, or t
  misc_feature (52)..(52): n is a, c, g, or t
  misc_feature (54)..(54): n is a, c, g, or t
  misc_feature (57)..(57): n is a, c, g, or t
  misc_feature (61)..(63): n is a, c, g, or t
  misc_feature (75)..(75): n is a, c, g, or t
  misc_feature (77)..(77): n is a, c, g, or t
  misc_feature (102)..(102): n is a, c, g, or t
  misc_feature (139)..(139): n is a, c, g, or t
  misc_feature (440)..(440): n is a, c, g, or t
  misc_feature (503)..(503): n is a, c, g, or t
  misc_feature (511)..(511): n is a, c, g, or t
aaaaacccctcaaaancnnntagtcnaggnaagtatnaaatacgggcgggcncnggngggnnnacttacaaaaangnggcttttatttcccatttggaacgnggacaacagaccacaacgcaattccattttgcaagtntttccaagggagaagctgttcaaccacccgtttgggggatgagtgagccgacactttcctttggtctttctgaatcggtaactgcactgctttctggaccatttctaaggcggcctttacaagaagacattcctgtcggagaggagggtggacttcggagaaattctcatactgaagcatgagcttaggagtttctgttagtggtagtggtgttttggacacttcattccttgcaacaccgaggttttgggtgttgacataaagtggaccacacaccacatctgctgccgtcttgacactnttttttgtttggttggttttgttacatcttacattatgcagaactatttttgtacaaattgtntaaaagtnatttatgcaaggtttgaatgcataccagtgttttaattgttttgagattgccaattttcctgatttccttaaggtaggagagaatttaacgtgtacttcatcgacacaacccatctacaaatgtgcccagatctaacaaagtaggctaagaccttccacttaaaagcatgtttaactggaagttgagagtctgctttgtacctcaagagttacatgagcatgttgtggataaatgtaaattatagtcaaagtaagatactctgccaagtttcctctgtagagaattcacttttctcaaattttaaaatttcgacttcagcctttgcactcaggaggttctgctccagcatgagctcttgtacttacatagatctaatttatacagtgagtcaagacgtagaataaatgctcccacatagcctttcttttgcttttgcttctctcctctgaagtgtgagttgagttctcatttaggtttgtaacatggctatttcctagttgtaaagttctgcatttataagtgccattgttgtaaggtggtgtttcctagaccttccctgatgcgattttacctttgttgaatttgtataaacaattgtcaaaaaaa

SEQ ID NO: 354321 - DNA, 779 bp, Homo Sapiens
  misc_feature (48)..(48): n is a, c, g, or t
catctatagatggggtatgagggctgtctccacctcttggctattgtnaataaagctgcttgttccttttcatggctgtgtaatattccactgtgtggatggacattatatttttccattcatctatagatgggtatgagggctgtctccacctcttggctattgtgaataaagctgcttgttccttttcatggctgtgtaatattccactgtgtggatggacattatatttctcccttcatctatagatgggggtatgagggctgtctccacctcttggctattgtgaataaagctgcttgttccttttcatggctgtataatattccactgtgtgtctggaccacattatatttctccattcatctatagataggtacgagggctgtctccacctcttggctattgtgaataaagctgcttgtgccttttcatggctgtataatattccactgatgtggctggaccacattatatttctccattcatctatagatgggtatgagggctgtctacacactcttggctatctgtgaataaagctgcttgtatccattttcatggctagtgtaactattccacctgtgtggctggacccacattactaattttatcccattcgttctcatagactgcggtaatgcagcgcgctgctcttccacccttccttggcctacttgctcgcaactaaacgctgctttgattcacattctacactcggactgcgtttactcatccccactgctgctggtcaggacccaccttaatctctctcccat

SEQ ID NO: 354322 - DNA, 1154 bp, Homo Sapiens
  misc_feature (9)..(9): n is a, c, g, or t
  misc_feature (14)..(14): n is a, c, g, or t
  misc_feature (16)..(16): n is a, c, g, or t
  misc_feature (27)..(27): n is a, c, g, or t
  misc_feature (35)..(35): n is a, c, g, or t
  misc_feature (39)..(39): n is a, c, g, or t
  misc_feature (49)..(50): n is a, c, g, or t
  misc_feature (64)..(64): n is a, c, g, or t
  misc_feature (66)..(66): n is a, c, g, or t
  misc_feature (69)..(69): n is a, c, g, or t
  misc_feature (74)..(74): n is a, c, g, or t
  misc_feature (84)..(84): n is a, c, g, or t
  misc_feature (92)..(93): n is a, c, g, or t
  misc_feature (111)..(111): n is a, c, g, or t
  misc_feature (113)..(114): n is a, c, g, or t
  misc_feature (175)..(175): n is a, c, g, or t
  misc_feature (179)..(179): n is a, c, g, or t
  misc_feature (183)..(183): n is a, c, g, or t
  misc_feature (217)..(217): n is a, c, g, or t
  misc_feature (238)..(238): n is a, c, g, or t
  misc_feature (439)..(439): n is a, c, g, or t
gggaaatcnatttnantacgagtgggncgagtttnccgnaatcaccctnncacccccagagacncntcnggganaaccattttnttgctganntggacgagctttaatganannccccctcatttcacaccagaggacacattcagggaaaagccttttatgtgcagggagtgtngcanaagntttcggcagaagcctaacctgtttaggcacaagngggcacactcaggtgcctttnttgtgcagggagtgtgggcaaggcttttgtgctaagttaactctcattaaacaccagagagcacacgcaggggggaagcctcatgtgtgcagggagtgtgggcaaggctttagccggcagtcacacctcattagacaccagaggacacattcaggagagaagccttatatttgcagaaagtgtggacggggctttagtcgnaagtcacaaccttatcagacatcagaggacacactcaggatagaaactttatgtgtatagggaatgtggaacagcctttagccaggagtcatacttcatcagacaccagaggacacacacagtgctgtggctttttcagccattgctagataccaaagtggaaacattctgtgtgtgattatgcatgagactgtactggtaagacttgtatctccatccacctgaaggagaattgctggctcattttcaggagccctgcccttcctcactgtggatggtgggttgtggaaacccggtcaggtaatgatagtggcaggaggcagtcaaatgcccaggcagataggggtgggtacctggtgaaacccaaccttaaagctgaagacagtcccggctaaatcctcatactgaattgagaacctgtcttcccatttggtgtgctttcctccgattgatcccaacccttcacctattttacgtatacctgccctttcctaattggtttttacactgctgtgcccaccttttgagtggtgcctttgcatacttacaaatcagtcaacgtgtattcccctattctgagcccataaaagacccagactcagctgcagtgaggagagaaatcaccctgctgtgggggttggggaccactccctgcatcccctctccactgagagctgttcttttgctcaataaaattcttttctacccatcctca

SEQ ID NO: 354323 - DNA, 878 bp, Homo Sapiens
  misc_feature (166)..(166): n is a, c, g, or t
  misc_feature (185)..(185): n is a, c, g, or t
caggttgggggaggccctggctttttcaatgattgacgttgacatcagtcaggagctgggagttgagacctccagggaagtctcgtccggatccatcgctcttctctcaaggagcacagtcctgggaaaggccgtagggaccgtgtgggccggtgatgcgggcacntgcagaccaggccaggccntcgggtaaagctctgaggagagcccaaaacccaggcttcaggttcgggaaggtgactgcttgcaactgcagtagcaggaacatgtcaggtgcttactgggtgagacccagccggggaagcctctccaactcctcctagccctggaaaccagacacccagagccccaggctttctcggcacccagaagaagtggggagcgggcaaagcagaaaacattcaatgcatgatgtaggattgctgcgttggcactaagctgttgtattaagcatgagaggtgtttgtttaacgttggcaaagggatttaacaagaaacaaaaagcttcgcgtccttgttttgaccgtcgacagaagtccaattttcttgcctttctttatccccatttctcctccctccccttcccccatcacatccactttcggtcactcgttgttggtatttggtggcagctcttggtcctattgctgtggatgttccactgaaaacacggggggtagcggggagtggtaaggaaagcaacttttttctaatttttgtattggtatccacaagcgtttgtattttttgaattgcaaacactgtgttttctggtctttgggggttagttgaactttctgtattaccttttggaaaacctgagttttaccacagtcttaagcagatttgaaataaattcttttgacactgccaccacc

SEQ ID NO: 354324 - DNA, 943 bp, Homo Sapiens
gaaaagtttgtaaaaaaagcaggctggtaccggtccggaattcccgggatgcgctggaggtcgaagcttccaggtagcggcccgcagagcctgacccagggtacgacgaagcagtcggcgggagcccacggtcgctgggcggtgtctttaagggagggggcggagccacgtctctggacatcctgagcccaagtcccccacactcagtgcagtgatgagtgcggaagtgaaggtgacagggcagaaccaggagcaatttctgctcctagccaagtcggccaagggggcagcgctggccacactcatccatcaggtgctggaggcccctggtgtctacgtgtttggagaactgctggacatgcccaatgttagagagctggctgagagtgactttgcctctaccttccggctgctcacagtgtttgcttatgggacatacgctgactacttagctgaagcccggaatcttcctccactaacagaggctcagaagaataagcttcgacacctctcagttgtcaccctggctgctaaagtaaagtgtatcccatatgcagtgttgctggaggctcttgccctgcgtaatgtgcggcagctggaagaccttgtgattgaggctgtgtatgctgacgtgcttcgtggctccctggaccagcgcaaccagcggctcgaggttgactacagcatcgggcgggacatccagcgccaggacctcagtgccattgcccgaaccctgcaggaatggtgtgtgggctgtgaggtcgtgctgtcaggcattgaggagcaggtgagccgtgccaaccaacacaaggagcagcagctgggcctgaagcagcagattgagagtgaggttgccaaccttaaaaaaaccattaaagttacgacggcagcagcagccgcagccacatctcaggaccctgagcaacacctgactgagctgagg

SEQ ID NO: 354325 - DNA, 1846 bp, Homo Sapiens
  misc_feature (1760)..(1770): n is a, c, g, or t
ggtaccggtccggaattcccgggatcacggaggtggcaggaaaggcttggaacagctgccggaggtgacggagcggcggccccgcccggtgcgctggaggtcgaagcttccaggtagcggcccgcagagcctgacccaggctctggacatcctgagcccaagtcccccacactcagtgcagtgatgagtgcggaagtgaaggtgacagggcagaaccaggagcaatttctgctcctagccaagtcggccaagggggcagcgctggccacactcatccatcaggtgctggaggcccctggtgtctacgtgtttggagaactgctggacatgcccaatgttagagagctggctgagagtgactttgcctctaccttccggctgctcacagtgtttgcttatgggacatacgctgactacttagctgaagcccggaatcttcctccactaacagaggctcagaagaataagcttcgacacctctcagttgtcaccctggctgctaaagtaaagtgtatcccatatgcagtgttgctggaggctcttgccctgcgtaatgtgcggcagctggaagaccttgtgattgaggctgtgtatgctgacgtgcttcgtggctccctggaccagcgcaaccagcggctcgaggttgactacagcatcgggcgggacatccagcgccaggacctcagtgccattgcccgaaccctgcaggaatggtgtgtgggctgtgaggtcgtgctgtcaggcattgaggagcaggtgagccgtgccaaccaacacaaggagcagcagctgggcctgaagcagcagattgagagtgaggttgccaaccttaaaaaaaccattaaagttacgacggcagcagcagccgcagccacatctcaggaccctgagcaacacctgactgagctgagggaaccagctcctggcaccaaccagcgccagcccagcaagaaagcctcaaagggcaaggggctccgagggagcgccaagatttggtccaagtcgaattgaaaggactgtcgtttcctccctggggatgtggggtcccagctgcctgcctgcctcttaggagtcctcagagagccttctgtgcccctggccagctgataatcctaggttcatgacccttcacctcccctaaccccaaacatagatcacaccttctctagggaggagtcaaatgtaggtcatgtttttgttggtactttctgttttttgtgacttcatgtgttccattgctccccgctgccatgctctctcccttgtttccttaagagctcagcatctgtccctgttcattacatgtcattgagtaggtgggtagccctgatgggggtcgctctgtctggagcataacccacaggcgttttttctgccaccccatccctgcatgcctgatccccagttcctataccctacccctgacctattgagcagcctctgaagagccatagggcccccacctttactcacaccctgagaattctgggagccagtctgccatgccaggagtcactggacatgttcatcctagaatcctgtcacactacagtcatttcttttcctctctctggcccttgggtcctgggaatgctgctgcttcaaccccagagcctaagaatggcagccgtttcttaacatgttgagagatgattctttcttggccctggccatctcgggaagcttgatggcaatcctggaagggtttaatctccttttgtgagtttggtggggaagggaagggtatatagattgtattnnnnnnnnnnnggtatatatgcatatatctatatataatatgacgcagaaataaatctatgagaaatctatctaccacctaccctga

SEQ ID NO: 354326 - DNA, 1209 bp, Homo Sapiens
  misc_feature (810)..(822): n is a, c, g, or t
  misc_feature (855)..(855): n is a, c, g, or t
ttccccttcgttttcactctccaccttctcctcctcccgccggcccggtccggaattcccgggatgggaggtggcaggaaaggcttggaacagctgccggaggtgacggagcggcggccccgcccggtgcgctggaggtcgaagcttccagctctggacatcctgagcccaagtcccccacactcagtgcagtgatgagtgcggaagtgaaggtgacagggcagaaccaggagcaatttctgctcctagccaagtcggccaagggggcagcgctggccacactcatccatcaggtgctggaggcccctggtgtctacgcgtttggagaactgctggacatgcccaatgttacagagctggctgagagtgactttgcctctaccttccggctgctcacagtgcttgcttatgggacatacgctgactacttagctgaatcccggaatcttcctccactaacagaggctcagaagaataaccttcgacacctctcagttgtcaccctggctgctccagtacagtgtatcccatatgcagtgatgctggaggctcttgccctgcgtaatgtgcggcagctggaacaccttgtggatcgaggctgcgtatgctgacgcgcttcgtggctcccttggacccgcgcaaccagcggcctcgcaggttgactaaagcatcccggccgggacattccccgccgcccaggcatctcagtggcctttgcccccaaaccctgcaggaatgggggttgcgggggctagtaagggccctgcctgacccggcatttgagggaagtatgttgcacctccgtttctnnnnnnnnnnnnnagatgctaccccttgtggggttctggaacccancctgaattgtaaaagcgagggttcgctttaacctcaaaacaaaatgcatttcggaagttttaccaacgggccaactcagttccccgatcattttcctttcccccagggaaccccttgaactcaccccctgttgacctccgacgcttggaggggaaacacccagcttgtctctgggctaacctatttctgggcgttctagtgcctcgctcgcgagagaaaaacccctcttcaaaagggcccaaagggcgggccttccccccagagaggtaacccctccaaaaacaatatgctgggttttccccagttctgcccctttttctcacgggcaaaagtgcgggcttttatttccccccg

SEQ ID NO: 354327 - DNA, 1054 bp, Homo Sapiens
aaaagtgtaaaagattaaaactaccatgtactccccccggcaacctcttgctggtaccggtccggaattcttgccagccagagcgactcttcagggaggtggcaggaaaggcttggaacagctgccggaggtgacggagcggcggccccgcccggtgcgctggaggtcgaagcttccagctctggacatcctgagcccaagtcccccacactcagtgcagtgatgagtgcggaagtgaaggtgacagggcagaaccaggagcaatttctgctcctagccaagtcggccaagggggcagcgctggccacactcatccatcaggtgctggaggcccctggtgtctacgtgtttggagaactgctggacatgcccaatgttagagagctggctgagagtgactttgcctctaccttccggctgctcacagtgtttgcttatgggacatacgctgactacttagctgaagcccggaatcttcctccactaacagaggctcagaagaataagcttcgacacctctcagttgtcaccctggctgctaaagtaaagtgtatcccatatgcagtgttgctggaggctcttgccctgcgtaatgtgcggcagctggaagaccttgtgattgaggctgtgtatgctgacgtgcttcgtggctccctggaccagcgcaaccagcggctcgaggttgactacagcatcgggcgggacatccagcgccaggacctcagtgccattgcccgaaccctgcaggaatggtgtgtgggctgtgaggtcgtgctgtcaggcattgaggagcaggtgagccgtgccaaccaacacaaggagcagcagctgggcctgaagcagcagattgagagtgaggttgccaaccttaaaaaaaccattaaagttacgacggcagcagcagccgcagccacatctcaggaccctgagcaacacctgactgagctgagggaaccagctcctggcaccaaccagcgccagcccagcaagaaagccctcaagggcaaggggctccgagggagcgccagatttggtccagtcgaattgaagactg

SEQ ID NO: 354328 - DNA, 947 bp, Homo Sapiens
  misc_feature (22)..(23): n is a, c, g, or t
  misc_feature (582)..(582): n is a, c, g, or t
  misc_feature (630)..(630): n is a, c, g, or t
gaacagctgccggagtgacggnncggcggccccgcccggtgcgctggaggtcgaagcttccaggtagcggcccgcagagcctgacccaggctctggacatcctgagcccaagtcccccacactcagtgcagtgatgagtgcggaagtgaaggtgacagggcagaaccaggagcaatttctgctcctagccaagtcggccaagggggcagcgctggccacactcatccatcaggtgctggaggcccctggtgtctacgtgtttggagaactgctggacatgcccaatgttagagagctgaagcccggaatcttcctccactaacagaggctcagaagaataagcttcgacacctctcagttgtcaccctggctgctaaagtaaagtgtatcccatatgcagtgttgctggaggctcttgccctgcgtaatgtgcggcagctggaagaccttgtgattgaggctgtatatgctgacgtgcttcgtggctccctggaccagcgcaaccagcggctcgaggttgactacagcatcgggcgggacatccagcgccaggacctcagtgccattgcccgaaccctgcangaatggtgtgtgggctgtgaggtcgtgctgtcaggcattgaggagcangtgagccgtgccaaccaacacaaggagcagcagctgggcctgaagcagcagattgagagtgaggttgccaaccttaaaaaaaccattaaagttacgacggcagcagcagccgcagccacatctcaggaccctgagcaacacctgactgagctgagggaacagctcctggcacaaccagcgccagcccagcaaagaagcctcaaagggcaaggggctcccgagggagcgcccaagatttggtccaagtcaaatgaaaagaactggcgtttccctccctgggggatgtgggggtcccacctgcctgcctgccctcttag

SEQ ID NO: 354329 - DNA, 1312 bp, Homo Sapiens
  misc_feature (1162)..(1162): n is a, c, g, or t
acatgtatatatccacagctagaggatcccatgggcttcttgaatgcatatatgggcttcatcaactccttctgagctggaaagagtagcttccctgtattacctcccctactcccttatctgttgtgtattccacttaggaagaaatgcccaaaagaggtcctggccatcaaacataattctctcacaaagtctactttactcaaattggtgaacagtgtataggaagaagccagcaggagctctgactaaggttgacataatagtccacctcccattactttgatatctgatcaaatgtatagacttggctttgttttttgtgctattaggaaattctgatgagcattactattcactgatgcagaaagacgttcttttgcataaaagactttttttaacactttggacttctctgaaatatttagaagtgctaatttctggcccacccccaacaggaattctatagtaaggaggaggagaagggggctccttccctctcctcgaatgacgttatgggcacatgccttttaaaagttctttaagcaacacagagctgagtcctctttgtcatacctttggatttagtgtttcatcagctgtttttagttataaacattttgttaaaatagatattggtttaaatgatacagtattttaggtatgatttaagactatgatttacctatacattatatatattttataaagatactaaaccagcatacccttactctgccagagtagtgaagctaattaaacacgtttggtttctgaataaattgaactaaatccaaactatttcctaaaatcacaggacattaaggaccaatagcatctgtgccagagatgtactgttattagctgggaagaccaattctaacagcaaataacagtctgagactcctcatacctcagtggttagaagcatgtctctcttgagctacagtagaggggaagggattgttgtgtagtcaagtcaccatgctgaatgtacactgattcctttatgatgactgcttaactccccactgcctgtcccagagaggctttccaatgtagctcagtaattcctgttactttacagacaggaaagttccagaaactttaagaacaaactctgaaagacctatgagcaaatggtgctgaatacttttttttnaaagccacatttcattgtcttagtcaaagcaggattattaagtgattatttaaaattcgtttttttaaattagcaacttcaagtataacaactttgaaactggaataagtgtttattttctattaataaaaatgaattgtgacaaaaaaa

SEQ ID NO: 354330 - DNA, 1032 bp, Homo Sapiens
cccacgcgtccggccccgccgagagcgtgaactatcgctgcggatggggcagacctggaccggtggaaggccgggcggaagtgcgcgcctggggccgccttggttaccgcgttttccgctcctcgctacgtcatcgttgtgagcccgctatcagcggccagcgcgggcgcggccggagaccgtggggcccccggttgccgccccctcgggagccaccatgttggtgataccccccggactgagcgaggaagaggaggctctgcagaagaaattcaacaagctcaagaaaaagaaaaaggcattgctggctctgaagaagcaaagtagcagcagcacaaccagccaaggtggtgtcaaacgctcactatcagagcagcctgtcatggacacagccacagcaacagagcaggcaaagcagctggtgaagtcaggagccatcagtgccatcaaggctgagaccaagaactcaggcttcaagcgttctcgaacccttgaggggaagttaaaggaccccgagaagggaccagtccccactttccagccgttccagaggagcatatctgctgatgatgacctgcaagagtcatccagacgtccccagaggaaatctctgtatgagagcttttgtgtcttctagtgatcgacttcgagaactaggaccagatggagaagaggcagagggcccaggggctggtgatggtccccctcgaagctttgactggggctatgaagaacgcagtggtgcccactcctcagcctcccctccccgaagccgcagccgggaccgcagccatgagaggaaccgggacagagaccgagatcgggagcgggatcgagaccgagaccgagagggtcctttccgcaggtcggattcattccctgaacggcgagcccctaggaaagggaatactctctatgtatatggagaagacatgacaccaacctttctccgtggggcctctctccttttggaaacatcattgacctctccatggaacgaccagaaactgtgccttcgtcacctatgaaccg

SEQ ID NO: 354331 - DNA, 1427 bp, Homo Sapiens
cgctatcagcggcagcgcgggcgcggccggagaccgtggggcccccggttgccgccccctcgggagccaccatgttggtgataccccccggactgagcgaggaagaggaggctctgcagaagaaattcaacaagctcaagaaaaagaaaaaggcattgctggctctgaagaagcaaagtagcagcagcacaaccagccaaggtggtgtcaaacgctcactatcagagcagcctgtcatggacacagccacagcaacagagcaggcaaagcagctggtgaagtcaggagccatcagtgccatcaaggctgagaccaagaactcaggcttcaagcgttctcgaacccttgaggggaagttaaaggaccccgagaagggaccagtccccactttccagccgttccagaggagcatatctgctgatgatgacctgcaagagtcatccagacgtccccagaggaaatctctgtatgagagctttgtgtcttctagtgatcgacttcgagaactaggaccagatggagaagaggcagagggcccaggggctggtgatggtccccctcgaagctttgactggggctatgaagaacgcagtggtgcccactcctcagcctcccctccccgaagccgcagccgggaccgcagccatgagaggaaccgggacagagaccgagatcgggagcgggatcgagaccgggatcgagacagagacagagagcgggacagggatcgggatcgggatcgagatcgagaccgggaacgggacagggatcgggagcgggatcgagaccgagaccgagagggtcctttccgcaggtcggattcattccctgaacggcgagcccctaggaaagggaatactctctatgtatatggagaagacatgacacccacccttctccgtggggccttctctccttttggaaacatcattgacctctccatggacccacccagaaactgtgccttcgtcacctatgaaaagatggagtcagcagatcaggccgttgctgagctcaacgggacccaggtggagtctgtacagctcaaagtcaacatagcccgaaaacagcccatgctggatgccgctactggcaagtctgtctggggctccctcgctgtccagaacagccctaagggttgccaccgggacaagaggacccagattgtctacagtgatgacgtctacaaggaaaaccttgtggatggcttctagggaacagagctggattccttgtgcctcatatgccccaatgctggtctcagtaaaacactgaggtggaagcttacacatctccctcagcctctggtttttcagcacttgggattggggttaaacctttaaaaacggctgtcaggtttgatctcagtgtaacaacatggccagtgcctgttccccactcccttgccccaaaaggatctggaacac

SEQ ID NO: 354332 - DNA, 510 bp, Homo Sapiens
ggaagtatgcctgaaccaaattatcctctaaggtacatattagcggaaaaatccagactttaaaagaattttgggatactttatattctttattatttttatgtacaaccaactctagtgaagaacctaaaaagctacagactaaatttttataaaatctcaggacctaattataagagcccaaacaacggtttagtatcatttagcaagcggggatttttctccctccaaaaacgttaattttgaaaaatatggttaagtttaaaaagttgcaatgtgtaaacggcagttccatgggatgtgaaaagattatagttactttcattaaaaaacagcacacttcgaaaaatggattgaagcctgtacaaaaaagctatttaacactggattgataaaaaataaaatactttcggaattatgcacaagtatggaagctacattttaaattttcattggtcatgtctaaaacgtacaccattacctttacgttcatttcacttaccaatttat

SEQ ID NO: 354333 - DNA, 976 bp, Homo Sapiens
  misc_feature (25)..(25): n is a, c, g, or t
  misc_feature (124)..(124): n is a, c, g, or t
aggcctttttgtgtatatgtacgtngtttgtttttttccttttgtttctagcctgttcagtgtacagtttattcaaggctacatgctttttttgaattcgcctggctacgcatttcctcttttnacatataggatttgggattgggggtgggttggatgtttttgtttggggacttatttagtagtattgagtctcttatagccctactcttaagccttcaatactgtccactctttatattcctttacttgcagaatttataaaagcccccaaactgcatataatatgagcctttaaaacatgggtaaaactaatcccattgatgggtttggatggtatgttaagaaatggagatgctgcagagcccaacgtaattttttaaacagcaagttttccatctccctacgaatcctctgaagcttttacccaagccctttcttgcctctccagtgctattttccttcagatggaccttaaacataatttcttggacactactagagagacttcgaggcaataataaaagatcagtattaaccagctataacagaggtttgatcatgcttacttgtacagtttttcccccgttttaaaaaggaatgtaataaaatttgttttttccatagaattaaataatattaaaattgagtgaaaggttgattgttgatgaatagaatagtacctctcatctgtgcagtgtctcatttcacctcagagaaaaggatacataagagggagtttgtaatttatcttaggatattctaattgcatttaaaagaacttatcttgcacagggtaaatgggggactcacatacatatattaatacctctgactcattaacagaaagaaatacttggtacttctttcgctgaatgaccatactgtggaggatgcatactacttggtatagagaaataaatgaggaagaaagaactgcttaattaaattatcattcatatgttcatatagagac

SEQ ID NO: 354334 - DNA, 316 bp, Homo Sapiens
gaattctggatcctcgttaacagaaatccacagggccagctttaccaccgctctgtgcaacctcttatgtgatgacgcacatcagagcttccacaagcattatctcagcacacaggtgggtgaacacaggccaaggaaccatcggctcaagtttgctacccctgctgtgccagtgggtctgcacagcctcaacaggggagaagtgagcgagagagtgtggatgtgagtgtaaacagtgtgtgtccaagagggtgtggaatccatgtccgaatggtattcctatgtgaatgaagcagtgactctgaacccaatccgg

SEQ ID NO: 354335 - DNA, 308 bp, Homo Sapiens
  misc_feature (24)..(24): n is a, c, g, or t
  misc_feature (60)..(60): n is a, c, g, or t
  misc_feature (127)..(127): n is a, c, g, or t
  misc_feature (148)..(148): n is a, c, g, or t
  misc_feature (150)..(150): n is a, c, g, or t
  misc_feature (160)..(160): n is a, c, g, or t
  misc_feature (237)..(237): n is a, c, g, or t
  misc_feature (247)..(247): n is a, c, g, or t
gaattctggatcctcggggggggnaccacgaggaccacgcttaaccacgcgctctgtgcnacctcttatgtgatgacgcacatcacagcttccacaagcattatctcacctcactggtgggtgaacncaggcctagggaccatccgcncnagtctgctanccctgccgtgccagtgggtctgcacagcctctacatgggagaaatgagcgagagagtgtggatgtgagtgtaaagcnctgtgtgtcnagagagggtgtggatctacgcttcgaatggtatttctatctggatatgacgagccaatgac

SEQ ID NO: 354336 - DNA, 283 bp, Homo Sapiens
  misc_feature (218)..(218): n is a, c, g, or t
  misc_feature (247)..(247): n is a, c, g, or t
  misc_feature (251)..(251): n is a, c, g, or t
gaattctggatcctcggggtccattagtacttaaaaatttgtgtcatagaagacatgtatatttacctggttcatatttatgaaacaaacattatctattaaatgccagactctaggcacacacctcatcaataatgggatggtgttgactagcctacacagtaatttactgcaaactttcacataatctataaacatatgtctggataaacacaaantctaattagcaacgtcatgtttcgctcangaangctgaaatgcacttacctgtccatgcctgaac

SEQ ID NO: 354337 - DNA, 393 bp, Homo Sapiens
  misc_feature (362)..(363): n is a, c, g, or t
gaattctggatcctcatgctcaatggccagagaatctacatggaaacccttaagttcagcgtgactttcaccatttttaagcacgtgcagcaaaagttcacctgtgtccagccccactgtttggcctgggcacacctaccgactctaccattgtaacatcagaatgataccatttctgtaaagtgacatctttcagttacctggtggcttttccatatatgcaacctcgatggcctgggtaatgtcacaagtgtttgtaaagttgaacgttgaagatttaaacctccttgatttccatgattgtgtagggtttcctgggtccaagttgagttattgaacgtttccacaaatcacctccggcnnaggatccaaaattcctcaagttagtattat

SEQ ID NO: 354338 - DNA, 472 bp, Homo Sapiens
ggtttgcgattaacaactggggttcgggggtgattttagcacagccctgccctttgggagagaaaaccatttcaaagaaatgcttgtgacaaaagacacaagcattgagtgatcaagtacagcatgtgcatgattattggagagcaccaggttatcagtgaagacagtcgtaagggaggagagatgaggtggtgggggagacgtcttataatcgagtagagtactgagaacaatgctggggttatctctctggtgtacaaagggactaccttggtcagggtcctggcagaaatgtacctaagagggataattggagaaagctgaaggaagacactatttacaaaggtgtggtcaggattaagagaaaccaacaagagctggcagagagctttgaagctttaccatgcctagacccaaaaaggggcaagaagagagcaatgacaagtattgaaccgtgatatgggagagggtg

SEQ ID NO: 354339 - DNA, 226 bp, Homo Sapiens
  misc_feature (26)..(26): n is a, c, g, or t
tcagcctcacaccttgtcattttatnatcacagccatggaaagtcgttcctaacgggaggaaaacattaaaccttgcccagccaacatgaaggcaaccctagactgacaagtgtaaaatgtcagatagaataaaaagctttcaatgacgataagtcaagttgcacacactagaaagatgcggtgaggttaagtgacttacctcagctacaaagtaaacccccgagg

SEQ ID NO: 354340 - DNA, 407 bp, Homo Sapiens
  misc_feature (382)..(382): n is a, c, g, or t
atcctcggaaagtacagaattcaaactaaggtgctttgatgcaattcacctgttccatcttcttgatgaaacactagttgctctgtgtctgtcattagcgattccgcaaggcatgtggtgataaggcttccagattttgaagatatgtccagtaattgtgcttgaaacattgtaatgggtgtgacggctgccaggtgcctcatttggggagtaggggacaactttctggctaggtcattctttccaaagacatgtactctctgcttcctctgtgtgtagcccagcatactgggacatcaatatgactaaggcttggggagtttcttgcaaaatggtgtggtggcacagatcaaaatcttggtaaaaaagtgagcccaggtantcccaggccttgacccaaccctgga

SEQ ID NO: 354341 - DNA, 236 bp, Homo Sapiens
cgagaattctggatcctcatggttggttaactgtatggaataatgtgaagggagctgaaaatccatctgcccagagcaactatgcaggagcatgcctgaaatggcagctcatatttcttggcctcatgctttctaggagtcctctcctaaaacagagacgcctccgtcagatacccacaattcttctaactaggcatgccctactttgttgagttcccacgttcgattcgcgaggg

SEQ ID NO: 354342 - DNA, 320 bp, Homo Sapiens
atcctcgtccccaggtattgtggatgtaattaaggcatgaggcccaccgaggaacttgctcatcctatcacccaagtcatactgtcactctggagcccaacgtgtgcctccaaaacatcattaaatgtttctacaagcagttctacaccacagcacgaagacaaggtggcacacgtctctagagaagctccacagtatacagcacatctctcttccttgtgaacatgtcagcggccttaagcatgtaccacactgtcccttgaaggcacatcctatgcccggaaattgcaaggggcactgtcagctgtcagagagcagct

SEQ ID NO: 354343 - DNA, 272 bp, Homo Sapiens
gaattctggatcctcgttgggggaaatattagacatctgagactcaaaataggaggatttgggtagattttcatatatctgttataaaatggaagcattattattatttatgtgtggtaaagccaacagatcagaagacaactgccattgaaaagagagtttgttactcacagtttcctggaggaggagcatgcagaaccacatggggaagcacctaagcagaagtgcagcaagacatgccagcagagtccttactgttgggccttccagga

SEQ ID NO: 354344 - DNA, 561 bp, Homo Sapiens
  misc_feature (65)..(65): n is a, c, g, or t
  misc_feature (181)..(181): n is a, c, g, or t
  misc_feature (187)..(187): n is a, c, g, or t
ccccccatttcctcacgtcagtgccatttccacttgccctttagccagtcccctggaacccaggncactctaactctcctctcttattctaattttcaattctcaatttccccttcaaaatctctcttgggttcttacctttctatccctactccacgatcttggctgaagccattttccntccatnacagaagaactctaacagtctatgtggtgtccatacctccaatctcccttcatccagtcatcatacacacaaatctgcaacagcaataccacccaaaccatgtagatcactccacaacccgctatggctccctactgctgcttggaaaaagtgcactctgttctagtattcccagactgcaggagtctcacccctagctgcaactgtcccagctcactctgcacagatccctgctttggctcggtccaccccctctctgtagcctgcccgagttgggctcatttccacctccgcgtggctccacatacagtcccctggcctggactgccctcatcctccgaggatccagaaattctcgagtagtactactagta

SEQ ID NO: 354345 - DNA, 303 bp, Homo Sapiens
tcagtaaattggaggcctctaactggctgactcacatcaaagagattctgacaactgcctgcctagcggatcagagcatcgacagggaaggagcatcaatattgattcacggaacagaaaggaactgattccacactccaggtgacctccttggcccagatcatcttagagccaagaagcaggaccattcgtggttttgaggccctgattgaaaaaaagtggctgcaggctggtcacccatcccaccacgctgtgcacagtcagcctactgtaacaccaaccaaaattgggaggccccgtatc

SEQ ID NO: 354346 - DNA, 341 bp, Homo Sapiens
  misc_feature (281)..(281): n is a, c, g, or t
  misc_feature (286)..(286): n is a, c, g, or t
  misc_feature (292)..(292): n is a, c, g, or t
gtgtacatctcaatgagggagggggcaagggtggaggtttgactgaatggaatgatttatgttcacagaccacataagtgctctggagacccgaacttgtcatccagcaccctgtttgacatcattctccacacattcatggactgccatcacccagccatgcaatgggtaccaagaaatgaccaaaaccaggtccaaatgatcaaagttgatccaccccgtccctggataacacggaaacccttctgtcctactgggagactaagatctacacttggtcnaatcnagcccncaggaagttctccacttccttgacctccaactgggtcgtaatggccccc

SEQ ID NO: 354347 - DNA, 713 bp, Homo Sapiens
  misc_feature (697)..(697): n is a, c, g, or t
ggaagatgataagagctccaaaattatcagtgaagacatgtatcagaggcccaggcaaggcctgaaggcatgtaggagacaggtcgggtctgtgtcctttaatgtggccaactgcaatgccacgtcctgatagaatctccttaggcttaggcctggcagaattgtaaagaaggccaagtctgtcgtcaacttctctctccataccgctcttaaatgctttcatttgatcacatcttcattgattaattgggttgctaataccggcccctgaacctcggggggaaaactactatgatgagggtttgggctgggagaactcacctctctgttcatcatttggcgttctatgggctctgtgtttgtaaaggtggcatcttctggggttaaaaaagattttccagatcttcacatcataggtggtaatatggagaccaaaacaaggcaagggcatggctaaggttgtagcgtgatccagtctccccagatgaattcagagaaccactcatcaacaccagggcaaccctgactgccccaggacccctccaatctgtggtccccacccttctgcctctcttatggaccatctctttccataggtcagtggcctccccacaggtgaagaaaaagtaacgaagggcacgggataatggttactaaagggtagggcgaaaaatcctccgtcaggaactctactcanctggctttgtttttct

SEQ ID NO: 354348 - DNA, 233 bp, Homo Sapiens
  misc_feature (31)..(31): n is a, c, g, or t
  misc_feature (63)..(63): n is a, c, g, or t
  misc_feature (196)..(196): n is a, c, g, or t
acaagtgtgggcctgtacattgtagcatatntcttttgacacagtgggaacgagagcctttangtcaagggatactggttagatgcaggccttccagaagcttttgcagtagcatcatcacagctgccctgaggcagggcaggagcccactcggggtcaggggttcaatgtcgggtcccctccttgcaggacacanttcattgctgttgggggtttcacctgtgactgtgtgt

SEQ ID NO: 354349 - DNA, 250 bp, Homo Sapiens
tggatcctcggccactgtagggaggcaggagggaaagtgcagacaacgatacaccagaaagccccagggacagcgccagtcctcccacgaaaagcctgcccatagcccagggcggtgtaaacacccgtgatcccctcctgtagcgtccacagtccaggtcccacaatgatgattactcctaggatgctgcccaacagtccacaccagtcgtagccactgagaccctggcctctcaaggcaaaaggtgagg

SEQ ID NO: 354350 - DNA, 453 bp, Homo Sapiens
cgagtctagtttttctttaaaaggatagtttatgagtaatctttaaaaccatttccataccatctgtatataaccatttcggtagagaacacactacactgaaccctgctttagagctgtgtgttgagctaaaaatataattttttaaaaattgactagcaaaatctatggccacactgagaagcctttgaaaatggcaaatacttttcatcaccaattgcccaattcatctttcttctgcttcctcagccttgtagcaaaggctacacagcagcccacagtccacagtctttttgggaaaattggcctgccaccttctttaagctcagtttatttttgacttactttctttgctgtagttatgaaccttggggcattaaaatcccatggcaaggagcataagagatgttctcgtagctctgcgttgtgtgaaatgtccatcttagttttgtt

SEQ ID NO: 354351 - DNA, 250 bp, Homo Sapiens
  misc_feature (41)..(41): n is a, c, g, or t
gacagatcagaaatgcatcagaacatggcccaacagaggtntgctggccatgagagatgtaccctgcgtcccagccaagactgggtgcctggtgcagaagctggtggtgggtggctttcagaggggttagaattcaggcccaaaacatctgggtgaggtaagtttctcagcctgtgcgctattggttcagtgcttaatgaacctgaggaagggaagattataggttacttaaaagttacataacactgag

SEQ ID NO: 354352 - DNA, 317 bp, Homo Sapiens
  misc_feature (27)..(27): n is a, c, g, or t
  misc_feature (29)..(29): n is a, c, g, or t
  misc_feature (35)..(35): n is a, c, g, or t
  misc_feature (71)..(71): n is a, c, g, or t
  misc_feature (219)..(219): n is a, c, g, or t
  misc_feature (223)..(223): n is a, c, g, or t
  misc_feature (249)..(249): n is a, c, g, or t
  misc_feature (255)..(255): n is a, c, g, or t
  misc_feature (270)..(270): n is a, c, g, or t
  misc_feature (272)..(272): n is a, c, g, or t
  misc_feature (276)..(276): n is a, c, g, or t
  misc_feature (279)..(279): n is a, c, g, or t
  misc_feature (292)..(292): n is a, c, g, or t
  misc_feature (297)..(297): n is a, c, g, or t
cctgctcaacgtcctcagcattggatntncctacngtgcggttcaggtggtgcccgctggcaacgctgccnctgtccgcaaaggttcttccaccgtctgctccgccgtcctcaccctctgccttgaaaaccagggtctcactggctacaactggtgtggactgttgggcatcatcctacgactaatcttcaatgtgggatctggactctggactctacnggangggatcacgggtttcttctccacccnggctangggccagctttcttngnatgnctncacaaatctctgnggctnctggttcttctttctcttac

SEQ ID NO: 354353 - DNA, 276 bp, Homo Sapiens
  misc_feature (13)..(13): n is a, c, g, or t
  misc_feature (25)..(25): n is a, c, g, or t
  misc_feature (155)..(155): n is a, c, g, or t
  misc_feature (203)..(203): n is a, c, g, or t
agccactgaaaanttggaggaaggngaagccagcctcattatcaagttggaatgaaagcagcctaagagcaaattctgccagacgaacacatttttggacaaacatttacctgaaacaagtccagcggagtccatacagcctgtcctgtgggctncggtgaagcccggcaatctgatctctgcagcccggaccacacctcccntggagctctcatggattcttttacctgctcttttcctgagtcaagagtgtctctgaattcatttagccaaccc

SEQ ID NO: 354354 - DNA, 295 bp, Homo Sapiens
  misc_feature (25)..(25): n is a, c, g, or t
  misc_feature (149)..(149): n is a, c, g, or t
  misc_feature (187)..(195): n is a, c, g, or t
ttccccacacccacatccaagcagntatgcaagacagattagttcagggaatggacccattgcctgaagaaaaagtataggtaatgagaaaacagctggttttgtttattgtaaacctcaatcaccagaaatagcaagcttggcttctntaccatcggcacccctctgaagggttgacatggtggtnnnnnnnnnacataggtcatggggacgtcaaggcatttaagacctagaagggccttaaccatcttccaatacaacagctttcaaactgggtgacgaggatccagaattc

SEQ ID NO: 354355 - DNA, 519 bp, Homo Sapiens
  misc_feature (70)..(70): n is a, c, g, or t
  misc_feature (505)..(505): n is a, c, g, or t
aaatggtcaagattcacagataattccttccttattccttacagattttacaattgtatggttatttctnaatttggttaatttgtttataagtgtagtggacatttaacagaacagatgcacccgattatctgattagaaatgtgtttcaacacacgggtccctttgcgtgtttccaatctctgttttcggatctgggattctccacctgttacatcgttcactggaactttcctacaaaatacagcctcgctgagaggcgcatcgtggaaaaatgaagcagcctgaagaaactctaatattgggaccgagtggagagatggaagagcatcatcagagtggtgccgccgcacatgcgggaggcgtcccagggcagcattgctctttgtacatgagacaggataccactgtcttttatgcattagactggtaaccagataaaataaccttgtaaaacagatcttttatgtaaggaaaaatacaactctcaccttcgcaaacattnctgtcttgttgcgg

SEQ ID NO: 354356 - DNA, 444 bp, Homo Sapiens
  misc_feature (129)..(129): n is a, c, g, or t
  misc_feature (402)..(402): n is a, c, g, or t
  misc_feature (423)..(423): n is a, c, g, or t
tgaggattcagtgagccagaatttatagcacgcagctctgtgtaactaatgttcaaccaacagcagccccttctccccaaccaatcctgtctccagccaccctcaccgccttccccacagtccgtgggnaaaacatggattgaaatatatacctcatcaacaattgatccaggaaccagaccacttcccagagcacccaagtccaatgcggactcccttccctaagagttggatggctgtaagcctttaaaaggcactctaggcactcttgtatgactcagctccaaggcaggaccccatatggtccttattacaagtgaaatatatttgaggccaggcctattgtaaaacctcctggcctgctaccccaagtgtcagtatgcaaatggccaagactcgttnttttgcattatggggtccatntagataagtcaaaagacatat

SEQ ID NO: 354357 - DNA, 256 bp, Homo Sapiens
  misc_feature (58)..(58): n is a, c, g, or t
  misc_feature (131)..(131): n is a, c, g, or t
  misc_feature (179)..(179): n is a, c, g, or t
  misc_feature (190)..(190): n is a, c, g, or t
  misc_feature (220)..(220): n is a, c, g, or t
  misc_feature (223)..(223): n is a, c, g, or t
  misc_feature (239)..(239): n is a, c, g, or t
tcgatttgtaaactctaaagtgctgtccacgtgctttggaggaaaaagctttcctcangactggcctcgtgagctggtcaagcaaacagtgggactggggctgtcttgattgattgctgactttgagtcancctgggcgggtgacgtctctattggataaatgtgaaaaccaaggctcncaatggttaanccacatccacaaaggtgcagggcctgccangangcaaaaccacaactanaatggagcagctctgtc

SEQ ID NO: 354358 - DNA, 416 bp, Homo Sapiens
  misc_feature (61)..(61): n is a, c, g, or t
  misc_feature (160)..(160): n is a, c, g, or t
  misc_feature (229)..(229): n is a, c, g, or t
  misc_feature (298)..(298): n is a, c, g, or t
  misc_feature (340)..(341): n is a, c, g, or t
  misc_feature (378)..(378): n is a, c, g, or t
  misc_feature (391)..(391): n is a, c, g, or t
ctcctagagttgagtcctaatgggggcggcatccttgtacggaaacacgaaaggttaatancaataacaatagaaacctcgtgtttgtgtatggagagccttacgcttcccaaatactttcccacagatgacctcatttaatctttgttttgtcacaganatattttattcccatctaaaaaagtaggacacccgggaccacagtcaaaaaggtattaaactctgtgtnggaatgatggtttaagctacttcttgtgacttctattccaattttccccatgtcaccacggctgattanagaataattatgataatacaactgagaataatataagatgtnnagacttaagtcccatgtgccaggcactaatcacccantttgcaggtgaanaaactgtgcataaaatggttgggtt

SEQ ID NO: 354359 - DNA, 210 bp, Homo Sapiens
ggtgagctgattccaaatgggaaaggacagatatgtgcagcattctgtaaactccaaaggctgctgcttatcagtgtatggtcttgggatgagtcagcaagccaggaacgaacaagcttgctaatgggcactcccgactgaagaatggatggctgagcaaaatccttatcatggaatcgtattgcacattaaaaggagggatttctggag

SEQ ID NO: 354360 - DNA, 234 bp, Homo Sapiens
gtatgaaaacataacttctccccacaccctgaacttataacagcaatgctttcaacaaattgggcaacgcttttgtggttcccactgggcgagggttgaagcttacaaaacacaaaggcatttttgaacatctggtctttgaggtataatttctattcaccaaattcaccacttcaagatggatggttctgtgaattctgatgaatgtaaatggctgtgaccagacatagaact

SEQ ID NO: 354361 - DNA, 329 bp, Homo Sapiens
  misc_feature (64)..(64): n is a, c, g, or t
  misc_feature (261)..(261): n is a, c, g, or t
aacagaggcatgttccttccatgccaatgtgtggaaagggagtgacgaacaaaggcagtggatntggtcacgggagtatgggttggtgtgtgtcaccctgcatggggaatgatactgggctgctacaggagctcatggattccagatcagcaaagggaatgccatttaggaggccttgggagatgctgatggggttggaggggtggcaaaagccagaaaagatgggactggtaggaaggacatggcttcctgggcctcatntctggcgctgtctctgaagcttgagcggaagagtccagctgtggtcagtggaagtagcagggcagggg

SEQ ID NO: 354362 - DNA, 1325 bp, Homo Sapiens
  misc_feature (599)..(599): n is a, c, g, or t
tgagatggaatcttgtccgtctccactctcatcccaggcaatcatggtcatttccacagcctcaaccactgtctacctgggatgcgtcccaagcccaagtctccagcccaaacctgccttcctagccccagacccatctgtcctggcacacgttgctccctgggtcccaagcaacctcagccaatgagtccaacgtcaacttcctgtccttgcctgacactgtcagccctgagatcagacttgaccattcacctccagtacctgataggtccgtcagtcctttggaacatatcccatgaacattccccaaaccaggcaccggactccacacatcaacaccgtcatgtgagtcaccagcatccctggcagggacccctgtcccagcctccaaatcatctccttcctgtcccttgagttctgtgtcacattccagaggccacaagaagaaaaatgacaaccttactgaaattaaaagaattgagaagacatttccctatggtccaaagtctttccaactaagaaacacgtatcaagatccgggcctgccaaccctgtggttaaatgtttcctgaaataattaaagcccagggcaacacagncccgcactccacaagtactcccagcacagtaagacttgcttttctggaggggcttgaaatgtccagtgtgtgccctgcccctctctgtcgtagctaacaggaatgtgcttcatgtcttcttcctgctcaaaggaccatacaccaacctgtgcaggcagcactttcggcccggggggggatgcgagaacttccccaccatttcccacttacgcactgcattcctcaggagcctccctcacaaattacaagagcgccacggcagacacacgacgttccagtgggtggccatgtcttcatgtcagcttgaaagatcatcaccagggaaatatctatatctcggcagagagagcttcagcctgtgtagtccagctgtgctcaaatggaaatccagaaacccagatgttggtccaaacaccctgtctcggacagccagctctgcaggtccccagcgtgggagtgaactgggtgggccacctaccctgcctgccaacatccctgcttcctggaatcctggaccctgagaaccagggggatgtggtggggaacaggcaagtcttgtgcagaaagccaagatgccacccaaatccaatctgcagtctaggtgggtgatattctggtctgcaccacaccagtgcatgaggggatggaggatggagtctagacaagccaaatgtaaaaagatattgcccaagtattttgtgctttccctgtgttacaatgctatgc

SEQ ID NO: 354363 - DNA, 297 bp, Homo Sapiens
  misc_feature (75)..(75): n is a, c, g, or t
cctcccactcgtgccacatccagacagcaccgggccctgctgacattctgctctctgtgtcccttacatttgtcncctgatttcgactctcactgcaaccggcactcatctgtacctgggaagggccacctcgcctctgccggtaacccaacaaggccccagctggcgtcccagcttccagaaaccatctaccacaggtctgtgagtagctttttaaacaataatgtgaatgtgccaagaccctactttaaaacttccaatggctcccttttgcaaataggttttgcaaacctttca

SEQ ID NO: 354364 - DNA, 237 bp, Homo Sapiens
  misc_feature (60)..(60): n is a, c, g, or t
  misc_feature (95)..(95): n is a, c, g, or t
  misc_feature (117)..(117): n is a, c, g, or t
  misc_feature (126)..(126): n is a, c, g, or t
  misc_feature (154)..(154): n is a, c, g, or t
gtggatcctcctgatcctttatccccttggcaggatctgggttcaaatgtcttgattttncaacagtagtgatcgcgcttttttcccaggctggntgacctgtggctgtctttgggnaagttattnctgttgagtagtggtgctgcaatctttntatccattacttttcatctgtggcttctcctttaaccttttggggtcatacagcacaaaatctaatttggacacgtggcagcc

SEQ ID NO: 354365 - DNA, 603 bp, Homo Sapiens
  misc_feature (36)..(36): n is a, c, g, or t
  misc_feature (72)..(72): n is a, c, g, or t
  misc_feature (76)..(76): n is a, c, g, or t
  misc_feature (83)..(83): n is a, c, g, or t
  misc_feature (105)..(105): n is a, c, g, or t
  misc_feature (109)..(109): n is a, c, g, or t
  misc_feature (112)..(113): n is a, c, g, or t
  misc_feature (125)..(125): n is a, c, g, or t
  misc_feature (137)..(137): n is a, c, g, or t
  misc_feature (158)..(158): n is a, c, g, or t
  misc_feature (162)..(163): n is a, c, g, or t
  misc_feature (166)..(166): n is a, c, g, or t
  misc_feature (173)..(173): n is a, c, g, or t
  misc_feature (195)..(195): n is a, c, g, or t
  misc_feature (200)..(200): n is a, c, g, or t
  misc_feature (211)..(211): n is a, c, g, or t
  misc_feature (218)..(218): n is a, c, g, or t
  misc_feature (221)..(223): n is a, c, g, or t
  misc_feature (239)..(239): n is a, c, g, or t
  misc_feature (249)..(249): n is a, c, g, or t
  misc_feature (258)..(258): n is a, c, g, or t
  misc_feature (337)..(337): n is a, c, g, or t
  misc_feature (374)..(374): n is a, c, g, or t
  misc_feature (453)..(453): n is a, c, g, or t
  misc_feature (455)..(455): n is a, c, g, or t
  misc_feature (500)..(500): n is a, c, g, or t
  misc_feature (504)..(504): n is a, c, g, or t
aaatgggcaatgggattgtgattgggaggtataagnagcttagagcttggtggtgcctgccctgcccctttncagntaagccntgaaacttgaaaaccattatgntaanacnncaattatatagntatagggatccntcaagtaaatacaaagttttnccanngtngaggcangtttttaaacattgttttattngaccntaaagaagagnccgcaanggnnnggtttctagagtctgnatttttcatngaaggaaantgaagatcagggagattagtaccatgatcaagagcacacaggtaatgcataaggcagcagggattggaatgtgacttantttagtgctcatttcactgggtcacaggcgtatatanatgaaataagagccttggcttcttggaactggtcagactctttctggattgttttgttcagtgatgggtggtaaattananaatgttgagagaggcgtgactgggatgtatccctgtgcagtacanatanaggtgaaagattttaaaatggatatctctttgagaggtaattcattggtgtcagctggtttcaataaaggtgctatctaaagaaaaagtgctatctaca

SEQ ID NO: 354366 - DNA, 349 bp, Homo Sapiens
  misc_feature (11)..(11): n is a, c, g, or t
  misc_feature (50)..(50): n is a, c, g, or t
  misc_feature (286)..(286): n is a, c, g, or t
  misc_feature (300)..(300): n is a, c, g, or t
ttcctcatggnctcagtcctggtcctcagtagctctcgtttctgtgtggnccttgcatggaatggaactgtgcctagcattccttccctttctgatcttcagttgcatctacgtgacagtgggggttctcagttctcctgcatatggaggtagtgtctgtgtgtgctctgtaaggcacgccagggatttccacagaacaaaaaacaaaaggttgcaaaggagaccaggatatacgaaacaaaatgactgagtatttcagagagagcgactgagttaattcacctantcattcattgaagnaaattaatggaacacctactttgtgccacatgctgtggtaggtgcaggg

SEQ ID NO: 354367 - DNA, 306 bp, Homo Sapiens
  misc_feature (217)..(217): n is a, c, g, or t
  misc_feature (225)..(225): n is a, c, g, or t
gaattctggatcctcggggggggtacgaggaagattccaggaggaggtgaatctcagcagcatctctgagctggagcaagagcccacttccacaggccaggagtccctttcccagcccggcctgtcttgactcaggggtctgcaggctgtgctcacggctcctccaacatggccctctcctggctcctctgcatgaaaaagaacccacagggctgtngctggaanccttctgaggtcagaaactgagcatccttgcccctccacccttcctggcccaggaatgcatgcacacggatggatccagaa

SEQ ID NO: 354368 - DNA, 300 bp, Homo Sapiens
tactactactaactcgagaattctggatcctcggcccgggccgagtccacatcattcctgtctcacacccagcaggtatgggccacctggtcccctgggaaaccaaaaaacggccttcaacctcccaaactctagaattcctcaagggcatcaaattcaccttccaccctgggctgaaaaaactgacctgggatccttctgaggtgcaaccatgccaggcctaaaccagcggttctcaaacctgaggatccaaattcctcgattatatatactccacccggggattcccgggacgggtcc

SEQ ID NO: 354369 - DNA, 351 bp, Homo Sapiens
  misc_feature (47)..(99): n is a, c, g, or t
ccggggttggataataattataaattggaggaatttggatcttccannnnnnnnnnnnnnnnnnnnnnnnnnnnnnnnnnnnnnnnnnnnnnnnnnnnngtgacagaccaagatacaggcgtacttacacttagcgttgtaggtatggaggcccttgctgtgggtgtgggaaaacggggttttctatgacaacagtgcaatagctcaagtgtatatagttctgttcccaaaaagtccctaagtcgtttccaaaccatagcttcagcctcactttctttaatgctcagggctccattccttcttcttttctttgtctccgattcatgtcccagaggatccagaattctcgag

SEQ ID NO: 354370 - DNA, 248 bp, Homo Sapiens
gggtactaggctcgagtatggactctatggtgggggaaacagagaccccctgacagtctttaaagaggggagagatggatcaggcctgtaacataccctcagggaggttataaagcagatacagaggtacagacacatctcctgtgcttatatatgtcatggggcctttgcacatacttggacccttgaatttcattcctgtgcttccccacagcacttcccatggttcactgcacgcagctctattc

SEQ ID NO: 354371 - DNA, 883 bp, Homo Sapiens
atcctcggtgggtaagagggacagacagcaaattccttattgacatagcttagcctccattcactggtagctgaagaatagagttcaaattcttgctcaggaaggaaggaatgccagccatcttctatcacttcaaacataggacggtaaaagaaagggtacatcagagtgatggagcccagagtacacaatgcctcaatggaactggctatattcaagcattcctccattccaggaatatccaactgaataattcgaaaatctttacattttatggtgatggtacccagtgatcctacaaatcgcttgtccatggcgtcgatgtttgaatggaggagccacagctcctccgtattgtcctgccgggaggacaggatcaagtggtggcccgtcaggcacagggtgccctcgacagccgggtagaaaggccggtgcagcaccacattgtccacccgcggggtcttaatcagctccgcaaactccatgctccccccgcggccggagccagggaaccgagcccggtaggtgcgaggcggttaccccgccgcagggaagtagcggaaacacccggcgcggggctggcccgtggggcggggcggaccgggcggtgaggctgggcccgccccaggctgggtgggcgcggcgaggcctacagccgccggcaccggccgcggggagacaggggctggggctggacgaggcccaagcgcctctcccgcaccgcgcggttcaccaggcctaggactcggccacagagaacccctctccacaggcccaaggaccgccgctgccgttgggctccgggtcccgcgttggcaagcggagggcagtaggagaaagccgcctcagaatccgccctcgtgccgaattcgccacccaggcc

SEQ ID NO: 354372 - DNA, 1584 bp, Homo Sapiens
  misc_feature (257)..(320): n is a, c, g, or t
ttgatgtttgaatggaggagccacagctcctccgtattgtcctgccgggaggacaggatcaaggtggtggccctgtcaggcacagtgttgccctcgacagccgggtagaaaggccggtgcagcaccacattgtccacccgcggggtcttaatcagctccgcaaactccatgctccccccgcggcctggagccagtggaacctgagcccggtaggtgctgaggcggttaccccgccgcagggaagtagcggaaacacnnnnnnnnnnnnnnnnnnnnnnnnnnnnnnnnnnnnnnnnnnnnnnnnnnnnnnnnnnnnnnnnccccaggctgggtgggcgctggcgaggcctacagccgcctggcacctggccgcggggagacaggggctggggctggacgatggcccaagcgcctctcccgcaccgcgcggttcaccatggcctaggactcggcccacagagaacccctctccacaggcccaaggaccgccgctgccgttgggctccgggtcccgcgttggcaagcggagggcagtaaggagaaagccgcctcagaatccgcttccacgccctggccgctagggactccttagcggaagtggctactcgctgctggagcccacaacaaactccgggcggaaggccagcaggtctcgaaactcggaagacgcggaagtcgcagccggaagttggtcctcgctaggtcctctggaaatgcctccggaaacacagccagaccagaagatgtgtgttcctacgagaaaaaaagcttgtctttgccttcacgccctcccgctgcctttcttaaccacctacaaatattccttatcagaagaggtccgggaagagggaggaggtccctgtcttgccttcctccgcttgagtagtatcccctccagaagctcttcagagcgtggggctgctgtaaattgtgataattgttatgcattagccctgaagacatggcaagtaggggatggaggcggtgactgtgaccttacggaatcctccaggggtcagggagggacacagggccactccacaggctctccgagagcgccgcgccacgaggtgtaacctggagcaagaaagaggaaaaacaggaatacctgtgagaggaacccaagtacatgcagtgcacagaagagcaagtcacttgacttgctggcggccaccccgttaatctgcagcagagcctggacttcagtctgcatctgtgaaacccagcgcatgggtgcgttggtcaccaccgcacagcctccccgtcagacacccacgtttcgccaaaaatttattcaaataattactccttggcttgttcctttcccaccgcccacttctgacatttttattcaaaagtaggaaatagaagagaaatatgtctgagtgctggtctgctgtgacttcatggaccttttaaatcctcaacatctagtacctaagcacagcgagttggacaaactctcacagtattcacaaagtaaattgccacaacctcatcagctcatccaacacttgtccatgcttttgattttgtccttcttaaaatgtacccttcttaaaataaaccactttatagacttgt

SEQ ID NO: 354373 - DNA, 297 bp, Homo Sapiens
  misc_feature (48)..(49): n is a, c, g, or t
  misc_feature (107)..(107): n is a, c, g, or t
  misc_feature (111)..(112): n is a, c, g, or t
  misc_feature (117)..(117): n is a, c, g, or t
  misc_feature (125)..(125): n is a, c, g, or t
  misc_feature (128)..(128): n is a, c, g, or t
  misc_feature (208)..(208): n is a, c, g, or t
  misc_feature (240)..(240): n is a, c, g, or t
ggtgagggatgtgggactgccagactgccagccagtgccctggagatnntgcatttcatatgcgtacacatttagtagtagtgtgacccctgggccagtcactgatncttnntgagnttcggttnccncatctgtaaaatggggatgatgatacttaccttaaagggctgccatgaggtcgaaagacaaactatgacaaacagccagnctcgcgcccagcccagcgtggatgcaagctanctggtggctgctcggatgatgatgatgacgatgacaacgatgacgtagcaccccatt

SEQ ID NO: 354374 - DNA, 244 bp, Homo Sapiens
  misc_feature (12)..(12): n is a, c, g, or t
  misc_feature (59)..(60): n is a, c, g, or t
  misc_feature (72)..(72): n is a, c, g, or t
acgtatgaggcncctcgggtggaaaaaatctgctgaattaaactgtaacactttgaaannttcacagagcanctttatcaatgtagtgtagttcataatagagggattcctaaaaagaagaatgccagtttatggagaattcagcccatccattgaggcttcgaaagtggaaattcactgattatatggggaggacggggaatgcagagccaaacacagaaagaaaaagagttcccatttcacc

SEQ ID NO: 354375 - DNA, 2853 bp, Homo Sapiens
  misc_feature (480)..(480): n is a, c, g, or t
  misc_feature (522)..(524): n is a, c, g, or t
  misc_feature (552)..(553): n is a, c, g, or t
  misc_feature (565)..(565): n is a, c, g, or t
  misc_feature (568)..(568): n is a, c, g, or t
  misc_feature (571)..(571): n is a, c, g, or t
  misc_feature (576)..(580): n is a, c, g, or t
  misc_feature (584)..(584): n is a, c, g, or t
  misc_feature (586)..(586): n is a, c, g, or t
  misc_feature (590)..(590): n is a, c, g, or t
  misc_feature (594)..(594): n is a, c, g, or t
  misc_feature (599)..(599): n is a, c, g, or t
  misc_feature (605)..(607): n is a, c, g, or t
  misc_feature (614)..(614): n is a, c, g, or t
actaaataattttaatacagacgtgtcggagaatgccattttggtcaatgacgaactacatatatgatggtggtcagagcaacacaccacgccatgtggtctaggtgtgtagtaggctatgcatctagatttgcatacattgatgtgtgcctagcaatgaaattgcccaatgatacatttctcagaatgtatcctgacatgactgtattttaaaacagttgaaattttacaattttgaaggtggcatatacaggaatattcgtagcaccatagtttataataacaaaaaattaggaaacacataattgctaaattcataaatgggaaaacaaaccaatctaaatgctcattattcagaggacctgaataaattttggtatagtcaaacgacagaataatcatcagggatcattacatacatcagctggagttaaacagatcaacatagctgaatctcacaatgcagtgcaaaggcaagtnacagaaaaatgtattcagtgtgatatttctataaattttaannncgtgtaaggatatattcagatgtagaannattaacccaccnccnagngcaannnnncgtntngttntggnttttngttttnnntggttgntatggagagatcctcagagggcttcaactatgtagtgttttattttatggtattgttgttttgtataaatacaacaatattttgtatagttaatattttactgtaattttagaaagaaatggaaaggagtgaaacagacggagaaaatttgaagtatttataagctcttctcattttgcaaaacaaaatgcgtatttaatggcaaaattagtacttgcgcgagacagctgaaaggggaacaagggtgaaagaatagagcagctccaggttagtaaacagaaagccttatcttagagcaggcttggttgcagggctgctcctccagcttgccagggattgtaggaggtcacgtcactgtggctgcgacctaaggccaggaggctggtgcaccagccagtggttgggaggtagtgggaaacatggctatcctgtctcccccaggctgtctcacagcctgtagctgatgaccgtgaggaaatatcacactgaagaggtaggtcactgtaaacatccaatccaactctaccagagctcagctttagctggcgctgctgctgcctgcattgtacactgcagatattagtaagtgcatctcattggaccccaaatcacatccagaatactagagtgaggcagctgcaacatgacacagaaaaatggaattaggatttaggggaattggatttcagtgcctattgagacacgatctaggaagcctaccactttggctgctcactgtatgcatacaaccttattaaaatttatagaaaacaagaatagtaacagcatgctcctaacacaatgtgactattctctatgcaaacagaacactctgttcctctctgaaaagtctcataaaatcatcatatccatctttgagtgagattgtttaatcacaatctcagcttcacatccccgtcagtttgggtcctccaagagccgatgccaagactgacttatacatgaaagagatttattggtggaaatgcctggcaaggataaaggatcttgggaacaggaggaggcagagcatcttcagaccccattgcaagtctgagtaagtctggaccaggttgatgagaattcctgagcaaagggtgccaggttgagcagtaatggttcaagaaaagttgaaccctgccactctcagccattggctgggtatactccgtagaaatgcagtgttagtgtgacagctatgatggatctggaggagcagtagctgaaggccgtcatcaactatgcttcccacagcaggttcttttgaagtagatctgggtggtacacctccatggccaccacaatcttatatcctaaagatcagtaataaatgtaaccaatgtgaacacttggggaaaagaaggaaaaaacagaaattggtatatacaaatacataaaacatcatgaaaaaccaggccgctgcaattgttctcaagtctgcaactgatcctgaggccacagttggccttcttccaatttgaacctcagctgatcgttgttctttatttgttggggtgaccattcatttctgagcgcttgatggtttttcctgtatggcgttgctatagttttccactgatttctccctttggacaatgaaatagaaagagcatcttcaaaggatgtaatggatttcagacatattcctccttgtccccatgtgtggagcaaatctctgttctttgatattaggggtcagtcttctcagccaggacactaaccttcccctttgcctattggcttagtggtgtaatgaactccaaatgtccaggtggcagtctcaactctccatgcaataaaccatcgtattccctggtagagacattcttcccttgggaactaaggtctctaaacttccagagctcaaagttgcagtggtaagaagcagaactttattgggtgtggatactacgtgcaatagtaaatgaagccagtcccactcttatcccttggttcccaaacccaagtattctggccatacaagaatcagctcctattgaatgtgcttcataatagacacagtactttgtaaaagagcactccatcctcacatgtcatgagatctcaacaggctcagttgcataaccttcattgggccattccactgttctatcaatcaggcatgctgcttctggctggtaggacctatgggaagatccgtgaatcccatgggcaccgagtgcattgcttcaggtctgttgcattttaatctgtcgcgttttaatcagtttgtaagaag

SEQ ID NO: 354376 - DNA, 287 bp, Homo Sapiens
  misc_feature (22)..(22): n is a, c, g, or t
  misc_feature (39)..(39): n is a, c, g, or t
  misc_feature (85)..(85): n is a, c, g, or t
  misc_feature (130)..(130): n is a, c, g, or t
  misc_feature (147)..(147): n is a, c, g, or t
  misc_feature (205)..(205): n is a, c, g, or t
  misc_feature (262)..(262): n is a, c, g, or t
gaagcctggcaccagaaagganacgcactccaatgcacnagacatacattgtcacccacacaggcccagccatttcccttcctgnttcatccaaccactagaagtgcggggatagttatggcagagacanagaaacccactcagagnacacacagaagccttagagctaagcatgcatggagtcacatcccagccttctggcttntgctgtgcacataatttgtatcctaattttaatgcagtcaatgctgtagtagactantgaaaggtacacagataaatgggac

SEQ ID NO: 354377 - DNA, 304 bp, Homo Sapiens
  misc_feature (123)..(123): n is a, c, g, or t
  misc_feature (127)..(127): n is a, c, g, or t
  misc_feature (161)..(161): n is a, c, g, or t
  misc_feature (168)..(168): n is a, c, g, or t
  misc_feature (253)..(253): n is a, c, g, or t
  misc_feature (261)..(261): n is a, c, g, or t
  misc_feature (284)..(284): n is a, c, g, or t
tatttagacggaaggaaaggagcatcatggtgatatggatgttttagctcacctacccatgagtgaaagcatgtggccgggcaaaccgtaattatcaacctacctttcttccaagagggtggngagnaaacaatatgtagctctctgtgaaatggatactntaatttnttcctagaaacgaatgatgagcacagtccatgctctaaatcagtgaccaagataaaacagaaattgcttcctcatttaaactaanaaaacggnaaaatgggttcaaaacccgggtnattttttaaaccacttgtct

SEQ ID NO: 354378 - DNA, 292 bp, Homo Sapiens
  misc_feature (18)..(18): n is a, c, g, or t
  misc_feature (40)..(40): n is a, c, g, or t
  misc_feature (50)..(50): n is a, c, g, or t
  misc_feature (52)..(52): n is a, c, g, or t
  misc_feature (82)..(82): n is a, c, g, or t
  misc_feature (96)..(96): n is a, c, g, or t
  misc_feature (102)..(102): n is a, c, g, or t
  misc_feature (106)..(106): n is a, c, g, or t
  misc_feature (115)..(115): n is a, c, g, or t
  misc_feature (121)..(121): n is a, c, g, or t
  misc_feature (128)..(128): n is a, c, g, or t
  misc_feature (161)..(161): n is a, c, g, or t
  misc_feature (215)..(215): n is a, c, g, or t
  misc_feature (223)..(223): n is a, c, g, or t
  misc_feature (227)..(227): n is a, c, g, or t
tgataggaagcaggcatncccaagggtgggacacacaganaccgacaaananacggagtaagtgatgagttccagaagcacnaggaaggcgagcgntgggtnccancatatggcncaggcnggggtangcgtggagacgaggttcaagcagaaccaggcangaaacagccagcatatgacattgtggcacagcatcaatgtccttcagaagagantgccgagntctnacaagggtgtgcagcagggaggggaaaccccggcagcaaacaggaggcttccaggaaggggggag

SEQ ID NO: 354379 - DNA, 427 bp, Homo Sapiens
  misc_feature (40)..(40): n is a, c, g, or t
  misc_feature (316)..(316): n is a, c, g, or t
  misc_feature (349)..(349): n is a, c, g, or t
  misc_feature (355)..(355): n is a, c, g, or t
  misc_feature (365)..(365): n is a, c, g, or t
ctgtggacccagctgatgctgcatgagcatctccttgaanttctggaccagggatgatgctgctcggatggaagctgcccaaagagggtgggtgcaggggtgcccccctgtggagtatttgtccctacccttaaaaggctttcgctgaagtaacccaggagggaggaagtggagctgaattcctaggaaacatttactccaagttgtggtttccaagccctctggactgtagcccagttcaagggagcaaaagactttgtggcccactgaagtccacttcgattctaacttatgccagttggaagagaattttggnaagtatccaaagaggtttaataggagaagtagnaaactnaatcaaaagnaaattccagcaaattaactcaagggccaacaaattcaaccaggaacctccctcaaaaagtaa

SEQ ID NO: 354380 - DNA, 436 bp, Homo Sapiens
  misc_feature (49)..(49): n is a, c, g, or t
gatttaacttggtgtaaattgggtatagtttactgactttctaactttntttctgggctcaccttgacactcctaggctgtactctctaaccctgggggctggcaccagtcctgtggtttaattctctggcccctcaaagtcaagtaccagctgtcctaggggtgctggggtgctctctggctgctagcaaaagcactccattggggggccaccagctaaagcactcctttggggacagcagaggctgctggtggtgcactccctggggtggtaaggactgctagcgtactgtgtcaggaggctgttggcaaaagtcctccagtagagtggggggggccatcagtaaaagcacggacagcagttggtcttcagaggaacaacagcaggagcagtggagggttgtgctaattgtgctcaataccatttgcaaagaag

SEQ ID NO: 354381 - DNA, 481 bp, Homo Sapiens
  misc_feature (28)..(28): n is a, c, g, or t
  misc_feature (33)..(33): n is a, c, g, or t
  misc_feature (43)..(43): n is a, c, g, or t
  misc_feature (58)..(58): n is a, c, g, or t
  misc_feature (70)..(70): n is a, c, g, or t
  misc_feature (77)..(77): n is a, c, g, or t
ttgtgggaagactgtcagatttgaagtntagtnccgtgatgcntttcctttgccaacntattcatttatntgaccantctttttcctcgtcaagtgacctgccatcatcacaagaaaaggccccgaaaatatgagtgagactcaggtcctgccaggacccagatatgctcatttttggcctgcagatgaaaaaaacagagctccctgaaatgagggttggtggatgatggaaactcttggctttggaagatctgtgggtctctgagaagatgggtagagcttgctcaatggtgtaagaattcgtagaaagaatctgctacacttctagaatgccaaattgctgagtgtgggctgggctttcttctatccactctttttaaggctacggaggccggcaaggagaactacttcctcttggtactgaaggttacctgtttgatggaaggagcttaaggttacctgttgcttggaagcatgtttc

SEQ ID NO: 354382 - DNA, 1202 bp, Homo Sapiens
  misc_feature (11)..(11): n is a, c, g, or t
  misc_feature (29)..(29): n is a, c, g, or t
  misc_feature (143)..(143): n is a, c, g, or t
  misc_feature (189)..(189): n is a, c, g, or t
  misc_feature (252)..(252): n is a, c, g, or t
  misc_feature (258)..(258): n is a, c, g, or t
  misc_feature (268)..(268): n is a, c, g, or t
  misc_feature (270)..(270): n is a, c, g, or t
ccaaggcccgncggtccagggtggggccnagggaacccaaggtagagggagtcagcggtccgcacggagagagctccagccctaggccccactgtgcagaccgaattagaaggaaaagagtccttcgtcctacctgccacacnccttacatccccccactgaacttgggagtggaaccgtgttctaaanacgaggttactctcggtttgcaatggattacaaggcgccgggctttccagagtcagcaggatnaagaantcattctgtntnggactcccccatcccccggtaacggtcgctggtgagtttaaatgagcaggggctggccgggccggagccgctacagggggggcctgaggcactgcagaaagtgggcctgagcctcgaggatgacggtgctgcaggaacccgtccaggctgctatatggcaagcactaaaccactatgcttaccgagatgcggttttcctcgcagaacgcctttatgcagaagtacactcagaagaagccttgtttttactggcaacctgttattaccgctcaggaaaggcatataaagcatatagactcttgaaaggacacagttgtactacaccgcaatgcaaatacctgcttgcaaaatgttgtgttgatctcagcaagcttgcagaaggggaacaaatcttatctggtggagtgtttaataagcagaaaagccatgatgatattgttactgagtttggtgattcagcttgctttactctttcattgttgggacatgtatattgcaagacagatcggcttgccaaaggatcagaatgttaccaaaagagccttagtttaaatcctttcctctggtctcccttttgaatcattatgtgaaactaggtgaaaaagccagatcctgaaccaaaacatttaaatttcacatctttacagaactttagcaactgtctgcccaaactcttgccacaacaccaagtacctaattcataggtgtattctcacagaacagtcctggaacaacaggttctttacgggaaaaacaacgccaaggaacacaattggactctaaaccagcattggaattttagcaatcccttccagttccaaaggtacttccttgtaagtaccggattccttcatgttcttatatggattacaggtggtaattttcaccttgaaaactggtcccccggggaaccggacattccacactattta

SEQ ID NO: 354383 - DNA, 516 bp, Homo Sapiens
agctccccgcaggaggaaggcggcagccttcctggctagtgcagtcccagctcgagtgggccctgatcccaggcctgaggcctagggtggggaggcaggaacacccctcttctccggtagaggcgaggatggtggtgctgttccctggtgggtttggtacttgtgcaggcttggggcttctccagggtgttgtgctggtgtgggcccagaagagagaccagaggctgggtctaagggcctgaggctgttttcatctaagaaattctctgtatgggggattgggtctgcttgagacctgtccccaggaagaatctcctggggtcttctgtcttgttctggcacaggtggaaatattctggctgtctggcaaccgcagatgaggatttcctgttgggggctataagcagggtctccgtagtacaaagagagaggagctgtagtcgtcaaatactctagaatgattcagtctaaaatctccctcctccttcattctccccaaataaaaacaaacaaaat

SEQ ID NO: 354384 - DNA, 256 bp, Homo Sapiens
tcaaaaaatgttagtggtggtaattatcatttcattcgtgtcttaaatcataatttgctgtctacttgtctatgcccccaccatttatccatccattcagaaattcaataaaatctttactgagaaattagactgcgtgccaggccctgtggtcagatacaatttggaatgagaggcacataccttaaaacacattaaaaagaaaggagattggtgctgggaaggaaggacgtacaggttaccctgaatgcacaaa

SEQ ID NO: 354385 - DNA, 1155 bp, Homo Sapiens
ttatgtggggttccgcggggtacaggttgggccgcgtctgcctatcccccctatcttatatatgcaccgcgtaaaagccgcgcggtcgggggtttttttgtagcgatagaggagggttattatagccctgtttgtttggggaaggcccgtcccgggaggcgcccccccgggccaccgaggtgtgtcggggcagtgcctcctggcagatccgtgcgcccagacgggttcacggcgtttacaattccagcggctagggggccttttatctggccgcaggggcgccacccagggctattgcgggcggtgggccctatggtttttgtggcgtcccagcccccaaccccagaatttgggaggcataaccacgcctgggtggagccgccccatggggccctggtcgtacatgggcactcggggcagccagaacctgcaggtccgggggatgtcctgggccagtgtcgggcttgctggtggccacagccagggaaatgttcctgcccagcagctgctgcagcttctgcagaagagcctctcccagctgggaagacgagtcgttgaccccgatgtcaggccctgtgagggaccagtagtatgaagccacgtggacgctctcctgggcagtgtccagcagctgcagccaggcctggcccagaggctgggcagaggggctgccggctgcagatggcaggtcctgggggatgctttccacaaggacaagctggcaggagtccctctgctgcctggcctctgcttccaggggctcccaagctgggctggagccatgctcccaggacctgggcacgtccttgggctgcacctggccccaggtgggaggacggggcacttgccacaggaggcagataagagccacggagcccagccacagcacagccagcgctcccaggacctgcaacgtgccagcctgtctgtcccacgggcggcggggcggcatggagcatggccatgtgggggccactgctgctttccaaagaggcttcagcatctctgggggtcctgccttggtgtctatcctgattccagccgcagactgcaggccctcagctcacggggcaggctcggtgctgcctgtgctccacaccaacctcctcttctctgcagcatccggagaattccgggccggtaccattggccgga

SEQ ID NO: 354386 - DNA, 438 bp, Homo Sapiens
  misc_feature (84)..(84): n is a, c, g, or t
  misc_feature (107)..(107): n is a, c, g, or t
  misc_feature (294)..(294): n is a, c, g, or t
  misc_feature (323)..(323): n is a, c, g, or t
agaaacctaagagggctgcattgattccatgtggccctgggtctatggagcagtacatgagctcccagtgctctaaggctcttnagccctaggctttgaagggagtnatttctcagtattcttaaacctctttctgatgacacttgtacctgtaaggggtctagagagaaagagtagtagactcctactttactacaattcaggatgcagggcatgagaggattccctctctcctccaagggaaagaagctttttggcgtgcacacatccctgagaagcaaagtgtctttttcnttcagtcagatacatagggaccgttttcntgccccatgggcccggaagccaaaggcctttggcttttcatgattcaacggtctagggaaaacatgcaaaatttttcccatggtctgttcccaaaacttttgccccccggaccag

SEQ ID NO: 354387 - DNA, 1747 bp, Homo Sapiens
ggtaccggtccggaattcccgggattaggagacaagacgcgaggccggcagcgcccacccggtcgcaatggagcttcccctagggcggtgcgatgattcccgcacctgggacgatgactcggacccagagtcagagacagacccagacgcgcaggccaaggcctacgtggcccgcgttctcagtccgccaaaatccgggctggcgttctcgcgcccctcgcagctatccacacccgccgcgtccccgagcgcttcggagcctcgggccgcgtccagggtttcggccgtaagtgagccgggccttctgagccttcccccggagctgctgctcgagatctgctcctacctggacgcccgcctcgtgctccacgtcctgtcgcgggtgtgccacgcgctccgcgacctcgtgtctgaccatgtcacctggaggctacgcgcgctacgccgcgtacgcgcgccctacccagtggtggaagagaagaactttgactggccggcagcctgcattgcgctggagcagcacctgtcccgctgggcagaggatgggcgctgggtcgaatacttctgcctggccgaaggccacgtggcttccgttgactcagtgctgctgctccagggtgggtcactctgtctgtcgggctcccgagatcgcaacgtcaacttgtgggacctgcggcagctggggacggagtccaaccaggttctgatcaagaccttaggcactaagcgaaatagtacccatgagggctgggtgtggtcactggcagcgcaggaccaccgcgtgtgctccggctcctgggacagcacagtgaagctctgggacatggcagcggatgggcagcagttcggcgagataaaggccagctcagccgtgctgtgcctctcctacctgcctgacatcctggtgactggcacctatgacaagaaggtgaccatctacgaccccagagccggcccagccctgttgaagcaccagcaactacactccagacccgtgctgaccctgctggcggatgaccggcacatcatctcaggcagcgaggaccacaccctggtggtggtggaccgccgagccaacagcgtcctgcagcgtctgcagctggactcctacctgctctgcatgtcctaccaggaaccccagctctgggctggtgacaaccagggcctgctgcacgtcttcgccaaccgcaacggctgcttccagcttatccggtcctttgatgtgggccacagctttcccatcactgggatccagtactccgtgggagccttgtacaccacatccactgacaagaccatccgggtgcacgtgcccacagacccaccaaggaccatttgcacccgaaggcatgacaatgggctcaatagggtctgtgctgagggcaacctggtggtggccggctctggagacctgtcgctagaggtctggaggctgcaggcctgagcaggtgggcgtggatgtggatacctgccctgccggaggctgggcttcctcctctgttcttgggggaccatccccaatgttggtgctgcctccgccccgtgggcctagggcacaaggagtcccagccacattcgggtgagcgtcctggcctgggccctatgcccgggggaagggtgaaattggggttcaggcccacccagggggccgcttcccactcttgggccctggttttgttatgatttggatgccccgctctcagttgagagcgaaggagaaataaacctgacatgttggtgcttgggc

SEQ ID NO: 354388 - DNA, 522 bp, Homo Sapiens
ggtcggtacccgggtcagtacggatgtgtgggaacctcgggcagccagctccccctaggggactgaggttgggcctgctgcccacggcctgcccactttacccagatgtccagcaaggtggccatcaacagtgacattgggcaggccctctgggcagtggagcagctccagacggaggcaggcatcgaccaagtgaaggtgagggtcggggccagtgcaggaggcgggaagaggtgggaacacatgggccaggggacaggtgcatgcctgggtctggtctggctgaaccacctggtctgcaggtgtccaaagatggccgccgatctgctgaagttctgcacggagcaggccaagaatgaccccttccttgtgggcatcccggccgccaccaactcccgaatgtggctgggactccttgtgccctaggcccacggggcggaggcagcaccaacattggggatggtcccccaagaacagaggaggatagcccagcctccggcaggcagtatccacatccacgcc

SEQ ID NO: 354389 - DNA, 1777 bp, Homo Sapiens
tggaccggtccggaattccctggatattctgttaacggtagtggtggcttgttgggatccgttgagtgatgggagagtgtgctctttaacttcggagagagatgcgctctcgtgtagccgtcagggcctgccataaggtctgcaggtgcctgttgtctgggtttgggggtcgagtagatgcggggcagccggagctgttgacggaaaggagtagccccaaaggagggcatgtgaagtcgcacgcggagctcgaggggaacggcgagcacccagaagcccccgggtctggagagggaagcgaggcgctgttagagatctgtcagagaaggcatttcctaagtggaagcaagcagcagcttagccgggattctcttctgagtgggtgccaccccggcttcggacccttgggcgtagagttgcggaagaacctggccgcagaatggtggacctcggtggtggtgttcagggagcaggtattcccggtggacgccctccaccacaaaccaggccctttgctacccggggacagtgccttcaggttagtttctgcagaaactctacgcgaaatcttgcaagacaaagagctgagtaaggaacagctagtagcatttcttgagaacgtattaaaaacttctgggaaactacgggagaaccttcttcacggtgccttggaacactatgttaattgcctggatctggtaaacaagaggctaccttatggccttgctcagattggagtgtgttttcatcctgtttttgacactaagcagatacgaaatggtgttaaaagtattggtgagaagactgaagcttcgttagtatggtttactcctccgagaacttaaaccagtggcttgatttctggttacgtcatcgactccagtggtggagaaagtttgccatgagtccatctaacttcagcagcagtgactgtcaggatgaagaaggccggaaaggaaacaaactttactacaattttccctggggaaaggagttaatagaaaccctgtggaacctaggagatcacgaacttttacacatgtatcctggcaatgtgtctaaattacatggccgagatggacgaaaaaatgtggttccttgtgttctctctgtaaatggggacctagaccgaggcatgctggcctacctctatgattctttccagctgacagagaactcctttacaagaaagaaaaatcttcatagaaaggtgctgttgatatttcagagatagacttgggaaactaaaaatatgggtttgtttgttcttaatgttagtgtgctcggtttctaacataaactctaaataataaatttagtgcatgtagtctaagtatttttcagtttttttagaatctggccacaggaataagaatcaggttctcacagaatagaacaaggcatccctaataagtaatcccaaaggcatttctgtttaattgtgaacagacagctatctctatgactcctagcccctgaacctttccactgtgggcttccatttgtatcagaagctgaagcattggtacataggaggaagaaagaccccgtatcagggagacctgtgctattgacctctctgccccaggtgtctggcttctggtcttgtgccaatggctggttcctggatcaaagagctagatgtgggcctgggaaggctgattttagtgcatgaacatgccctgggagcatgtttaatgggtcaaaggaaatcgaagagaaaatgtgaagtttttggagagaaagaaatgttaagggggccagagaagagaacccg

SEQ ID NO: 354390 - DNA, 658 bp, Homo Sapiens
  misc_feature (50)..(50): n is a, c, g, or t
  misc_feature (153)..(153): n is a, c, g, or t
  misc_feature (159)..(159): n is a, c, g, or t
  misc_feature (175)..(175): n is a, c, g, or t
  misc_feature (188)..(188): n is a, c, g, or t
  misc_feature (391)..(400): n is a, c, g, or t
ccaaaagcaaacccttaattaggggggctaaaccaaggggtgaagttttnaagtaccttttctatgaaagatttttcttttctgtaaaagggagttctctgttcagctggaaagaatcatagaggtaggccagcatgcctcggtctaggtccnccattnacagagagatcacaanggaaccacatttnttcgtccatctcggccttcttctctaaactgaagaggaatcatttcaaacttcttaaaaatttcaatcctagaaatttcttaagttttggataaaaacagttccactttcatctttctttttttgtaaatcattgttcacctggatattcatgtaatttttaaaaatacttaaataaccacctttagctagagtcacagaacnnnnnnnnnngagagaaaaccccacaaatttaaatcctcagcttctgttaattattcatgatcaaccacagtcttcattaatacatatatgtactgacattttaaacctatttgaattgcatatgatactttaaagattcacaagaatttgccctcaaaggcagtaaactttctgatacctgggactctattctaccagttgtatttcacacagttatcgtcgaactgatagttaataagataaactgggctgggagcagtggctcat

SEQ ID NO: 354391 - DNA, 480 bp, Homo Sapiens
tgttagccatttggtgtggccctttgcctggcagaggcgctaccttaagtcacttcatcagatgtttattgaatggctgctctgtcccagctctgtgtcagccgcaggggatacagctgtgaatgaggcagagccgacttccctgtcgctgaaaatcaagaccctaaacaaggatggtatttcatcacctcgaaggcaccattgttttaggcactccctaagaaacaaagaaaaataataattatgtggtaacacaaatctctcttatcgttcaggatttttgtcttatgcttattgaaagaactcttttagatttaattaaatataaattttacatatttttgtgaatatataaaaacggtaaaataggtgaagaaaaataaattggttaaggatatccctaaaatttttttacagtcagagccttcctcttctaaaatctttttatttttagaattatttctccacaagctattggcc

SEQ ID NO: 354392 - DNA, 476 bp, Homo Sapiens
gagcccaaaatgcatgatcctggtgcctgtcacagagatatccagtgcctccaggagcccaaaatgcatgatcctggtgcctgtcccaggtcttccctcctgggtagaatcttctgacccgaatgtggggaagcacaatgacccctaatcgcaaaggaatgttggaggatcatgctgtgcactcactgcggagatgcatgtttggattacgtgttctcatttagcagccgcccgtttgacaggacatactgcacgccagccctcttgttgacttagttcctgtactggcaaagcaaataaactgagtttgaggaagagtgtgattcggtgggagagggctgattggtgaggacagattggcggtgaaggggaattgagtagagccgtggctgcagctgttaaaagaggtgggtgcacccaaagtttcaacccgcatgtgggctgcccacaaagaatacaggaggcttggtttctgg

SEQ ID NO: 354393 - DNA, 1046 bp, Homo Sapiens
  misc_feature (882)..(882): n is a, c, g, or t
ctcagctcaagaacaagcattcctccaagaagccctccctgttgttcctctggaatcccacagtccccatccttcccctgtagttctgaccccatggggctggcagtagatacatccaactttgtctcccctagactagacagccctctagatcaggcctaggagtggacagtaaaatttagagagtgcaacaggtgaagagagacgtgactgactccctcctctttagcttcccttgacagcttcctctcagactgccccagctgatatcctgcccagaaacacacatgcttgcaaatccagccactaaccattgacctgtcttggactcaagtgtgaagagccagccaaggaatgcagacctggaagcctagggtgtatgtgtgtgtatttgtagtcaagtgaaaatcccacccaagctccagacagaccctggcggcccattctgacagatgtttggtgaggttgatatttctgtggaggtgtcaagcaaaggttgaatgcgccaggcatgaggcaaaggccaaggtttagggggacttctacacacacaactgcccccttgcctcgtccagccagaaagcagagagcagtggcatctgcccagcacagaggcagatgggtggatccactcacccgaggatagagcagggaagacgggacaggaaaaatccaagagggcttctcaggggaggaggcgtgtagtttggcttagatacagaggctagacaggggcctgagcagatgagtaggggactgggcatttgaagccaagagtcttgcacctccctacccctttctttgcaccctcatactcgagcatttattagctacttgtgctaaccactgagctaagctgacctccaagtaataagaagcttnagtaaacaacatctgtaaatgagaaaggggactgagggacctactggtacaagggcagggaatttggaggctgtaatggactattgaccaactgggtttccaccttggggaagaagaattgttaaaaaatagtattaacccgaaaggttccctccactctcaaa

SEQ ID NO: 354394 - DNA, 962 bp, Homo Sapiens
  misc_feature (903)..(903): n is a, c, g, or t
  misc_feature (910)..(910): n is a, c, g, or t
  misc_feature (912)..(912): n is a, c, g, or t
  misc_feature (924)..(924): n is a, c, g, or t
  misc_feature (934)..(935): n is a, c, g, or t
ggagcgaggcctgggtggcgaattcggcacgaggggcaggagctctgcggcttcggtagcagcagtatgaggagagctgggccacatgcttatgggttaggagaaggtaatttccagtcccgtctgtgtctctggccaccttattgaaaggcagaaatattgacggaataaataaaagggaagaggcagccagtagaaaaaaataaaaggggattgagaaagagtaagggtgatgagagcatgaaaagtaaagcattacctctaggtgttgtctggtctctactatacctcatggcatttaccatagccccttgtacctcaaatcctcaagggaaaagtcctttctggttctaaagaatcttttgaatggccacctggaccctgatttcaaagtggcttaccaatatttgttctctttgccttttgctcctttgatcaccctcacccccaccctttcctctaaccttgagaaagtatcctgacaccagtgctttctgaaggtctctgcgattctgctcagagccaaaggctggtagggacaagggaagttcaattcgttgcatgagttctaggagttctccccgaagtttatgggcttggcacaatgctgcccaattcagacctcgagcctggcaccaagcctcatctgctccacctaggagaggaaagggaccagctaaactaaagtccttgagacccctgaaataacccaacccttagccaaagggcctcctctttctgagcatagagatctgtcagctggctgcataaaatttcccctctttggaaaatctgggattctataaaaggatgcagaactcactttgtataaaggcttcatacacctggatcagaaaaactgtgggtcacccatcccgtggtggttcccagggccccgaacgncaagggncnagctttctttcntgccaccttnnaattgggaaaggaacggggttaaaacc

SEQ ID NO: 354395 - DNA, 349 bp, Homo Sapiens
ggggggtcctccacagcccccagcttcccagggcgggaggcaggctgtgtcctcggtgggcactgacagtgaggctgaaacgtttgcacttcacattttccacaattaggggcattttgttgttgactcattcaaagctctttttaagtcgcttaatttgctgctcagagggaaatgaaaagggagccattttccctgatttgtttgcctcatcaacttttcaatcaataaaaaagtgcattttgctcatcggatgcaaataggtccatctttcctaatatgttgaaatatagtgattcatcagacatttcatttcatctggaagctgaaatcctaatgcgtttgacac

SEQ ID NO: 354396 - DNA, 923 bp, Homo Sapiens
ggactccggttgctagggtgtgtctccttggcctcctagagggtggggatccgtggtgcttcttcgggaacagcctcctgcaggaagaccctcgctggacctttacctcgctgcctagattccgaggaaaaggagataggagacgaaaagccagttggtttggaaagcggccgattatcctaaagggtagtgtgggagtccagcacttccatgcccctctgtgggtactacggaagggagatttccagcatcgtgtggaacatatgaccaggagtacaccttgagcgcttgtgtgcagttatcttttggcggattatgaaaaacagcacttattattcattaaaatgcaaaagcccccactgcttcttcgaagacccttacctccaaaattcactaagctgtctttacatgagaaaaaaacccatacagctaaaactggtaaaattgaggcactacatgtagcattcactgaagatgaaaccacttccattgaaaatggaatagaactcgttttcctgatgttttaagaaatcaatcactaacacctatcaatatccaaaatatctttcttgatcactgtgtacaagaaagagtgactgcaatttcatcaccccagaaatctactaagcatgtccgtgagcagatgccagatactgctactggttccatattttttccacattgtaattcagcttctactcgaatttttgggaaacaaacaaacaaaatggaaaagttcaagaaagtttaaaactatgaaagatgtttatactgaaaaaaggctagaaaacattttaattctttcttcccaagttttccaaacctaaaagtactcctggctcagttatcgctcaaaaacttgaggaaatgcaccctaagcatcaacctttaccagagagtccaggctatacttatcagcacat

SEQ ID NO: 354397 - DNA, 298 bp, Homo Sapiens
ctggaaacaggagtcaggggccatgcagctatctccttacaggttgcagggatgttgccgtctcagcatttgaacctgatggaaatgttgaagcgggggttggctgggttttgtacacccagggcctgttttcttagacaaggccatttcacggatcctcagccgtccccagttcacaacagtgaccctggtgggcttgtttctccatgagtgtgtttagggttggatgctacgactctgtctactgtctacaggccttacaggacatgcaaggcaaggaagcctcgaacacccgggt

SEQ ID NO: 354398 - DNA, 619 bp, Homo Sapiens
  misc_feature (219)..(244): n is a, c, g, or t
gtgggtgccccgcccacctcctggaggacccgctctgcgcggacgtcatcctggtgctgcaggagcgggtgcgcatctttgcccacaagatctacctctccacctcctcctccaagttctatgacctgttcctcatggacctgagtgagggggagctggggggcccctcggagccagggggcacccacccagaggaccaccagggccactctgatcaannnnnnnnnnnnnnnnnnnnnnnnnntgggcgagacttcctgctccgagcagccagctttgacgtgtgcgagagcgtggatgaggctgggggctccggtcctgctggcctccgtgcttccaccagcgacgggatcttacggggcaacggaacagggtacctaccgggcaggggtcgtgtgctgtcttcctggagccgagcttttgtgagcatccaggaagagatggcagaagatcctctcacctacaaatcccggctgatggtggtggtgaagatggacagttccatccagccggggcccttccgggctgtcctcaagtacctgtacacgggggagctagatgagaacgagcgtgacctcatgcacattgcccacaaaagctcggctagttctagatcgcg

SEQ ID NO: 354399 - DNA, 825 bp, Homo Sapiens
  misc_feature (34)..(34): n is a, c, g, or t
  misc_feature (43)..(43): n is a, c, g, or t
  misc_feature (56)..(56): n is a, c, g, or t
  misc_feature (81)..(182): n is a, c, g, or t
accatctgctgggttccccctaagtgctatgcancttgccggncatgtgatgccgnttatctcacctcagtcttcacaaannnnnnnnnnnnnnnnnnnnnnnnnnnnnnnnnnnnnnnnnnnnnnnnnnnnnnnnnnnnnnnnnnnnnnnnnnnnnnnnnnnnnnnnnnnnnnnnnnnnnntggattcaaccccagtctggagccccatggtgcgtcacacgtatgatcatcctctgtcttgtatgtcttgtttggaaagggttggaaactcttgacatgaggaatggttgttattaatagcaggttttgaggaaaaccttctagaagagtcccagtatggggaagtggcagaggagacccctgcctccaacaaccagaatgccaggatgctcgagggaagacagacacctgcctccaccctggagcaagatgccactgactaccgcctccgaagcctgcggaaactcctggctcagccccgggagggcctgctggcccccttctccaagcggaactccacagcgtccttcccagggaggaccagccacattccagtgcagcagccagagaagaggaagcaaaaacccagccctgagcccagccaagattcacctcattccgacaagtggcctcctgggcaccctgtgaagaacctgcctcagatgagggggcccaggcccaggcccgctggtgacagccccaggaagactcagtggctgaaccaggtggagtcgtacatcgcagagcagagacggggtgacaggatgcggcctcaggcccccggaaggggctggcatggggaggaggaagtggtggcggccgc

SEQ ID NO: 354400 - DNA, 434 bp, Homo Sapiens
  misc_feature (293)..(293): n is a, c, g, or t
  misc_feature (324)..(324): n is a, c, g, or t
  misc_feature (413)..(413): n is a, c, g, or t
actgatgctgttagctaaagtgagtctcgggcagcccagggtcagtgtgggaggatttatttatacagggacaccagtgccacgaagttgggttcaatgggagccgtctttggagaacagataccacgctggctgtgcatgttgggcaagttacataagcagtctgtttcagtgtccttatccatggaaatgagaatcgtcgtggatatcagttgtgattgcagttgatgaaatatgcagttgtgaatactcagagattggtattcatactctttggaacccagttaaagggngtcatatcaattcctgtccatgaaatgaggntaatcaatgaccatcttggtttgtcatgcactttcagtggggtaaccagttgcaaggcacttaggggcagcagccatcatggtttcagnggtggggccccaattatttgc

SEQ ID NO: 354401 - DNA, 405 bp, Homo Sapiens
  misc_feature (44)..(158): n is a, c, g, or t
cgggtacaaataactgtctcttagggctgttataaagattcccnnnnnnnnnnnnnnnnnnnnnnnnnnnnnnnnnnnnnnnnnnnnnnnnnnnnnnnnnnnnnnnnnnnnnnnnnnnnnnnnnnnnnnnnnnnnnnnnnnnnnnnnnnnnnnnnnnnacttgcatgtagtgggtgtcggatgacgaataaatgagacatagagatgtcatgtgccagatgctgacatatgctatggaggaaaataaagcaggttagggggaattgggagtgggcatgggtccatgtcaaagagggtgggcagggacagcctagttaagaaggtaatctttgaggagaggtaaggtgtttccagcagagaagctgcaggtgcaaaggccctgaggcaggaagtgtgcctagctct

SEQ ID NO: 354402 - DNA, 416 bp, Homo Sapiens
  misc_feature (342)..(342): n is a, c, g, or t
  misc_feature (359)..(359): n is a, c, g, or t
aggagaaaggcctgagggcaccaggggatcctggtcatagattattcactaagagaacctgtgagtctagaagtttgaagactatttgcacagttaaagcagatttgcatctgggatacagtgaagaagtgataatttctgcattaatctgtccagtcattcaacgtttctgcagaaacattaaaaggtcacacttatctttcttagtaagccatgaaaaaaatgtaagtagggaaaattaggtttagaatataaacaaattgtattctatctaaaacaaaattctattgagaagtagatgaaacagataagcagaaaaataaaaaggtaggaagacaaaanctcacttcataaaatangacatgtgttacaccatggacctggtaaatgtttatgcctacccaaattattttttt

SEQ ID NO: 354403 - DNA, 2698 bp, Homo Sapiens
  misc_feature (1334)..(1334): n is a, c, g, or t
  misc_feature (1342)..(1342): n is a, c, g, or t
  misc_feature (1344)..(1344): n is a, c, g, or t
  misc_feature (1350)..(1350): n is a, c, g, or t
  misc_feature (1352)..(1352): n is a, c, g, or t
cggaattcccgggatgcaagatggccgccgctgaggaaggctgtagtgtcggggccgaagcggacagggaattggaggagcttctggaaagtgctcttgatgatttcgataaagccaaaccctccccagcacccccttctaccaccacggcccctgatgcttcggggccccagaagagatcgccaggagacactgccaaagatgccctcttcgcttcccaagagaagtttttccaggaactattcgacagtgaactggcttcccaagccactgcggagttcgagaaggcaatgaaggagttggctgaggaagaaccccacctggtggagcagttccaaaagctctcagaggctgcagggagagtgggcagtgatatgacctcccaacaagaattcacttcttgcctaaaggaaacactaagtggattagccaaaaatgccactgaccttcagaactccagcatgtcggaagaagagctgaccaaggccatggaggggctaggcatggacgaaggggatggggaagggaacatcctccccatcatgcagagtattatgcagaacctactctccaaggatgtgctgtacccatcactgaaggagatcacagaaaagtatccagaatggttgcagagtcatcgggaatctctacctccagagcagtttgaaaaatatcaggagcagcacagcgtcatgtgcaaaatatgtgagcagtttgaggcagagacccccacagacagtgaaaccactcaaaaggctcgttttgagatggtgctggatcttatgcagcagctacaagatttaggccatcctccaaaagagctggctggagagatgcctcctggcctcaactttgacctggatgccctcaatctttcgggcccaccaggtgccagtggtgaacagtgtctgatcatgtgaaaacaacacgttttcctctctgagtcccagctatgggggaacatctggagtcagcagaaccattgggacctgaggcaggagtgtcacctgcgggagaagtctgcccgctgccctctgtcatccattcaagattgtgccataccagctgaggtttttcctctgtctctctaggaatagggtctgttcacaggccatttctgtgaaccctactccattgtggtttctgccactatcaaagttccagctacctgcaaggtgaaggaaggcatcccttttggggcatgcactttctttcctttctcaaaataatgttatatgtggccacactgatgttcacctttacgtccagggtctttgtgccttgtctctactccctctcttggaactggggaggaggggcagagacctgggacncggtattncnatagtncncctggcagagcctttgagaatggggagaaacagcctgggctggggctacaggtctgtcactatgctctcttgccttcagacagaccattctgaattctctaaagggaaagggcttttgcatctaatcacaatagagttgaaagagaggccttaggattctcctctctctaggtgctgagccctcacctccctgttccaggctgagaactcaaatggttaccctgcttcttcctacaatgctgtgtgatatgggtgaacccagcccctgaccttcctctatcccctgcccatcctcccttttacctcctctcttttttaaacacctgtttatcccaacctttttgagctcaagctgtgataaagaagggcccatcctatttcccctcatctagtccatttacgattctcactgactccccgtcttcctggcagacacaaataaacccagtgtcaggtctaggaaattaatggctattcttccccagatacattctggcttatttgagatacatgattctcttagaatcctgtcccttggttcaggaaagtagcttggaaaaggagtaggggtatagcttgggtcccttttcctgcaaggccccatggggcagaatataataaatattctgagtgaggagtgtggtctttttctgatcttcctcagcttccgtaagttgcagagtgaggtatattaggagactagttctacacaatattgtaatgctgggttccatcaacacccaccttccacaactcagtctgcacctcagttggcaaaggagactggatggccatctttcctcatgttcccttgagtatttcaatgtagaaagcccttcaagtggtattatattttaaccttttacattattgttattaatgttagtaatatattgttatgttttctaaattatttttctttaagctgacgtggctttttttctgtggctcccagtgggtctacggaccttggctgacatatgttggtaggtactctggtcagctcagctggctgtcctggttcactcagaagataagtctctccaaagcaaattcacatgcattatgagtcgctttgagcttctgacatgtcacttgccccgaggttaaaacttttcaccccttgaagaccttacatgttttatggtattggtgaggaacggaaatgttctcaaggtctcaggctatttgggaaattccaactcctattaccttaccagaagcatgggaaagagcccagatctgaatgtaaaaccgtctctgttctgccagagatgggcaaaacatacaggtatacttgtgatatagtcatggggcttcagtgtcactatttctccttaagatcc

SEQ ID NO: 354404 - DNA, 1799 bp, Homo Sapiens
  misc_feature (718)..(718): n is a, c, g, or t
  misc_feature (1466)..(1466): n is a, c, g, or t
tggaccggtccggaattcccgggatggcggctgggcctggaacagtcggagcagccgctagcagaaggatgacccaagacgggaagcgggctgctgagcctcgccgattcccgtgcttgtaactgccccagccggacaccccccctcccttgacctacccggtctgtgtctcgttccggctcggcctgcgccccccctcgcttcccagccggtttcccctaaggatgggcctgacccgtatcccaagctcttagcgctcaggtcttttccttccgccgacccgaagtcatcgctgggagtactggttgccctttcctcagtccttcagtgaatctacagacctattttctcaggagctcagcctggccttacttcagtgataaaaggaggaaaggctggctacagcaaacatcattcaagatgtccagcaaagggagcagcacagatggcagaacagacttagctaatggaagcctgtctagcagtccagaggagatgtctggagctgaagaggggagggagacatcctcaggcattgaagtggaggcctcagacctgagtttgagcttgactggggatgatggtggccccaaccgcaccagcacagaaagtcgaggcacagacacagagagctcaggtgaagataaggactctgacagcatggaggacactggtcattactccattaatgatgaaaatcgagtccatgaccgctcanaggaagaaggaagaggaggaaaaagaggaggaagaagagcagcctcggcgccgtgtacagcgcaagcgggctaaccgtgaccaggactcatcagatgatgagcgggccctagaggactgggtgtcctcagaaacatcagctctaccccgacctcgctggcaagccctccctgcccttcgggagcgggagctgggttcaagtgcccgctttgtctatgaggcctgtggggcaagagtctttgtgcagcgtttccgcctgcagcatgggcttgagggccatactggttgtgtcaataccctgcactttaaccagcgcggcacctggctggccagtggcagcgatgacctgaaggtggtggtgtgggattgggtacggcggcagccagtactggactttgagagtggccacaaaagtaatgtgttccaggccaagtttcttcctaacagtggtgattctactctggccatgtgtgcccgtgacgggcaggttcgagtagcagaactgtctgccacacagtgttgcaagaatacaaaacgtgtggcccagcacaagggagcgtcccacaagttggcactggaaccagactctccctgtacgttcttatctgcaggtgaagatgcagttgttttcaccattgacctgagacaagaccgcccagccgtcgaaacctggtggtgtccaaaggagaaagaaaagaaggtgcgggctgtatacaattctatgtgaaatcctggccataccccaccantttgcaatggggtggacaaacatccgttttgtaaaggacttatgaacccaagggaaattggatgtgaaatggagaaccatggaatccctccagaagattctgtccctcattaaactgggggaacagtggaagtcccaagcgaaacttccacccttggcttggggtaaacacccccgacgggcacaaaagcgtcctgggcaggtttccattgagggaaaaaattttaccttttttcaatctccttttaaaagggcatgggggcccaagtaggttttaggaaaaatcccagggccccaagggaataaatgcccccggtaaaaaggcgcgcccctt

SEQ ID NO: 354405 - DNA, 978 bp, Homo Sapiens
  misc_feature (53)..(89): n is a, c, g, or t
ggcgcagaaccccccgcgagcgccgtttttttctctgcctggggtggcggcgnnnnnnnnnnnnnnnnnnnnnnnnnnnnnnnnnnnnnatcaggccaaatcggccgagctcgaattcgtcgagagcgtggggggtggtggcggccgctggccagtgtaagatggcggcggcgttggtggtggcagtggacggggcggctgggcctggaacagtcggagcagccgctagcagaaggatgacccaagacgggaagcgggctgctgagcctcgccgattcccgtgcttgtaactgccccagccggacaccccccctcccttgacctacccgtccttcagtgaatctacagacctattttctcaggagctcagcctggccttacttcagtgataaaaggaggaaaggctggctacagcaaacatcattcaagatgtccagcaaagggagcagcacagatggcagaacagacttagctaatggaagcctgtctagcagtccagaggagatgtctggagctgaagaggggagggagacatcctcaggcattgaagtggaggcctcagacctgagtttgagcttgactggggatgatggtggccccaaccgcaccagcacagaaagtcgaggcacagacacagagagctcaggtgaagataaggactctgacagcatgggaggacactggtcattactccattaatgatgaaaatcgagtccatgaccgctcagaggaagaggaagaggaggacagaagaggaggaagaagagcagcctcggcgccgtgtacagcgcaaagcgggctaaccgtgacccaggactcatcagatagatgacgcggggccctagcaggactggggtggtcctggaagaaacatcagcgtctaacccgaactcgcttggcaaagcccttcactggcctttcggggagcgggagctgggttccaagtgcccgtttggctaagagggcctgtggggcaag

SEQ ID NO: 354406 - DNA, 829 bp, Homo Sapiens
  misc_feature (30)..(30): n is a, c, g, or t
  misc_feature (62)..(62): n is a, c, g, or t
  misc_feature (137)..(137): n is a, c, g, or t
aaagaaaaagggggcccggattaacccaanccgaaaaaaaccttaaaacccatggattaatnaaccacgcccacaagaagaacaacaaggggaaaaaggggcccgggaaaacccccaaattgaaaaaaaccttgggncagccagtgagtggctgaatcatgagtactcaggaaatgcacattaaaattcaacagggagaaatcctctctgcccctcagactgcccatcaggcttgggaggtgtcgggaaacaggcgttcatcctggtcgctgctttgggtagcagcttgcagtgctgaaacagtcaaagatggctgtccctcagccctgccacctcccattcaagcgcctgctctgaaagctcctgagcagatgggccttagatgcagacaggggtgctcgtggcagcaccatttacaatgatgcgaaaacagaacccgcctaactccccgtcagccaggaggaggtgggaaaccaacacagcgcatggttatttcatatgcggggatacagcgaagatggacgaagatctacacgcaccagtgcggatagccctcgaggacatgacgttgagtgaaaaaagaaaattgcaaaaggatatgtagagtatgatgccaattatgctatttctccaaaacacaaaaagcaatgatgacgaattcatagttatgtagtaaaaatacagaagccatgcatgggaataaaaaaacaggtctcagtcatgagacagagggaccgaggatgggagccctgggggcagtcctggcaggattccaggaggaggtgcctttgcattagacgggagactggggtggtgggtccaaaactgt

SEQ ID NO: 354407 - DNA, 998 bp, Homo Sapiens
  misc_feature (14)..(14): n is a, c, g, or t
  misc_feature (31)..(31): n is a, c, g, or t
  misc_feature (53)..(53): n is a, c, g, or t
ggccacgggaaccngccaaataaaactaaantggagaagctgaaccccggganggcccaaaggctgtgaaagccaattaaccccagggatttgggtccatttggggccccttttgggtaagtaaaagttccctccccatggaatttcccactctggtcttaaaacagccccatcatgtttttaaattagcttgcacaaaatacaactaatttcctagattctttggcaactgatcagaatactattctatgtctcgctatagaaactcctgcaggcatattgactataccctgagaaagacaaaactaaatgcactacatgatgctgggaaaacaagttgtgatgaaaacagtgctgagtcaaataaatatagattattaactccagcttgcccttgactggtcatgagaccttggacaagctacctatgctcattaagcctcaatttaacttcttgacatctcaactataaaaaacaagggtattttttgctttgtttggtaattttgaggaaaaacacaacaaatgagagataattctactttagttgttacacagggttgttgggtagagaaggaaggtgatgccttggaacagactttaacaactgtgaggcaggataaaaaacaagtcctgaaagccatcactttttgaccatagtgagctcttcttttgtaacggttcaggcttctaaccttatttccccctttggcaactgaccagctcacgcacacatactagtgatgaaatccacataactccatatcttttcctctacatggccaagagtttcagtgcaacaggaaagtgctgtcacggatccatcgtgcaacacatacagtgctgtaaagcaaaggcctcgttctgcctgcaggcagcaggaactgcacgcattacccttctgtctgatgtacagcctaactgcttcgtgcttcttctcatgtgttgagccacagctttcttgtagagtatttcaaaaatacagccccaaaacaaag

SEQ ID NO: 354408 - DNA, 617 bp, Homo Sapiens
aaattggggaaaggaagtaggaaaagcagtaactgacaacttgaataatacaccagagataatatgagaatcagatcatttcaaaactcatttcctatgtaactgcattgagaactgcatatgtttcgctgatatatgtgtttttcacatttgcgaatggttccattctctctcctgtactttttccagacacttttttgagtggatgatgtttcgtgaagtatactgtatttttacctttttccttccttatcactgacacaaaaagtagattaagagatgggtttgacaaggttcttcccttttacatactgctgtctatgtggctgtatcttgtttttccactactgctaccacaactatattatcatgcaaatgctgtattcttctttggtggagataaagatttcttgagttttgttttaaaattaaagctaaagtatctgtattgcattaaatataatatgcacacagtgctttccgtggcactgcatacaatctgaggcctcctctctcagtttttatatagatggcgagaacctaagtttcagttgattttacaattgaaatgactaaaaaacaaagaagacaacattaaaacaatattgtttctaaaa

SEQ ID NO: 354409 - DNA, 179 bp, Homo Sapiens
  misc_feature (125)..(125): n is a, c, g, or t
  misc_feature (153)..(153): n is a, c, g, or t
caatgatatgttaatttttaccatcagaattaatctgcagagataatctgtagtgaatttgtgtatgtgtacacattgtgactcttgagaaaaatcattctacatatacacaaagagattgtccngaattgttaatcaaatcaaagagtgcgnaacaatgtaaatgtctgtaaataggg

SEQ ID NO: 354410 - DNA, 461 bp, Homo Sapiens
  misc_feature (29)..(29): n is a, c, g, or t
tcagtgaaccacacaactggataaattancaacaaaagtccaagcttagacacatcataaagaaacttctgaaaactaaagaccaagaaaaataagatcagccagagaaaaacgatacatttcattcaggtgaacaattctttgaaagactggatcttcaccagaaactatagaggccagaaagaagtggaacatttttagttttgaaataactgtcacccaagaattctatatccagtaaaaattttctattttactgggaataaaagaatgaaataaaataaagacattctcaaatgaaggcaagctgaggaaattcataaccaaagaatctgctttaaaaaaatgttaaaccaagttcttcagacagaagagattactgggggcaattcaaaactttgggaatgcaggaagaacatcataaatggcaaaagtccacataaatatgaaactattcttta

SEQ ID NO: 354411 - DNA, 1172 bp, Homo Sapiens
  misc_feature (55)..(55): n is a, c, g, or t
  misc_feature (132)..(132): n is a, c, g, or t
  misc_feature (474)..(474): n is a, c, g, or t
aaaagtgaaatgtcaggttgtttagtcactgaatagagagctacaagtgcttggnctttcccaagaatcaaacctgagtagaaatacatttaaaagaaaaatctacatggtacctatgaatcctgtaatttntttagggagatcttgtcactcatccctggttcctgcccatactgtttggtctcgttcttgcagtttgcttggaacagggccagagccccacatgagattgtcagcaggagtgaggagcgccagtccctactcctcagcagggacccagcacagcaatccggttgttctcggttagactgggtcggggccaggggagaagcagtcacccctgtgtagagggttcccgctgtgcttctgagcagttgctttgttcagaagtgttaggagggtcagataggtgccagaacttgttattaaagagaaaacacgcccaccttcctttctcccctggctggccaattngttcattgaggttcactgagggcagcctttgtggaagtcagggaggttgccaaaggcctgtagatgcctcctgacaaggtcttgaatcctggttttctagcacccatttgcattttgggcttcagcacaaagccttgttccctgtggccgaacttctgggcaataagactggggagtgactgttgagcagtctgctgtcaggagagatggctgaaaaggtgatcatcttggtgctaaacaagtaagaggcaactgccctgtttttgtttgttttgaggcacaatgaaactttagccaaactctgcaagagggtcccatctcctgccatggccaggtgtgagagaccaaaccgagaaaacagcatactctatcacttaagccttgggtagaatgggaattctttaccctgggtaaacgttttaacaaaaaaatggaacttaacttcggtttggactgtggtcgtgctgaggcaggagtggggttgccctcttggggctgaatctccaggcctcacgaggtcccctgtggggatgctgctatttctaagatgcaaattgcacatttcctagattttgtatctgtggatttggataagggaggggaacacggacaaattgcttgtacaatttgaaatgggcctcaatggtacttcaaaccttttgattattcctaaataaaaacataaatatatttcaaaa

SEQ ID NO: 354412 - DNA, 558 bp, Homo Sapiens
  misc_feature (22)..(22): n is a, c, g, or t
  misc_feature (41)..(41): n is a, c, g, or t
  misc_feature (48)..(48): n is a, c, g, or t
  misc_feature (71)..(73): n is a, c, g, or t
  misc_feature (87)..(87): n is a, c, g, or t
  misc_feature (98)..(98): n is a, c, g, or t
  misc_feature (110)..(110): n is a, c, g, or t
  misc_feature (174)..(174): n is a, c, g, or t
  misc_feature (222)..(222): n is a, c, g, or t
aaaaaggtcccccaaaattccnaaacccttccacggtaaanaatggtnaccaaaaaagtggtttggggaannnccctaattttaaantgttgtaaaanaaacttcaaatnccaacatgtgcgacttttccccctccctgaaagggtgtttaagtagtccaccgttttccagaantgttttgttacctaaactttaacattttacaattcctgtttgtaatantttgtgagagcaaggtgatcatgcctgccttaaggtcccaggtacaacctatttgtaccttttgagacaatatttgtgttacttttgcaggttacggttccacatgtaattgctatattttgttttgtttttccttactaggcaaagttaaaatgttccatgctttgaggagtgacccatttcactactttgttttcttatcactaaaggcaaaaatcaaagcacagttgtccattaacacttataagttaattatgggtttatgagtctgtaatgttatatgctgcaaacatttactatgtaaacgtgaagtagccaataatatctcaatagtag

SEQ ID NO: 354413 - DNA, 1250 bp, Homo Sapiens
cgcatgacaaaatgtagacaagatgcctcaaggtattggtagcaagcaagattttgccctttagttttcgaagacacctttctttcattatgcactcgggacaagaaaattaatagagcgttattccacagaaggcctctagccagagatcttgagtgtagtgcaagggactcatgctttgcgaacttgtccctgtgactagtagattcccccttttcctgtgtttaggatttagtagtgcataaagcattaatatccataaacatacctagaagtttgttttgcttttaatttaaaggaagcagtaaccacaaagcttccgctcagggttttttctttcttcaagtctccaagggctcttcagcgtcacaagccagcaactctctttgcattaaaatttcaaagtttaattaatataattaaaagcaacagcaagcagcagcctgtgaagattttgctcatcttttttatgccttttgacattgaatgacctattactgtatgcgcattacttggattttgaggggcactctaccttggttatgattcagtagaggaaaaagaccacctttcttcaatttacaaattaaatcttctggagggtcgctatcacaaaacattgacgatgtatgtattataattttttagaaaaaccaccatcgtgtcacgtcgacgatgccaaattatgttagcgtgagcagaaacaccgtgggggaggaaggcagcagctgaagaaaaaagctcaaatgatctagtcactttcgatactgtacttcagatgcgaaatggatattcgagtggaaacctgacaaagtgcgcctgctttgatgtgaactggtatagacaatgaccagtggctgggtcagtgggatgtctctctgtgagcacaaaggcttatcaaatgacactaaagataagttcaacaaccatcacattggaagggagaaggcgaacatttcatgtttggcgggcatgtgagtgcacaagatggaaagagcgattggagcatcctggtataattacccccattgtgctcttaatggaaatttcaaaggacgggagtattctgttggttggtgtccaggtttgtggcactgttccaagaggccttacacacacacacaaatatataattttctatacatatatatcctctagcttgaaacttttgctcaagtttatttatgtcactggctggctggatccaaagtcatgtgtccacacattcataaataaaaattttacctatg

SEQ ID NO: 354414 - DNA, 686 bp, Homo Sapiens
agaaaagaaagcttacaaaaaagccaaggagcgggagaaatcatctttggacaaaagaaagcaagaccccgagtggaagccaaaaacagctaaagcagcaaattcaaagtcaaaagagagtgatgaacctcaccattctaagaatgaaaggccagcacggccaccaccacctatcatgacagatggtgaagatgcggattacactcattttacaaaccagcagagttccacacggcatttctcaaaatcagagtcctctcataaaggttttcattacaaacattaaaaacctaggaatctgccttgaaaatggactcactatagcaaatattactgggtgatacagaatgaattctacacttactttttttctcctgtgtttgcattcctgggatttatcctcaagtgcatttctgaccataagtaattttaattcatttcaaatgttttggttattcatgatcacttgggcagtataagaaaatgtagcttctgaatattggccacctctatgctgcatatacttcttgggatatagtatctaagacctttgtaaactgccatttggttaggtatggagttgggtatctagggagtaggccttatttagcaattcaaattttatggagatgaatgatcaaagtgaaacaatgtatggatgcaacgcagaataaaaggatataaga

SEQ ID NO: 354415 - DNA, 738 bp, Homo Sapiens
ggctggtccggtccggaatcttagcggataagctgtggtggctccacgtttctttagctgggcagtgttttatatatataggttaagattatcaccagctcctcctggcccatgggtcgagtttgagtggctgaggcagttttggtttcaaggcaatcgatacagaaagtgcactgactggtggtgtcaacccatggctcaactggaagcactgtggaagaagatggagggtgtgacaaatgctgtgcttcatgaagttaaaagagaggggctccccgtggaacaaaggaatgaaatcttgactgccatccttgcctcgctcactgcacgccagaacctgaggagagaatggcatgccaggtgccagtcacgaattgcccgaacattacctgctgatcagaagccagaatgtcggccatactgggaaaaggatgatgcttcgatgcctctgccgtttgacctcacagacatcgtttcagaactcagaggtcagcttctggaagcaaaaccctagaaggagcacaagtctcaggcggaggagaaaaagagatcggcttttctcctccaacgttgtcatgggcttaagcaagagcagtggagacttctcttggcccctagattgtagcacccgggtcccaatccaaaacagctaggaaatggtgcccatgaagttctaaatgtcctcaaaatgaccctgtgttatagtctgatttggtgttaaacaggaccttcttcccc

SEQ ID NO: 354416 - DNA, 665 bp, Homo Sapiens
gacacccgtccatcttcttgccacagtgcttccagttgagccatgggttgacgccaccaggtcagtgcactttctgtatcgattgaccttggaaccgagactgcctcagccactcaaactcgacctcattatgaatttcttctccttgtttcaaaactggcaggctcaaaaggatttcaaacgagacatcatcattgtccacatcgtcacagacatctgcagagccaactgacagcgttgtaaaatataatccaaggttcctgttgagcactctgccactcggtgggtggaactaaaccgaggttgtgaaccggccaaaacacagtgttggtgggtggcattgagatcatcaagcatgaaatagcagtctccttggtgaaggggtatcgccaaaccaggtgtctctatgtcccatgagatcttaaaaccaacatgccaaatatcaggatccctgccttcgagatgagagtcatcctcactttcctcttcagggccttcacagctataactgtacactgccaccgctgacctgtccaccagattttcatcatgatgccagctcactgccattctccccacgccaaaataaggttcctctttcaggtatggcattttctgaggatccactgaaattcagcaaagttaacgtagtatgctgtgtgctc

SEQ ID NO: 354417 - DNA, 365 bp, Homo Sapiens
  misc_feature (20)..(20): n is a, c, g, or t
agtctcccttccccatggtnacaggtggataaatatctcctccaccctaaatacctcgcagggatggaagaaggatggatgagcaggcattacagccaatattctactctctggcaataaacaactcaccttttggaggtaaacggtctctttccagggcaccaggggatcatttagcactctggaagaagtaatttgctctatggttctctggtgtcctgaaaagtgtaatccacctccaaaaggtgaacccttatatcccagagaatttgttttctctgggatcagaatgctttaatgttttcagtttcaggaaaagacaccacaggtatcattttctggtcaagagaagactctttcctcac

SEQ ID NO: 354418 - DNA, 302 bp, Homo Sapiens
tcccctaagttcttgatagataactaatcagcagacttttacaaaatacctcaatgaaagacgggaaatactagtatttgtatacttgttatagtttgaaaagaatcagtgtatagagtgagatttttctatttttggtacatcataattttgttgtttttagggagtaaaggatatctgttttgtttttgctgtgtccttgctgcacacccaatttatagaaaaggagccaggtgcagctgctcatgcttgtaattccagcgctttgggagaccagggtgggtggagctcttgaacccaga

SEQ ID NO: 354419 - DNA, 873 bp, Homo Sapiens
ttttgattggtgagaaagtacccattctcttcaaataatcaaagataattattattttgttttgtttttggaatcaacagggaggcgcaaagtataaagttgctgctaacatatatacatatatatccatattttataagggtgtctatgtatatatagacagtgtgtccacacaaaaaatagatacagttatcagtcagtcagttcttccatgatttagtttttttaaacgtagaaaagctattgtaaacatctctttccatttattcttaattttttgacatattggtatttctttaaagggaaatgaggaatgcacatcagtgattgattgtcaaacctcaccccctgatttcctacctaatctacccccacctaaccaatcaatcacatccacaaattgttttgtttgtttgttagtcaggcttccaacaaagttcaatatttctaacactctagtgcaataaaaattattattaaatagctaagaggtgtgcatgtgggaaaggtcagtgcatatccctttaggaggggagaatgttgtaatatatcagctatcgagttgtttaaaaaaagtgtattcaatcgtatattgtctatagtatgtgctatgaaatttgcatttatgatatgtaacaggggcaaagccaaattcatgttactctgttcagtcagaaacattttgtggcatacagcattcctgggaagtgctgtactttgtttcgttttggttttagttttgcatttagagtgccttataattgatgcctattttaatagcatttctttttagcttttggttcgtatttccattcactgttcgtatctgttactttctattaaagcattatctgtttaccacatgtacaaaaa

SEQ ID NO: 354420 - DNA, 334 bp, Homo Sapiens
gaaataaagcctcacaagaaataaggtgcttatggtgttaagttacaatggaaaataatcaatggcatttgtatgcatgctgcatgtgtgatgtagatcagttcataggagatggggcaacaaataaatatcaccatggggatgtgatcatcaaaacccaggctgtggaaaactgtcagtcaagtttcttcaacatattgcaagaaaaatatgatggcttgaaaatctatagatgaagcaatttaacaaacctaccaatctcatttaatcttgattacttttaaaaaaagattaaaaagatgacagagaaagggtttaaaaatttgtaagacac

SEQ ID NO: 354421 - DNA, 1678 bp, Homo Sapiens
tggaccggtccggaattcccgggatctacggtggccgcggggcggcggtggcgattggacttggtgggtcccgggccaggggcgggcgccgccatgggtaacctgttcggccgcaagaagcagagccgcgtcacggagcaggacaaggccatcctgcaactgaagcagcagcgggacaagctgaggcagtaccagaagaggatcgcccagcagctggagcgcgagcgcgccctggcccggcagctgctgcgggacggcaggaaggaacgggccaagctgctgctcaagaagaagcgataccaggagcagctcctggacaggacggagaaccagatcagcagcctggaggccatggttcagagtattgagttcacccagatcgaaatgaaagtgatggaggggctgcagtttggaaatgagtgtctgaacaagatgcaccaggtgatgtccattgaagaggtggagaggatcctggacgagacgcaggaggccgtggagtaccagcggcaaatagacgagctcctggcaggaagcttcactcaggaggatgaagacgccatcctggaggagctgagcgcaatcactcaggaacaaatagagctgccagaggttccctccgagccccttcctgagaagatcccagaaaacgtccctgtcaaggccaggcccaggcaggcggagctggtggcagcttcgtaacgtggcctcgtcttgtgggactcacggggatgccccagggactgtggcccacagagagtttgggtcacggccagcccctgaccgggttccctggagcccagtgcgcacggtgctgagcagagctgcagccacgcaggcgcattgcaggaggactccagagcgtctcctggagaccttgagcctgaacgcactcaggcgccactggcctgctctcagtccggattaactctcgaccgagcccagcttctgccggttgtgggctcccccggtggccgaggcccaggcccaacgcctctggtgctgttcccctgcagtcccagccccgcgtggctcgcgctcgtctgtgaggaagacacctccagaccttggggtccccgcgcttcctcttgctcctcgctgctcccattagctggtgcaggcttccgttaaggggtccctcccttggcctggcttcccggcgcacctcagcttccctgctggtggggggatccccaggagaccagcatgtgctgaacctctccgtgcctctgcctccgcaccctagacacccacctccagtttgaaggtggcgggccaggggctttcttgctgaattgacgactccgagagccctgactcccgccttgccactcacggctctgtccactagggctcagccctgctgagaaaggacctccgatgcttgggagacgctgctccggcaggtgcagccccggaagtttgtccatgggggtccccgcggctggggctcatggaactgcgagacccgggaccctcctgccctgcgggtccccgagccaccagcagccaggactggaggctgtggggcatggcgtgacttctcgtgcacagggctggtttggttatgagacgatctcgctgggaccgcccctgcccgtggaaagccacaaggacaaagggagcggccacctcgacccccagacagggcggcccgtattaaagttggccctgcacgccc

SEQ ID NO: 354422 - DNA, 1077 bp, Homo Sapiens
  misc_feature (1002)..(1002): n is a, c, g, or t
aattcccgggattggtgggtcccgggccaggggcgggcgccgccatgggtaacctgttcggccgcaagaagcagagccgcgtcacggagcaggacaaggccatcctgcaactgaagcagcagcgggacaagctgaggcagtaccagaagaggatcgcccagcagctggagcgcgagcgcgccctggcccggcagctgctgcgggacggcaggaaggaacgggccaagctgctgctcaagaagaagcgataccaggagcagctcctggacaggacggagaaccagatcagcagcctggaggccatggttcagagtattgagttcacccagatcgaaatgaaagtgatggaggggctgcagtttggaaatgagtgtctgaacaagatgcaccaggtgatgtccattgaagaggtggagaggatcctggacgagacgcaggaggccgtggagtaccagcggcaaatagacgagctcctggcaggaagcttcactcaggaggatgaagacgccatcctggaggagctgagcgcaatcactcaggaacaaatagagctgccagaggttccctccgagccccttcctgagaagatcccagaaaacgtccctgtcaaggccaggcccaggcaggcggagctggtggcagcttcgtaacgtggcctcgtcttgtgggactcacggggatgccccagggactgtggcccacagagagtttgggtcacggccagcccctgaccgggttccctggagcccagtgcgcacggtgctgagcagagctgcagccacgcaggcgcattgcaggaagactccagagcgtctcctggagaccttggagcctgaacgcactcaggcgccactggcctgctctcagtccgggattaactctcgaccgaagccagctttctgcccggttgtggggctccccccgtgggcccgagcccaagcccaacgcccctcgggtgctggtcccctgcagtccccagcccccgcgtggctcgcgctcccntctgggaaggagacactccccccgaactttgggggtccccgcggcttcctcttggctcccgctggctcccaattt

SEQ ID NO: 354423 - DNA, 798 bp, Homo Sapiens
gcaggctgtaccgcccggaagtatgggataccaaggacttcagaaagttcttcctccgagtcagtcagtggtgccgggaccccaggcgagcctcctcgactcctgaagaaaaggcagtgcccgtggctgcctctgtcttcactcgctgttgatgtgaccgccaggcctcctctcgtaccttggacaaaggatacacctgaaccagaatagttttcttaccctcacattgaaatgaggattttgcttaaaacagcacttgccgccagtgggaggagggaggttttatttattcccacagtttctcctgggccttctggaatgaccatgttttcctgtggcggtgggtgtgtcattgcgcccgccgtcttccaaagccttacttccccaagctgccagccaggaggtgataaccaccctcccagagtttctctcggctctttttttaaaagtcccccaacaaataggattcttgctgggaaaggaagttcggtaaggaaatgtcaaatctggtttttaaacaaggtccaaccctgcaatgaagcagccacttcagcccagagagattataagaactgatgtggccagagtgcctacccactgtggccccggtgctctgcccccacgccccgaccatctggtcttggtagatgtccctagacgggctgagccatgtgcaataagaacatagatcctaaaggatcctctggaagctgtatttcttgaattagaattctcaaattgtacatctgttaatatatgtttattactgtgcacaccacacccagccggacaacagcg

SEQ ID NO: 354424 - DNA, 491 bp, Homo Sapiens
  misc_feature (57)..(57): n is a, c, g, or t
tcatatacatgctattttctcatgtatttttagtacacgctgtgttcccagggaatnaaaatcactgtgatgatttcaatgaaaacattaccttccctttccccatgattctcaggtcctcaaatgaagctagcaaaagttcacatgagccacgttcttatacaactctttcctccagagcaataggtcaggaccaagaacatagtgtggtataacattttggaaaattaatacagtgtgcctaatataaaacaaaaaattaaacagaatcaagtccattaaagacattgtaagtactgtatggggctccctgagtgctccagaggtggtgggaacaagagtagtttacactggaaacctggtcttcctcatgatcaggtcctgtgtatgccattctggtaagtgcacgctagtgggcctgcaggtcctggaagccccagacacatactgcttctctgtgtcagtgaccttcacttagagtcactaattcc

SEQ ID NO: 354425 - DNA, 747 bp, Homo Sapiens
  misc_feature (732)..(732): n is a, c, g, or t
caaccatctttgatgagcttctgcaaatgttcaccgtgcaagaggtggcagagtttgtgagagggacactggggagcatgcccagcactgtgcacattgggcagtcaatggacgtggtcaagctgcagtccattgccaggacagtggatagccgcctgttttctttctcagggcgagtatgtgtcctgccttctctcactgctccgccagatgtgtgacacccatttccagcacctcctggacaacttccagagcaaagatgaactcaaggaatttctgctgaagattttttgcgtgttccggaacctgatgaagatgagtgtcttccctcgggactggatggtaatgagactgctcacaagcaatattatagtcactactgtccagtacctgtcctctgcactgcacaagaatttcacagagactgactttgactttaaggtgtggaattccttactttaccctggcagttcctattcataaatcagccaagccttcagctagaaattatcacctcagccaaaaaggaagaagattctagataagtatggggacatgcgtgtaatgatggcctatgaactgttcagcatgtggcagaatttgggtgaacataagatccactttattccgggaatgattggtccttttctgggtgtgacactggtcccacagccagaagtacggaatatcatgattcccatctttcatgacatgatggactcggagcagagnaaaaatggcaacttc

SEQ ID NO: 354426 - DNA, 839 bp, Homo Sapiens
  misc_feature (142)..(143): n is a, c, g, or t
tttataccttatagtatcactgctactgcactgctattatacccatgaaggctatttaaaccctccaagttcctccgtaaagatatatttcgttttggcaaggtaatattaattagaagcaattaagaaatactggtgaaannaaaatgaaattagggaaccagaatttcttgcataattggacccctgttccccctgcctattccctaaagaccccaaactgtatgtcatagtgggacaagatggacactgggccaccctcccaggcaccagacacagggcacggtggagagacttctcccccgtggccgccttggctcccccgttttgcccgaggctgctcttctgtcagacttcctctttgtaccacagtggctactaggggaccaggccatgcctgcccactggccatcgccaccttccccagactgcactcataccagcagtttactctgaagatgctgtcaacaggttaagtcaatctggggcttccacagcctgcattccagtccccagagcttggtggtcccgaaaacgggaagtacatagttggggcatggtggcctaccgtgagcaaatggtgtcttgggcaatctgaggccaggacagatgttgccccactcactggagatggtgactgagggaggtgggtggggccttatgggaaggtagagtggagaggggcacctgccccccgccctccccatcccctactcccactgctcagcgcgggccattgcaagggtgccacacaatgtcttgtccaccctgggacacttctgagtatgaagcgggatgctattaaaaactacatggggaaacaggtgcaaaccctggaa

SEQ ID NO: 354427 - DNA, 310 bp, Homo Sapiens
acccataaagctctgctgccagccacactgacctcagatatctcacttccccacaccagccatggtccctctcgcaaaggctgttgtatcagcttcactctgccctggaccatcctcctctccacttgcaggtttatctacttatcccctacacatcctgccatctgagctcaagggacttccttagggagagagaccaggttatagtgtctgacttaaatgcttccaggccaggcgcggtggctcacgcctgtaatccctacaaattgggagccaaggcgggcagatcacctgaagtcaagagttcgag

SEQ ID NO: 354428 - DNA, 1042 bp, Homo Sapiens
  misc_feature (159)..(250): n is a, c, g, or t
  misc_feature (835)..(836): n is a, c, g, or t
  misc_feature (838)..(838): n is a, c, g, or t
  misc_feature (889)..(890): n is a, c, g, or t
ggtctatcccatcctccaggtcccagcacagtcccacctcccccagggaatgtgcctgactcctctgcattaggttggaggctctccctgctgtgtgcccatggcacactgtgttcctcatgagatcttgagcttcttgaaggcgagggctgtgactgnnnnnnnnnnnnnnnnnnnnnnnnnnnnnnnnnnnnnnnnnnnnnnnnnnnnnnnnnnnnnnnnnnnnnnnnnnnnnnnnnnnnnnnnnnnnggaacacaggtttcacccttgcagtcagtggaaaaagttggtgagggactgaatccttgttctgttgtttatccatgaagcctatatatttctagtgcaaaaggcccagtgggtctcaaaacattcttggaggggtttgacacactgctattagtagtgactcataattccacgattccctgggatacagagaaggcaggggggtagtactgtttgaacaaaaatcttcccaagaccctggcaaagagatcttccttaggaatcagtggcatatgcgtttatgttctttaacagggaaagtaaaagtgagcgcacttttttgaagctcataaatactcatgtgactgtaaatttagaaatgttaattaattgggcctaatgtttgatctggaaaagtacttagcagtcaccaggaatttgcccttgaactgactcgaacccacaaatccagaacccgtatttcccacaatttaatttttcccatgaggacaatccataaaaactctgctaggattatattactaaaacctttatatcccattgcattggatatgtttgtaggtgagtaatgttaaatttaaaaannanaattaataaagcatttgtttaggacctctgtatgcttgataaagtaaaaannaaatatatgaaaatgttaccctaacctacaataactaaacttgaacataatgataaaagcagaagaaaatagtcattgaaaacactgtagcagagttgaaatgcaacttaaacccttaatgaacttaagcttctttatcaataaagattgtc

SEQ ID NO: 354429 - DNA, 657 bp, Homo Sapiens
  misc_feature (15)..(15): n is a, c, g, or t
  misc_feature (98)..(154): n is a, c, g, or t
  misc_feature (482)..(482): n is a, c, g, or t
  misc_feature (521)..(521): n is a, c, g, or t
  misc_feature (584)..(584): n is a, c, g, or t
  misc_feature (591)..(591): n is a, c, g, or t
acgtcccagcctaantttttaaaaaaaatttttgtaaaagatgaggtcctcactgtgttgccccggctggtcctcaaactccttcaaatgacccctcnnnnnnnnnnnnnnnnnnnnnnnnnnnnnnnnnnnnnnnnnnnnnnnnnnnnnnnnntaaatggaggtgtttaaatgatgcctgggatttgcttcaaactcacgtaggaacaggggctggggaagggaatctaggtgtggatagggcaagactggccaagggttgatggttattgagaccataggccacgagggcattcattttactgggctgctgacttccctgcatgtttgaaattctccacaatcaaaagtaaaagagacagagagataccaagtaatagacaaagtaaagtaaattttactttacaaaggtatgctcattgggaaaagaacatcaccaatccagagtgtaatgttttgaaaggaatactttttcatatttnttgaaaacaaaacacggttataacgaatgtatatttctnctcatccaacaaacaaaccttgaccctgaatgatgttcttcttctgggttttaaattgaattntttatgntaattagatagatattataataccttaatgacctgaggatgctgtaatggttaaggtttgtgaagc

SEQ ID NO: 354430 - DNA, 283 bp, Homo Sapiens
  misc_feature (38)..(38): n is a, c, g, or t
ctgtgtaaaagtctggacctgtggttccccccaactanagtcaggggactttgccttattcctacaacctaggtgttgcacatacaggaaagacggagtttaatttcctaaaatgtagtgagcaattgagttcaggacaagacatacggtgcggtgattcatctggggccgtatttccactttgtaattccagtgtagtgacttcccagcgtgcaagccccgcccaacacggactggcgtgtctctcaggcccagagacccggcatcaactgctcccatcatg

SEQ ID NO: 354431 - DNA, 409 bp, Homo Sapiens
  misc_feature (365)..(365): n is a, c, g, or t
aaggtttggttgacaatattttacctctgacacttgaagaaactatccagaaaacagcctcagtttcacagttaaattctgaagctttcctgttagaaaataaacctgtagcagaaaatacaggaattctcaaaaccaatactttgctatcacaagaatcactaatggcttcttcagtatcagctccatgtaatgaaaagcttattcaagaccaatttgtggacataagttttccatcccaagttgtaaatacaaacatgcagtcagtacagctgaatacagaagatactgtaaatactaaatctgtgaataatacctgatgctactgggtcttataccagggagtgaaagtccagtagaaattngagaaggacgctcagttaaaacaattccttacaccaaaaactga

SEQ ID NO: 354432 - DNA, 431 bp, Homo Sapiens
  misc_feature (351)..(351): n is a, c, g, or t
ccgctctagagtatccccggcttgtgctgagttcactgtatcctcagtggtgctctgagatttccagaggaaggaaaggttaagaggataatggtacaacactggctgtcaaaaacctttcactgattgtctgagtctaggagaagggcagcagagcctccatgggtttgaacagcaacacgacctgtacaggcccagaaacacactgtgagcacaatccgggctggaggcctgctagagagtgagccagggagcagagtgagccacaggagcccaggctggggctacatttctgatgttggcctcattagcatctttccaaacaaaccaatgtaatgcacatctattaantcattcactcaacacaattttattaagtgtctgctctgtgtcaggcaatgagttcatggagttttcactcaagtaaagga

SEQ ID NO: 354433 - DNA, 901 bp, Homo Sapiens
cctatacaggttttgtatttaattaggttccttattcagttattcaagtatccagttatttagtttcaaggtagatttctttgtttttatatttaataaaagacttgcatataagttcctcttcatgaaaatagtggctaggctagtgtgattttaagtatgtctggcaactcaaaatgtaatggattcatcaagctatttgggatttttaacataaaacacactgctgcttgattaatgtgttcagttttcccctggatatttgctattaggctgatagccatttggttggattcttctggagagtaattgattctctaaggtaatggggtgctgcagtgggtgtagcattcacccaggtcactagaatcctacctgtttcatcacatagaaggccctggccatggggaagagtgaatgcagcttctccggatgccttatttccacagacatgctgatatgctggaacagtctggctccaggagtattaatatacttttttgagactgtctacaaaatcctattttgtaaaaactatgcctttacatagacattgataggttatatttgttttaataacaattgtgtaccctaatgtttgtgattaattttgagatttatgtatatttataagccctatccttatgtaaatttttactctaagatgtgtggcacattactaataaagacgtggatttcctatttatgtaaagtaattgtagcaatattcctagatgctacctaaatgattgttctgtccatttgccatcacaaatacttttatctttggatgattatgttagtcagaatatattaattagatttaaactttaaaataagaattacaacatagtttgaaattcttcctgttgaagtaattaaagttagtttataattcctt

SEQ ID NO: 354434 - DNA, 1006 bp, Homo Sapiens
  misc_feature (725)..(926): n is a, c, g, or t
agcgggggtgggcagggcgctggccgcgctgctgctggccgcgtccgtgctgagcgccgcgctgctggcccccggcggctcttcggggcgcgatgcccaggccgcgccgccacgagacttagacaaaaaaagacatgcagagctgaagatggatcaggctttgctactcatccataatgaacttctctggaccaacttgaccgtctactggaaatctgaatgctgttatcacgtatgtatcagttcacactcagttctgtttgctttggggcttgtttgatatgatccttaatgctctcatgtctaaagcccttcacaagttaatttcagttttgcagctaaagaaacaaagaagctatataaagagtcggaagaaatacagtcaggggaggatgcctaggaatgcacagcatctatttttatcttttcatctactcatcctttaaaaagccagttctcagggatgaacaaccttgatagactatgttttattttcctcctctctagtgcataaccctcttgctggaccagagaaggaaggagtgagacaccagggtattctccaggggccagcagagtggtgcaagttgagggagtggcagttattccagggccctgcctccctgatgataacaaatgcattttctctgaaggttttactcctattctagaccttgttgctttttaaggacaaggctattctttcatgtaaaataaaatattcnnnnnnnnnnnnnnnnnnnnnnnnnnnnnnnnnnnnnnnnnnnnnnnnnnnnnnnnnnnnnnnnnnnnnnnnnnnnnnnnnnnnnnnnnnnnnnnnnnnnnnnnnnnnnnnnnnnnnnnnnnnnnnnnnnnnnnnnnnnnnnnnnnnnnnnnnnnnnnnnnnnnnnnnnnnnnnnnnnnnnnnnnnnnnnnnnnnnnnnnnnttacccaaagcagtactgaaaaaacttggggtactagaagcctgaagtagtaccctataaggggctgaaaaaaattaccc

SEQ ID NO: 354435 - DNA, 582 bp, Homo Sapiens
  misc_feature (45)..(45): n is a, c, g, or t
  misc_feature (81)..(81): n is a, c, g, or t
ggacagatctgatgttcaacaggagctggcattggatttttgtcntggtccatgcctggttcatgagcttcctgccactcncaacaggtttcacagtaagcgcgtatctgttccaaaagatgaaggactcggatttcacgcctgcctctcttgtcatcaggctgtgagtgaatgatgttgtggagtgctgcactggccctggcccgagcctctttactgccccgggaatttcccaacaatacagagtctttgtcattgccatgtaaaagctggatgaggagaggaagacatccagactgtcgcatggatatacagctgtcttgggagctagacatagctagcaaagttcgcgacatatcatccttatcatgagtaccaagcattgacaacaatgaatacaccatttccaccttggttcccagatgacttgtcagccttcgaggtgcagagtgtgtgctactagaactcaaaacactggctgtttcatggtccattcgtgtagttgaaccctgaccattaccagaagttgccatgttgatttctcccactccttgaccttcattctgccgcccagcatcatgt

SEQ ID NO: 354436 - DNA, 1028 bp, Homo Sapiens
  misc_feature (567)..(595): n is a, c, g, or t
tttatgtgtctgcatattgcagacacagctctgagagaacagtttcccattaactctttctgaccaatagtgctggcaccgttgcttcctctttgggaagaggaaagggtgtgtgaacatggctaacaatcttcaaatacccaaattgtgatagcataaataaagtatttattttatgcctcagtatattattatttaattttttaggtaatgcctatctcttggtctattaaggaaagaagcaatcagtagagaattcaggatagttttgtttaaattcttgcagattacatgtttttacagtggcctgctattgaggaaaggtattcttctatacaacttgttttaacctttgagaacattgacagaaattatgcaatggtttgttgagatacggacttgatggtgctgtttaatcagtttgcttccaaagtggcctactcaagaggccctaagactggtagaaattaaaaggatttcaaaaactttctattcctttcttaaacctaccagcaaactaggattgtgatagcaatgaatggtatgatgaagaaagtttgaccaaannnnnnnnnnnnnnnnnnnnnnnnnnnnnaatttgaaatcattcttattccctttaagaatgtttatgtatgagtgtgaagatgctagcgaacctatgctcagatattcatcgtaagtctcccttcacctgttacagagtttcagatcggtcactgatagtatgtatttctttagtaagaatgtgttaaaattacaatgatcttttaaaaagatgatgcagttctgtatttattgtgctgtgtctgggtcctaaagtggagcccaattaaacaagtttcatatgtatttttccaggtgttgaatctcacacactgtactttgaaaaattccttccatcctgaataacgaattagaagaggccatatatattgcctccttatccttgagatttcactacctttatgttaaaagttgtgtataattgttaaaatctgtgaaagaataaaaagtggatttaaatt

SEQ ID NO: 354437 - DNA, 549 bp, Homo Sapiens
  misc_feature (15)..(15): n is a, c, g, or t
  misc_feature (27)..(27): n is a, c, g, or t
  misc_feature (52)..(52): n is a, c, g, or t
  misc_feature (61)..(61): n is a, c, g, or t
  misc_feature (67)..(67): n is a, c, g, or t
  misc_feature (84)..(84): n is a, c, g, or t
aaaacctcctatccnttcttaaacctncccgggcaaacctgggatgggatgncaatgaaanggtagngatgaagaaaggttggncccaaattgtttttttgttgttgttgtggttttgaatttgaaatcattcttattccctttaagaatgtttatgtatgagtgtgaagatgctagcgaacctatgctcagatattcatcgtaagtctcccttcacctgttacagagtttcagatcggtcactgatagtatgtatttctttagtaagaatgtgttaaaattacaatgatcttttaaaaagatgatgcagttctgtatttattgtgctgtgtctggtcctaagtggagccaattaaacaagtttcatatgtatttttccagtgttgaatctcacacactgtactttgaaaatttccttccatcctgaataacgaatagaagaggccatatatattgcctccttatccttgagatttcactacctttatgttaaaagttgtgtataattgttaaaatctgtgaaagaataaaaagtggatttaaatacgt

SEQ ID NO: 354438 - DNA, 344 bp, Homo Sapiens
cgcgcgttgtagactgttcgctctggacgccgttcagtcgctgtcacaccacggggcggatgtcgcctctgacagctacatctgctttgccagcagagaagatggctgcgtgtaagatcatcctgccactcagagaggtggtgagcatcgagaagatggaggacacgagcctgctgccgcatcccatcattgtcagtatcagaagcaaggtggccttccagttcattgagctccgggaccgagacagcctggaggaggcgctgcttgcgaggttgaagcaggtccacgccaaccaccccgtgcactacgacacctctgcggatgatgacatggattcactcgaa

SEQ ID NO: 354439 - DNA, 1276 bp, Homo Sapiens
aatttttatttaaactcgacttccttcctttaggtttcttttacggctggtaccggtccggtattcttcggatctcaagatcaaacccacgcagtgctgagagcttggcctgattctagggctggggctggagaaactgctagagatgatgccgatagccagtgtgatccccctgccctgatggtcaagggcagagtgcagactggaaccctcccctccccaaagattcagacctgtggggctgagtgggctcatagtgtccccaagtcctgagaggctggtgtctggcttcagcctccagcttctcaggttctgatgcagtcagctgagttccctgcctattcttgcaagcactaggaggagggtggtgggttgctgggaacagcaccgagcgccctccccacccagattcacagagcacactccccggggggatactttaatccggaggccgtgacgcctgctccgccccgagacgagctgaatccaaatacggatctaggcttgagcttggttgggtttgcttttttcttcttcttctttataaacaattctttgtaactttttttgtattgacagttttccaacctttctgttaaattgccacccccattatgaaaaagctcctctcacctggtgaattcaccacccttgttttgctctttggcccccttcctgaatattaatccctggaagaactagacaacctttccttgtttattcttccccactggtccacgggggccccccgggttaaaacgtcggctaagaacaacctcatcggcctcctcacttttgaaactcgcccctcctttataacgttctcccagccgccgcccccttatccacctaggacgctgacatagaaaatccatatggcggcgtccggttttctcattcacctcactccctcgtgtgctcctgtatagaaagggccgctcctccatcaggatgaataatcctctcgccctttgtggtacacactctctctgacgcttatatctccccataaacatcctattgaaacaccccataccccgcgacaccccgattgtgactttctcagcgaattttctttcgcgcaccactaaattttatttaccccctccaagatacagttctggaccacgcccgtgtaaatgtatgtatcgcgctccctcgcccattgtccctagagcgaaaatctcctttacgcgctttatatactcgcaatagcggtcctatcttctcaacccactggcacacccctataccgtttgctcccgcccgtgacccc

SEQ ID NO: 354440 - DNA, 680 bp, Homo Sapiens
  misc_feature (24)..(24): n is a, c, g, or t
  misc_feature (27)..(27): n is a, c, g, or t
  misc_feature (60)..(60): n is a, c, g, or t
aaagaatacttgcagggcaccacncanctgcacaggatgttgtcctagcccacactgtanctctggtttcagtaagatagtctgaagataagccagatacttctagatgtgagacctgtaataacaccaatgatttacataacaggaggatatgggatactgacagcttctaatgcattctgtaagtccagtagagtagtgatggcagcattgcaggatggaaagacctgtaaaatacctgcagagaacaggtgtatattcaacccatgagggaaaatccctcacctcaaaggagaaagaagtacaaagtaaccaatcttccacagggtagctggttgcctttcccctctctttgaacaaagacatattgtgggctcagttttggaatctggtattggcaagttgagctcttggtaatggaagtagccagaggatatttggtaatggaagtagccagaggaaaacaatgtttgaaggggtcaatttctgtgatagagagcagggcaggacaagcataaaaagcagatataaaagcaaccaggcaaatcactggcataggagctttcttgtgataactttcatatgtacttccactttctcccctccaatcttaccgtgttattttagtacttctagtatctccccttacacatttaaatacacatatcctgttatgattt

SEQ ID NO: 354441 - DNA, 846 bp, Homo Sapiens
  misc_feature (171)..(171): n is a, c, g, or t
  misc_feature (201)..(247): n is a, c, g, or t
cagctttaaaacttagctgtcgttcagttaagcttaaagataggttaatttgtaaatggcaaagtttgttttgaggtttttcctcaataacttgtttcccaggcctattaggcattctctaaaattgatctagctgttttatttttatgtactcttagttttatgtaaganaccttagggatgagctcccttttctaaggnnnnnnnnnnnnnnnnnnnnnnnnnnnnnnnnnnnnnnnnnnnnnnnccatttacggcagtggtaccatgttttgggatgtgtgatgtttatatgggagaacaaaaagctgatgtatagccctgtatacagtgtagatactatttttgtaaaaacacaaggctaaattaatgaacaagaatactgaatatttcatcattaaaaatttcttgtatttcttgtgcattaatctgacgataatttccctgtatattatgttcatttagctgtttgtaatttttgttaattagatcaggttgtctgcatttgttggtgtaagtgaacatcatcacagttatcctgagttgagtttaagccaaatacatgcatagaaaagggtcttcctattaatggaagaaggtaatttttaggatgtgtattatttcagttttgtatgtttaacttttattaaataaagtgtttttaaaatctctgggccgagaaactacggggcaggcggggaaacagcaggcagtgtcccagcacatacatgaacgaaacactggctccctgtctgttgtacccacaacggagctcctgggcttttttcccatttgaccggcccggattgtttcagggtttttttgggcgggctctcgctgcccctt

SEQ ID NO: 354442 - DNA, 2027 bp, Homo Sapiens
  misc_feature (302)..(471): n is a, c, g, or t
  misc_feature (511)..(511): n is a, c, g, or t
  misc_feature (582)..(582): n is a, c, g, or t
  misc_feature (1846)..(1981): n is a, c, g, or t
ctttgcccgtgtgtatttcacagtacaaggttttgcctctgaatgggttgagtccattatgtacgtcccgacattgctctaatcttcgaccccttggcctcacatccccttttctttgcttacattcctacattggatataccagaagcctccaggatggccatggagaagggtgcacttcgaaaatgaattgctaaaattcttgaatgagcaccgtagaaccttctattgttgggccccaaagcctcctcagtgtgggaactccgatactataaagggctgtccctttaaaacagttgaannnnnnnnnnnnnnnnnnnnnnnnnnnnnnnnnnnnnnnnnnnnnnnnnnnnnnnnnnnnnnnnnnnnnnnnnnnnnnnnnnnnnnnnnnnnnnnnnnnnnnnnnnnnnnnnnnnnnnnnnnnnnnnnnnnnnnnnnnnnnnnnnnnnnnnnnnnnnnnnnnnnnnnnnnctgtaaggaatgagaaaccaggggatcactcacttacttnccatgaccacccttgtcacagaaaattcctccatggtataatcatgaagaagaatgaccaaaccatcaaanctggaaggatctagtatacataggttgaattttcaaccgtcttcgtgtccctgcagctttggcattttgataggtatcctcccttcaaggctacatcttctgggttactaccacctttcccaggatctgtggccggcagtgctcacttccagggctaggctgagcagacatgcacccatgcaccctggtggccccatatatccgtagtcaggttgattcaggacttattaaaatataaggctgattggattataaggggcaatatcttcaggctttggcctttggggaacagtgttcataagatcattttattactatggccttctcagtggagccatgagccacaacttgtgagtagtatatccatctctattaataaaccctctgcaaaagcccatttttccatcccatcacaggggttggcttatgaagtcggcttcttaactttagcttagtcagtgccaaggaataaggaaagcaaaaataaagtatgatgaggaactgcgcttggtgatctgggtcacttcagcacttattccctgtgttaaatgtgtgattaggacaattcccccgccctctccaaataatggcaataaagagttcttaaggtctcatgcagatatcttcttgaccttgatttggaggactgagtccccttcagtcaggcaaattttacctaaatgcagggtttctatgtggatgccatcccaagtgaggatgtgaggtgtctgtgagaagcagcaggctaccatttctctcttcctactcttttagaatactttaggaaatagttactcctcagaccactgtaaggggttatccctctgagtagtgtgacccttgtttcagagagctagaagtgaagagatggtgagattaggtacacttagtcttgcaaaccaggaaaaccagaaggcaagacattaagagagaaaaagaagccctctattttgtctttagtacttaaggaatatggatagatcagttggaaagttggcaattcaagactaaaacagtataccaaccaatgaacatttcattgtagggtcttcccatggacttgtagcagatttgtcttccctgccagcctctaccttcccaatggttagacatgaaaaagacatgggtacttaaggattgacacaaagacagagataagcaccgtagagctgccacaaagcatagattttaaaaaatactttgaagcctcagaaggtaggaaacagcaacagcaaactgctcttgtgtgtgtgagagagggagnnnnnnnnnnnnnnnnnnnnnnnnnnnnnnnnnnnnnnnnnnnnnnnnnnnnnnnnnnnnnnnnnnnnnnnnnnnnnnnnnnnnnnnnnnnnnnnnnnnnnnnnnnnnnnnnnnnnnnnnnnnnnnnnnnnnnnnngccgaacgcgtgggtcgacgatatcccggaattccggaccgtacca

SEQ ID NO: 354443 - DNA, 991 bp, Homo Sapiens
  misc_feature (28)..(28): n is a, c, g, or t
  misc_feature (56)..(56): n is a, c, g, or t
aataaaatgatcttatgaacactgtcgnccaaaggccaaagcctgaagatattgcnccttataatccaatcagccttatattttaataagtcctgaatcaacctgactacggatatatggggccaccagggtgcatgggtgcatgtctgctcagcctagccctggaagtgagcactgccggccacagatcctgggaaaggtggtagtaacccagaagatgtagccttgaagggaggatacctatcaaaatgccaaagctgcagggacacgaagacggttgaaaattcaacctatgtatactagatccttccagtttaagggttgggtcattcttcttcaagaatataccatggaaaattttctgtgacaagggtggtcatggaagtaagtgagtgatcccctggtttctcattccttaaaagcagtggttcgcaaagtatggcacaagaccagcagcatcagcagcctttgggaacttgttagaaacgaaaattctcaatcccatcccagatctgctgaatcagaaactctaatgagaggacccggcaatccacgttttaataagccctcctggtgattctgatgcacactaaattcaactgttttaaagggaaagccctttatagtattggagttcccacactgagaggctttggggcccaaaataagaaggttctaggttgtcattcagactttaacattaatttcaaagtcacctttctcatgcttccttgtgtttctgtttttccatttatgattttaacaaagaaaggtatgtgtgcttttgggtggaagttaggagaatgtttgtgtctttcctagttgaatacaaccttcagagaaaaaccttatgccttggaaattactacctggcacacaaaggggcttcaacaaggaaaagcagttggaggtctcttccagattgctcttctgccgaattatttgtatctattccgagctgattatgtaataggatggaaaaagtaaaaaa

SEQ ID NO: 354444 - DNA, 684 bp, Homo Sapiens
  misc_feature (7)..(7): n is a, c, g, or t
  misc_feature (97)..(97): n is a, c, g, or t
  misc_feature (106)..(106): n is a, c, g, or t
  misc_feature (118)..(121): n is a, c, g, or t
agaaaangatcctggaagtttatttgatctgacatgtttttgtaatatttagaaatagctcttgtatcataaaaagttgcccagtataagacacacnagatgtatntttttctctggnnnnaatcatgcctatcactagtatatgttggacattgctagtatacttaaaatagtattgggtgtgaggcatggtggtgatgaaaagtagtccttacggctacttgttagtcattagagagaacatggagaagggctcaaagttggtatcattaacagggcaatgacttgacccttctatcaactgatcttactggtagttgtctctagtttttaagtaaattaatgatggaccatcccccaaacagagaactatgggggtatgaaacaaggctgaaggcttttaaccatgggagaaaaaggtgttggtattattcatatagcataacctgaggttggagaggaccacttgggagcctgtaaccaaaactagaaggtaacttctgggatggacggaggttcccttgaagcagtgccaacctaaatctacctcaggtaagtagttagattaactttttcaagatttcagaccaaacaagacaacttgtattcagttgatgtattcctatgctttaatgtttttgtttgcccttaattattaaataaacatttgttctgaaaaactcc

SEQ ID NO: 354445 - DNA, 506 bp, Homo Sapiens
ccccaatctggaggaaaggactgcaagtgtctgaatgaagagtgcttgtcaatgatcaactcttgtggtacatcaggggaactcacataggtgaaaaaacccatacttaccttgagtctgagaaaacctttggtagaagctcctgtcttatcaggccccaaaaaacctgttctgcagtgagagatttaattgtggttctgccaaggaaagagaaaataccttttaatcccagggaaaggattgcaatcaccacattataagcataacctgaggttggagaggaccacttgggagcctgtaaccaaaactagaaggtaacttctgggatggacggaggttcccttgaagcagtgccaacctaaatctacctcaggtaagtagttagattaactttttcaagatttcagaccaaacaagacaacttgtattcagttgatgtattcctatgctttaatgtttttgtttgcccttaattattaaataaacatttgttctgaaaaactcca

SEQ ID NO: 354446 - DNA, 538 bp, Homo Sapiens
gaataggctgttacaatgggaatcttctagaatgatgatattataactagaaggtagcgcatttcttcagaaaagacatgcagctgactttcccttcacccaggatatatttttcaaatcctttctccagagctgccaaaaataatggtacaatactgatgctggagctatagaaaagaaaataaattgtggtgatgggtagatttttcttcactgaggatctaattacagggaattggacttaacctaatcagactttaacgacaatttcctaagagtaaattagggaacaaattactgtgagatgagttgcagaatctttttcagaggtttggagaaagacagaatgtctgttcacctgtttggccccatttagtattggcttaaccaggcgctggcagcagttcctagcatgctgggtctgaaattgtgacatgtataggagcagcagcattggaggctcctcaaggaggacaaagcacctaaacagggatggggcaggtgagttgaaggaacaggaactgcttgtgacagtcgt

SEQ ID NO: 354447 - DNA, 1220 bp, Homo Sapiens
  misc_feature (111)..(111): n is a, c, g, or t
  misc_feature (921)..(921): n is a, c, g, or t
  misc_feature (997)..(997): n is a, c, g, or t
  misc_feature (1007)..(1007): n is a, c, g, or t
  misc_feature (1042)..(1042): n is a, c, g, or t
tcccgggatcaaacaaccaccaccggcccaccccgcccctccttccctcttcactgtgagctcagagcagcaggacaaagtgctcgggacaaggacatagggctgagagtngccatgggatctggaggagacagcctcctggggggcaggggttccctgcctctgctgctcctgctcatcatgggaggcatggctcaggactccccgccccagatcctagtccacccccaggaccagctgttccagggccctggccctgccaggatgagctgccgagcctcaggccagccacctcccaccatccgctggttgctgaatgggcagcccctgagcatggtgcccccagacccacaccacctcctgcctgatgggacccttctgctgctacagccccctgcccggggacatgcccacgatggccaggccctgtccacagacctgggtgtctacacatgtgaggccagcaaccggcttggcacggcagtcagcagaggcgctcggctgtctgtggctgtcctccgggaggatttccagatccagcctcgggacatggtggctgtggtgggtgagcagtttactctggaatgtgggccgccctggggccacccagagcccacagtctcatggtggaaagatgggaaacccctggccctccagcccggaaggcacacagtgtccgggggatccctgctgatggcaagagcagagaagagtgacgaagggacctacatgtgtgtggccaccaacagcgcaggacacagggagagccgcgcagcccgggtttccatccaggagccccaggactacacggagcctgtggagcttctggctgtgcgaatacagctggaaaatgtgacactgctgaacccggatcctgcagagggccccaagcctagaccggcggtgtggctcagctggaangtcagtggccctgctgcgcctgcccaatcttacacggccttgttcaggacccagactgccccggggaggccagggnagctcccgtnggcagaggagctgctggccggctggcagagcgcanaagcttggaggcctccactgggggccaagaactacgagttccaagtgagaccattcctctgggccggggctcgaaggccctggacagcaaacgtgctggctccctgaagggctgccccggaaaaaaatggcccagtggcccccccaccctccagggaaaggtgaactcctaaaagccc

SEQ ID NO: 354448 - DNA, 899 bp, Homo Sapiens
  misc_feature (882)..(882): n is a, c, g, or t
tggaccggtccggaattcccgggatggactagggctgagagtagccatgggctctggaggagacagcctcctggggggcaggggttccctgcctctgctgctcctgctcaggtcccagctgtcaggcgcctcccaccccagctggcccagctctccagcccctgttccagctcagacagcctctgcagccgcaggggactctcttctccccgcttgtctctggcccctgcagaggcttggaaggccaaaaagaagcaggagctgcagcatgccaacagttccccactgctccggggcagccactccttggagctccgggcctgtgagttaggaaatagaggttccaagaacctttcccaaagcccaggagctgtgccccaagctctggttgcctggcgggccctgggaccgaaactcctcagctcctcaaatgagctggttactcgtcatctccctccagcacccctctttcctcatgaaactcccccaactcagagtcaacagacccagcctccggtggcaccacaggctccctcctccatcctgctgccagcagcccccatccccatccttagcccctgcagtccccctagcccccaggcctcttccctctctggccccagcccagcttccagtcgcctgtccagctcctcactgtcatccctgggggaggatcaagacagcgtgctgacccctgaggaggtagccctgtgcttggaactcagtgagggtgaggagactcccaggaacagcgtctctcccatgccaagggctccttcaccccccaccacctatgggtacatcagcgtcccaacagcctcagagttcacggacatgggcaggactggaggaggggtggggcccaaggggggagtcttgctngtgcccacctgggccct

SEQ ID NO: 354449 - DNA, 471 bp, Homo Sapiens
  misc_feature (357)..(357): n is a, c, g, or t
  misc_feature (433)..(433): n is a, c, g, or t
  misc_feature (435)..(435): n is a, c, g, or t
  misc_feature (458)..(458): n is a, c, g, or t
tctcctggcctcgggctgaggcctcttcccggctgtctgcccctggcctgcgctggaccctgcctaagtgccccacagtggcaacgaggtcccggtcccggggctggggtgggagaccccgggctgagtgctgtggctttctggtggggggcgatggaaacaggaaaccaagcagtgggatcgcagcgttggtcactgcgaggcgagtggcgggctttctgtttctgccttgtccctccccacggtaactggttcccaggtgaaaatgaaaggaggggagaagttgagaacagaacattccataaaggatatttcctaataggctgcaagatgctgatgccgagaatgatgattttntttcctgcagatgaaactattagaaagggtcttagattgtggcaggtaggctttggagcaggcgccgagacatttntnagcatgaggacgagctacagcanctcctggggtggg

SEQ ID NO: 354450 - DNA, 1117 bp, Homo Sapiens
  misc_feature (873)..(873): n is a, c, g, or t
  misc_feature (931)..(931): n is a, c, g, or t
  misc_feature (935)..(935): n is a, c, g, or t
  misc_feature (939)..(939): n is a, c, g, or t
  misc_feature (1008)..(1008): n is a, c, g, or t
  misc_feature (1030)..(1030): n is a, c, g, or t
  misc_feature (1039)..(1039): n is a, c, g, or t
  misc_feature (1042)..(1042): n is a, c, g, or t
  misc_feature (1048)..(1048): n is a, c, g, or t
  misc_feature (1057)..(1057): n is a, c, g, or t
  misc_feature (1062)..(1062): n is a, c, g, or t
  misc_feature (1068)..(1068): n is a, c, g, or t
  misc_feature (1077)..(1077): n is a, c, g, or t
  misc_feature (1079)..(1079): n is a, c, g, or t
  misc_feature (1082)..(1082): n is a, c, g, or t
  misc_feature (1086)..(1086): n is a, c, g, or t
  misc_feature (1099)..(1099): n is a, c, g, or t
  misc_feature (1103)..(1103): n is a, c, g, or t
  misc_feature (1113)..(1113): n is a, c, g, or t
  misc_feature (1116)..(1116): n is a, c, g, or t
ggacagtgggcgggaggctgccaacggttttgagcgtagggggaggcgtgagacggggtgatctcagtgagaggaggtcaatcgcttgccccccactttggcaaattggggactgaggactggaagggtggagagtaggcggaaccaggtggtcgtcggggcagaggatctcgggctaggcttgagggcggcgtgcttcttagggacgacttagggcgtgactgagggttcacaaggtttcttttggggtggtcgggagggagagattctagggaacaaggaagctcgctatggctttcttgccaggaggggtcgaagggaaagtacaagggagctgaccctgggtagaacgggtgaagggatgggggagcgtgaggttccgccctctcttgagactggaaccaattgagggactagtagggcagggggacagaaattgggctcctagtggatttgggtccgtttccgttgggacgttatgggtgtgagaacttaagagctcagttgaccggggatagcctgtgccggagttgatctgcagcttccagcactcgtagtcgggaagaggagcttcagcagcgctgttgtcccacagtaggtcttctgtccgcacccgctctgcgctgcaccctcttaacgctgttcccaggagctggggaaagggatgcttttgcccactcccatgggcccctgggaactggtggaaaccttttcctctaaccagaaagcctcgatatccttaattcaccaaggatccttggcgtggagtcttcctcccttctcccaagtctttctccgtgaacttttcctcctggactttgctaaagcagaacctcccagctctttgctgtctccggttgtctcttccctgtnttcatggcaacatcagctgacagccccagttcacccctcggggcgggaggatctcctnagtnattnatcagaaccccctgggctcaaccaagtgtcgtctgaagtgacctcccagctctatgcttcttttcgctnagccggcagggtaggccacggnccgagcccnctntttttnccctccacntcccncctcangaaggttananggnttcnccaaaaattaatngaanttttaattgnttng

SEQ ID NO: 354451 - DNA, 1237 bp, Homo Sapiens
  misc_feature (17)..(18): n is a, c, g, or t
  misc_feature (23)..(23): n is a, c, g, or t
  misc_feature (30)..(33): n is a, c, g, or t
  misc_feature (37)..(37): n is a, c, g, or t
  misc_feature (40)..(40): n is a, c, g, or t
  misc_feature (44)..(44): n is a, c, g, or t
  misc_feature (47)..(48): n is a, c, g, or t
  misc_feature (54)..(55): n is a, c, g, or t
  misc_feature (59)..(59): n is a, c, g, or t
  misc_feature (73)..(73): n is a, c, g, or t
  misc_feature (82)..(82): n is a, c, g, or t
  misc_feature (92)..(92): n is a, c, g, or t
  misc_feature (94)..(94): n is a, c, g, or t
  misc_feature (113)..(113): n is a, c, g, or t
  misc_feature (115)..(115): n is a, c, g, or t
  misc_feature (119)..(119): n is a, c, g, or t
  misc_feature (144)..(144): n is a, c, g, or t
  misc_feature (150)..(150): n is a, c, g, or t
  misc_feature (152)..(154): n is a, c, g, or t
  misc_feature (158)..(158): n is a, c, g, or t
  misc_feature (162)..(162): n is a, c, g, or t
  misc_feature (186)..(186): n is a, c, g, or t
  misc_feature (188)..(188): n is a, c, g, or t
  misc_feature (194)..(194): n is a, c, g, or t
  misc_feature (205)..(206): n is a, c, g, or t
  misc_feature (216)..(216): n is a, c, g, or t
  misc_feature (223)..(223): n is a, c, g, or t
  misc_feature (250)..(250): n is a, c, g, or t
  misc_feature (259)..(259): n is a, c, g, or t
  misc_feature (268)..(268): n is a, c, g, or t
  misc_feature (271)..(271): n is a, c, g, or t
  misc_feature (275)..(275): n is a, c, g, or t
  misc_feature (277)..(286): n is a, c, g, or t
  misc_feature (288)..(288): n is a, c, g, or t
  misc_feature (292)..(292): n is a, c, g, or t
  misc_feature (295)..(295): n is a, c, g, or t
  misc_feature (303)..(303): n is a, c, g, or t
  misc_feature (313)..(313): n is a, c, g, or t
  misc_feature (322)..(322): n is a, c, g, or t
  misc_feature (327)..(327): n is a, c, g, or t
  misc_feature (329)..(329): n is a, c, g, or t
  misc_feature (340)..(340): n is a, c, g, or t
  misc_feature (343)..(343): n is a, c, g, or t
  misc_feature (354)..(354): n is a, c, g, or t
  misc_feature (358)..(358): n is a, c, g, or t
  misc_feature (960)..(960): n is a, c, g, or t
  misc_feature (988)..(988): n is a, c, g, or t
caatgagagaacaaagnngaganacgccannnngggnggngtcnagnntgcccnngggntcctcatgctactnaaagaaggnagatattttnanacagtgaaggaagattttnantctngggggctgttgcaaggcggcgaggnacagcntnnntggntatntttttttgggggattttacccatntnggagtntgtgttccttnnggggacattntcccctnggccatcagtgccgctgtgttccagcntcttcaggnagagcaggngancgtnannnnnnnnnncncccnggngccgagcntggtagagtngcaacagtngagananctccatcagcngcnttgggaatgtnagcncatctccacctctctctggggaaccactgctgggaccacctgccttgtgaatgggaggaggaaggctcagggacccggaaaagactgaatgccatggctaagggaactttgctttttgtgggacagccggtggaatacgtggcacttgaggggcttcctccccaagatgggacagtcagaggaccagacttagggggcaacagctcgacagaagggttctcattgttctggggcactgtctccagcaactggtgcaaaaaattcttgaggcccctccagctgagcaggcggcagcccttgctttaggaggccctccccgtcaggtccaggatcttcctccagggaatggcctttctgccctatgatcgggatggaaggccccaagtgcagagaaggccccagctgtggatgaagtgaggtctggtttgggctccaggggctggaaagaatgctggctctgaaaagaggggcccaacaggaggctaagatctgaggaggaactgcaaagaacaggaggcgctccaggtagctcgtcccttgcttcccggctctgctgcaatacaggcttcagggccacggccatggggaggcatagtccaganccctcctctcctccttctccggctcctngaggcccggggctgggagggtccagaaggaggagcttgagggttgggcggcgggagagtggtgctgagcagctggttggcctcatcccagtgggcctgcagcatggcctgcagtctttccaccagctccacccgctgctcctccagctgctggttcccactctgcagttcgcacactcgcgcttgctcccgggccagtctgagctcgtagtcctcagccacctgctgttgccgttcctctcgttctgcc

SEQ ID NO: 354452 - DNA, 2279 bp, Homo Sapiens
  misc_feature (2165)..(2165): n is a, c, g, or t
  misc_feature (2207)..(2207): n is a, c, g, or t
gtaagagctcagttgaccggggatagcctgtgccggagttgatctgcagcttccagcactcgtagtcgggaagaggagcttcagcagcgctgttgtcccacagtaggtcttctgtccgcacccgctctgcgctgcaccctcttaacgctgttcccaggagctggggaaagggatgcttttgcccactcccatggcccctggaactggtggaaacctttcctctaaccagaaagcctcgatatccttaattcaccaaggatccttggcgtggagtcttcctcccttctcccaagtctttctccgtgaacttttcctcctggactttgctaacagcagaacctcccagctctttgctgtctccggttgtctcttccctgtattcatggcaacatcagctgacagccccagttcacccctcggggcggaggatctcctgagtgattcatcagaaccccctgggctcaaccaagtgtcgtctgaagtgacctcccagctctatgcttctttgcgcctcagccggcaggcggaggccactggcccgagcccagctgtatttaccctccgactccccggctcatgaagggttagacggcttcgcccaagaattgagtcgaagcttgtcagtcggattggacacagaacttgcaagaccacggatggttctaaggcatatcttcgagatggcaacgtgtcggggtcagctccagaccatgctccaaacctcacgtgatacagcctatcgggatcctctcattcctggcgcctggctcaaagagacgggaagagcgactcctttgacagtgatagcacagccaccttgctcaacacccggcccctgcaagacttgtctccatctagctcagcccaagccctggaggagctgtttccccgctacaccagccttcggccagggcctccactcaatcccccagattttcaggggctgagagatgcattggattcacgagcatacccgccgcaagcattgtgagcgccatattcagagcctgcagacccgagtgttagagctacagcaacaattagccgtgcctgtggctgccgaccgcaagaaagataccatgattgaacaactggacaagaccctggcccgtgtggtggagggctggaaccggcatgaggctgagcggacagaggttctcaggggacttcaagaggaacaccaggcagcagagctcaccagaagcaagcagcaggagacagtaacccgcctggaacaaagcctttctgaggccatggaggccctgaatcgtgagcaggaaagtgccagactgcagcaacgggaaagagagacactggaggaggaaaggcaagctctgactctgaggttggaggcagaacagcagcggtgctgtgtcctgcaggaagagcgggatgcagctcgggctgggcaactgagtgagcatcgagagttggagactcttcgggctgccctagaagaagaacggcagacctgggcccagcaagagcaccagcttaaggaacactaccaggcgctgcaggaggagagccaggctcagctggaaagggagaaggagaagagccagagggaagcccaggccgcctgggagacccagcaccagttggcattggtgcagtctgaggtgcggcggctggaaggagagctggatacagctcggagagagagagatgccctgcagctggaaatgagcttggtgcaggcccggtatgaaagccagcggatccagctggagtcggagctggctgtgcagctggagcagcgggtgacagagcggctgccgcaagctcaggagagcagcctacggcaagcagcctccctcaaggaacatcacaggaagcagctgcacgacctgagtgaacagcaccaacaggagctggccagtcagctaacctcggttccgggggggaatggcagaaccgaagcgaacggtaccccccggcgggcccgaggacctccaagctcccactgggcctccgaagccaaccggtaacgctcccaccgcctacgtgtgcaatccgcagtctgaaccacccattacccgtcccttccccccacactacgcgcctctccgcccccgccatccgcgtggaccccgctcctccgccctgccgcttacggcctattccccgttacgtcgccaccgccgtccatggcgtgttgtcgngcgccgcgagcgcgcggaccgccgaggggcgcaggcccgtangccgatcgcccccgttacggattgcctcttaccgcgtgtcggcgtgtaccgccctgtatgccccgtatcgct

SEQ ID NO: 354453 - DNA, 1005 bp, Homo Sapiens
  misc_feature (841)..(867): n is a, c, g, or t
aggtagcgaggcctgggtggcgaattcggcacgagggtcgggaagaggagcttcagcagcgctgttgtcccacactgacagccccagttcacccctcggggcggaggatctcctgagtgattcatcagaaccccctgggctcaaccaagtgtcgtctgaagtgacctcccagctctatgcttctttgcgcctcagccggcaggcggaggccacggcccgagcccagctgtatttaccctccacctccccgcctcatgaagggttagacggcttcgcccaagaattgagtcgaagcttgtcagtcggattggaaaagaacttgaagaaaaaggatggttctaagcatatctttgagatggaaagtgttcggggtcagctccagaccatgctccaaacctcacgtgatacagcctatcgggatcctctcattcctggcgctggctcagagagacgggaagaggactcctttgacagtgatagcacagccaccttgctcaacacccggcccctgcaagacttgtctccatctagctcagcccaagccctggaggagctgtttccccgctacaccagccttcggccagggcctccacgtcaatcccccagattttcaggggctgagagatgcattggattcagagcatacccgccgcaagcattgtgagcgccatattcagagcctgcagacccgagtgttagagctacagcaacaattagccgtggctgtggctgccgaccgcaagaaagataccatgattgaacaactggacaagaccctggccccgtgtggtggagggctggaaacccggcatgagctgagcggacagaggttctcaggggnnnnnnnnnnnnnnnnnnnnnnnnnnnagctcaccaaaagcaagccgcaggagacagtaacccgcctgggacaaagccttttctgaggccctggaggccctgaaatcctgaacaggaaaagtgccagactgcaccaacggggaaagaaagaacctgggagggaga

SEQ ID NO: 354454 - DNA, 360 bp, Homo Sapiens
  misc_feature (280)..(280): n is a, c, g, or t
  misc_feature (349)..(349): n is a, c, g, or t
caacaacacggctctctttgaggagagtggcctcatccgcatcactctgggcgcctccaccgtctcctctgtgagcagtgcccgctccggccggacccaggaccaggacagccagcggggccgcagctacctcagggacaatgtcctggttcgacatggctcagccgctgaccacactgaccacagcctccaggctcatgctggccccactgacctggacgtggccatgttccatcgagatgctggcgcagactccgactctgacagtgacctgtccttngaggaggagaggagtctctccattccatcttcagaaagcgaggacaatggccggacgcgggggcgcttncaacgggcact

SEQ ID NO: 354455 - DNA, 474 bp, Homo Sapiens
  misc_feature (46)..(114): n is a, c, g, or t
ttttttttagtagagacaaggtttcaccatgttggtcaggctgggnnnnnnnnnnnnnnnnnnnnnnnnnnnnnnnnnnnnnnnnnnnnnnnnnnnnnnnnnnnnnnnnnnnnncagccaagaaaaataatactcttaaatacttagatgttcacctaaagttgatattatttggtatgggaattacttttgaactgtaatctttcagattacaccactttgaaaacaagttttaacagtagggtaaaaatatagtttttgagggtattcccaacttgtgatcttctaccactttagagacattcaagtaatagttttcttagagctttgcacattcctattcactgagattttaaaaatttcacctttattcgagggaaggatcaatgcttattaccatttggaaaaacgaagatcagaaggtaaatgatctttattttctagctttaaagggaaattaaaccattcatgaat

SEQ ID NO: 354456 - DNA, 1169 bp, Homo Sapiens
  misc_feature (12)..(12): n is a, c, g, or t
  misc_feature (32)..(32): n is a, c, g, or t
  misc_feature (65)..(65): n is a, c, g, or t
  misc_feature (115)..(115): n is a, c, g, or t
  misc_feature (119)..(119): n is a, c, g, or t
  misc_feature (389)..(390): n is a, c, g, or t
  misc_feature (397)..(397): n is a, c, g, or t
  misc_feature (408)..(408): n is a, c, g, or t
  misc_feature (419)..(419): n is a, c, g, or t
  misc_feature (481)..(481): n is a, c, g, or t
  misc_feature (549)..(549): n is a, c, g, or t
  misc_feature (563)..(563): n is a, c, g, or t
  misc_feature (645)..(645): n is a, c, g, or t
  misc_feature (695)..(695): n is a, c, g, or t
  misc_feature (704)..(704): n is a, c, g, or t
tgactgccagtncccatagtaagggaaaccanctcttggaataggaaataatgggggcagttttncttcccacaagatcttaggttacattgatcatcacttgagattgcatgantgtncttgctgtaatggcaaaaacatagacttaggaaagagaaaggagggggtgtctaccatcaggaatagtaatacccctcaaaaggcagtgtggtctcccagctatgcagagaccaagaataaccagcaggcaggaatatggcagtggtgacaggctggatagagctttctccaaccaaaagatggggctccttcatgggcaatgtgcttttccctcttctggcacctcaacaacttgaagagagtgggtgccactaaatgcactggcaatnngggctgngggagaggagngggcagcaatntgaatgataaacctgtgccaagatgaatctatttttaaaaaacatcgccctgcttccttttnggcttgtgccccataggtgccttcaagagggaatttgctggagtctgaagcaagaggggtatgagtcngggactacagaacnggggcactacaccaccacctgcagaagccaagaaggggaaaaagctacgtgggccaacagtcaggcatgccagacagggtgngaggctcagcagccccccatgaacctttggctcttgcctatcccaaacangaggcaccngctggcagcctgcttcagccagcaaatacagcctgcccctgtcccagcagtccttcagctgggtgtagtagatgtggaagtagagagtcttgttgcggcagcagggagtaggagttgtcgaacttgagcaggtagatgccctcaccagggtagtcatgggctgccagcctgcacgtctcggtggctgtcccgccggtacacaggcatgacctccccatagcgaccccgcaaggagctcctgggagcctctctccacatctccaggctggaacgggttcttcaatctcttcctcctcttcctcttcttcatcctcatcgtcactggaatcactgacctgcacagttatgtcagtgctagttacaggggtccagtcaaaataaactccaaagccaatgtcatagtcatcggtcgcaaactcccagcagacacgcttcccctctggatgagtaggtacccggatgatc

SEQ ID NO: 354457 - DNA, 830 bp, Homo Sapiens
  misc_feature (33)..(33): n is a, c, g, or t
  misc_feature (56)..(56): n is a, c, g, or t
  misc_feature (300)..(345): n is a, c, g, or t
tttgccccacttgctcattgaaagctgtagctnggatttcaccacttgcgtcaacnagttctagggagaaaagcttcccttcccctcgggagttgctccaaggtacggatctgacttttgttggtaacacgagcacaaatggtccacttggactggtaaggagtgaggctggcaatgggcaccactttggactgtgttcccccagaagtgtgtgacaggctgggacctgcagcttttccaaatgtctttgaagcaccataagccttagaaacagtagaacccattcccgagcttccattnnnnnnnnnnnnnnnnnnnnnnnnnnnnnnnnnnnnnnnnnnnnnnggaggagctacttgcggctgcccgagtccttcattatagggcactggattgccaatcttcactccaactgcttcagctgacttcaaaacttctaattccatcaagataactactctccttccgtctttcagagtgttcacaaaaaatctgtgaatctggcatacacagttgctggacaattgttcttcctccacgagagggttcaactgtgtcgccaacatgaaagaggatagagtgttcaatccatcactcatgagcagtcgataacgcggcggactattccccgtagtaatgggacggatgttgatgacttggaggatgggctttatgtttgtatcccccttctgcatgatggccgcaatggccccctcgctcagctggccgaccatggctccaccgccaagacttccccgcggaccccgcaacagctccagcttccccacccgggtcccgcgcgctgcgcagttattggcccgtgaaccgct

SEQ ID NO: 354458 - DNA, 1168 bp, Homo Sapiens
  misc_feature (41)..(41): n is a, c, g, or t
  misc_feature (62)..(62): n is a, c, g, or t
  misc_feature (75)..(75): n is a, c, g, or t
  misc_feature (106)..(106): n is a, c, g, or t
  misc_feature (109)..(109): n is a, c, g, or t
  misc_feature (112)..(112): n is a, c, g, or t
  misc_feature (319)..(377): n is a, c, g, or t
  misc_feature (1058)..(1058): n is a, c, g, or t
  misc_feature (1113)..(1113): n is a, c, g, or t
agtacctctagccaggagcatttgaaccattcctctaagtnggtcacccctgcttccacaantgaccaaaagtgnccctggccgttggaaaacaccagcagccatnagngcnacccctgtggccgtctcccagccaatccgaacagacctgcctccgccacccccgccacctccagtccactatgccggtgatttcgatggaatgtccatggatttgcctcttccaccacccccttccgccaaccagatagggctgccgtctgcgcaggtggctgctgctgaacggagaaagagagaagaacatcagcgttggtatgannnnnnnnnnnnnnnnnnnnnnnnnnnnnnnnnnnnnnnnnnnnnnnnnnnnnnnnnnnagttgggccagatgcgcactcagtccttaaaccctgctccgttttctcccctgactgcacagcagatgaagcccgaaaagccttccacactccagcggccacaggaaacagtcattcgggagctgcagcctcagcagcagccccgcacgatcgagcgcagagacttgcagtacattacagtcagcaaagaggagctttcctcgggggacagtctgtcccccgacccgtggaagcgggacgccaaggagaagctggagaagcagcagcagatgcacatcgtggacatgctgagcaaggagatccaggagctccagagcaaaccggaccgcagcgccgaggagagcgaccggctgcgcaagctcatgctggagtggcagttccagaagagactccaggagtcgaagcagaaggacgaagatgacgaggaggaggaggacgatgatgtggacaccatgctgatcatgcagcgcctggaggctgaacgaagagcgaggttgcaggacgaggagcggaggcggcagcagcagttagaagagatgcgcaagcgggaagcggaagaccgagcgaggcaagaggaagagcgccggcggcaggagggagagcgaacaaaacgagacgctgaagaaaagaggcgacaggaagaaagggtattacagcccgcctgggaaccgagaggcgcanacagcacgacgaggcggggcgcaggttgctggagcccgaggcgcccggtctgggncgccctccgctttcccggggactacgagcccccgtccccggtccccgggggcggg

SEQ ID NO: 354459 - DNA, 481 bp, Homo Sapiens
ccatccattctacttttacctattctcttgcataaagatgtaaaattctagcagcaaacccagtgcctggagctcaacaaatatttattaaatgagtaaatcatgaagggtggataatgctgaaaggtgggaaggatagagtccttatcagggaggggaagttgagccggcggaactgaggaaaatcaaaaagagaaagcaaataagctgtaagtctgcctttcttcatggtctacaacacagccttcctgtactcaacttatcaccagatcctcagctaacagaaaaacgtaagtaagttagctcactgcaaccacagcattatcagtactgcacaaagccctcttcggcacacagcacaagcaccatcctataaaatctccagcaagcctttgtttccttgcagtcggctcctttcttgctgacctacccactgtaccctttcatactttttctaatacatctgactttctttaccgaa

SEQ ID NO: 354460 - DNA, 534 bp, Homo Sapiens
  misc_feature (21)..(21): n is a, c, g, or t
  misc_feature (42)..(42): n is a, c, g, or t
  misc_feature (76)..(76): n is a, c, g, or t
  misc_feature (240)..(240): n is a, c, g, or t
  misc_feature (441)..(441): n is a, c, g, or t
  misc_feature (465)..(465): n is a, c, g, or t
cctggggccgctgaagtgtgnctgtgtctctcaccgcctggnctgtttctgatgcaaaatccagggcgcctgccantggcttggttacagtgccaacaagcccttttccaaggccagatatgaaaccgctgacaccccctttctgttttcacacccttccactggtcgaagttataacactgggtcaagcccacccaatgatacccatgagcccaggcccatggatgccggctacaaagntgttcaccacttgtggctgcatggtacctgatgtactcccgctctgactgatgccgattgtccatcgtcttccctaagccatctgataatgttccagcaaacttggcagcagagtttgatactccgtgtgtaacatttctgatgaggcccccgacatttccatattttatcagtccagtaaccccttcagaaacatcattnaaaagccccataggattgccaagnaaatccactgatcccaggattcgagctgcctggctgaggagttcctcctggaaatgtttgttaaaaaaa

SEQ ID NO: 354461 - DNA, 1236 bp, Homo Sapiens
  misc_feature (47)..(47): n is a, c, g, or t
aactcacctaaaccccctgccccctgtaaaacctggcctaaacaaanttacaggtcctaaatctttttggccacttttatgaaatgaaagaattgggaagaagagtgaaggtaagggcctgaacccaagactggcctccttgggcaggactccgaaagcaggaattccagccctccctagaacacattcaggctgaagggcaggagccaagcacaaaggtgatcacagggcaggagatgcacgttgtcaggaaagatgagccaggctggcagctttagttacaaagactgctctggctgaagagggggagtcagggtaacaagcaaaatggacagcagccagtggggagatatatcctgtagggtttgaggaatcctatgcagcacctggggtctgcaggaaacccagtttctgtatgaacagatgctctgacaaggtgaccccatctacattgagccttggcactccctaaaccatgctagagacaggaatgtaagggatttattatagtaattatagtaatctgtgttttcaaggtcaccgaaaactcctgttagtgcatacaggattacaggttacagtttagtggagtaaagaacaagggctttaaaagctgggtttgagtctaggctctactaacaccagctgttcgacattggacaaattaatgagtctcagttttcccatccacataaatggacaaaatcaatgtcttcccaaaaatattattttaaggattaaataaactgggtccacagaggaacacaccaaatagcagttcctttccttatttattcaattacattttcaattgctatctccctgaggaagtatgtagagacactgccaagtctcatccagaagccacttacaattactcatgaacatggcttgtttaagttgttgtgtggtggctttaattatattacctttctccaacccagctcccccacccttaaaatccaacttcttatactcaggctcttggggaggagaagatgcaccaactttctactctttctcttcctttcccgcttacttcttctagaagctcaaagtactcttaggcctgctcttctggtttggtagtaggtttttcctcctagggttgattcacacacaagccctggcaaccaatctagggtccagcccctagtagatcagtgttgtctctcataaagccagtctgcaaatatcaccttgaatttcccgggaattccggcacccggtaccacg

SEQ ID NO: 354462 - DNA, 1034 bp, Homo Sapiens
  misc_feature (982)..(991): n is a, c, g, or t
gctgggtggcgaattcggacgagggagggaccctcgccatgggtccacgggcctagagtggcggaagataccggcctggtgccaaactggctactgctgcttcctgtggcctccatggctgaggactggctggactgcccggccctgggccctggctggaagcgccgcgaagtctttcgcaagtcaggggccacctgtggacgctcagacacctattaccagagccccacaggagacaggatccgaagcaaagttgagctgactcgatacctgggccctgcgtgtgatctcaccctcttcgacttcaaacaaggcatcttgtgctatccagcccccaaggcccatcccgtggcggttgccagcaagaagcgaaagaagccttcaaggccagccaagactcggaaacgtcaggttggaccccagagtggtgaggtcaggaaggaggccccgagggatgagaccaaggctgacactgacacagccccagcttcattccctgctcctgggtgctgtgagaactgtggaatcagcttctcaggggatggcacccaaaggcagcggctcaaaacgttgtgcaaagactgtcgagcacagagaattgccttcaaccgggaacagagaatgtttaagcgtgtgggctgtggggagtgtgcagcctgccaggtaacagaagactgtgggggcctgctccacctgcctcctgcagctgccccatgatgtggcatcggggctgttctgcaagtgtgaacggagacgctgcctccggattgtggaaagggagcccagggtgtggagtatgccgggggctgtcagacccaaggaggattgtgggccattgcccccatctggctttcgcccttccccggccctgggctcaggcgcccagtgggaaatggggccccagcgacgttgggccctacgggggtaaacatgcccgcccccccaagggaaggctggtaaacccccaaaatgggctggccannnnnnnnnncccccgggagaccccagccattgggccttcaaacaaacccccc

SEQ ID NO: 354463 - DNA, 2329 bp, Homo Sapiens
  misc_feature (1573)..(1573): n is a, c, g, or t
gaagcgaggcctggggtggcgaattcggcacgagggagggaccctcgccatgggtccacgggcctagagtggcggaagataccggcctggtgccaaactggctactgctgcttcctgtggcctccatgcgctgaggactggctggactgcccggccctgggccctggctggaagcgccgcgaagtctttcgcaagtcaggggccacctgtggacgctcagacacctattaccagagccccacaggagacaggatccgaagcaaagttgagctgactcgatacctgggccctgcgtgtgatctcaccctcttcgacttcaaacaaggcatcttgtgctatccagcccccaaggcccatcccgtggcagttgccagcaagaagcgaaagaagccttcaaggccagccaagactcggaaacgtcaggttggaccccagagtggtgaggtcaggaaggaggccccgagggatgagaccaaggctgacactgacacagccccagcttcattccctgctcctgggtgctgtgagaactgtggaatcagcttctcaggggatggcacccaaaggcagcggctcaaaacgttgtgcaaagactgtcgagcacagagaattgccttcaaccgggaacagagaatgtttaagcgtgtgggctgtggggagtgtgcagcctgccaggtaacagaagactgtggggcctgctccacctgcctcctgcagctgccccatgatgtggcatcggggctgttctgcaagtgtgaacggagacgctgcctccggattgtggaaaggagccgagggtgtggagtatgccggggctgtcagacccaagaggattgtggccattgccccatctgccttcgccctccccgccctggtctcaggcgccagtggaaatgtgtccagcgacgttgcctacggcaccttgctcaccgtctgcgtcgccgtcatcagagatgtcagcgacgcactcccctggctgtggctcccccaactggtaaacatgcccgccgcaagggaggctgtgactccaagatggctgccaggcggcgccccggagcccagccactgcctccaccacccccatcacagtccccagagcccacagagccgcaccccagagccctggccccctcgccacctgccgagttcatctattactgtgtagacgaggacgagctacagccctacacgaaccgccggcagaaccgcaagtgcggggcctgtgcagcctgcctacggcggatggactgtggccgctgcgacttctgctgcgacaagcccaaattcgggggcagcaaccagaagcgccagaagtgtcgttggcgccaatgcctgcagtttgccatgaagcggctgctgcccagtgtctggtcagagtctgaggatggggcaggatcgcccccaccttaccgtcgtcgaaagaggcccagctctgacccgacggcaccatcttggccctaccttgaagcccaacttggctacacgcacagcccaaccagaacatacccaggctccaacgaagcaggaagcaggtgggtggctttgtgctgcccccgcctggcacatgaccttngtgtttttacgggaaaggcgcaagcagtcctgtgcaggtgccgggccctgttgcagcttcacagaagccctgttgcaggcagtagacccaggcctgccttctgtgaagcaagagccacctgacccagaggaggacaaggaggagaacaaggatgattctgcctccaaattggccccagaggaagaggcaggaggggctggcacacccgtgatcacggagattttcagcctgggtggaacccgcttccgagatacagcagtctggttgccaaggtccaaagaccttaaaaaacctggagctagaaagcagtagactggaggcttctacagactgtaggattcaaggtgatatttgcagactggctttatgagagacaacactgatctactaggggctggaccctagattggttgccagggcttgtgtgtgaatcaaccctaggaggaaaaacctactaccaaaccagaagagcaggcctaagagtactttgagcttctagaagaagtaagcgggaaaggaagagaaagagtagaaagttggtgcatcttctcctccccaagagcctgagtataagaagttggattttaagggtgggggagctgggttggagaaaggtaatataattaaagccaccacaaaacaacctaaacaagccatgttcatgagtaattgtaagtggcttctggatgagacctggcagtgtctctacatacttcctcagggagatagcaattgaaaatgtaattgaataaataa

SEQ ID NO: 354464 - DNA, 1118 bp, Homo Sapiens
gaaccactgaagataaagattatgtatatatgtatttaaagggatttattatagggatctgaccgcatgccattgtgggagctggttaaacagtctctgtaaggctgttgtctttgcatctaatgctggagcttgaagtctgcagggcaggcactcgggaagggaagatggatgtaaagtgtgggagaccgaggacacagtggagcccacgagcacgagctggaacccacgaggatggcctggaacccatgtcagtctctcaccacctccagcttcgatgatgtgggtgtcctgcagaagaagctggtgcccttcctcacagagttaaatatgcatctggcccaggaattagagaagctgaaaggatgatcctggggaaggtggagcagctgcaggcctggctgcaggcctgactactgcccacaccaacgaggtgatctagcagatacatggcaacgtgtgaactgcaacaacgcctggtgccccagcaccaaccttccaagtgtaaaaacaatgtgctgctgcttcacttccgccctccggttatcaagcaaaatgtctcttgtggcccatcttactggaagagagttccgggaaacatagcctcaccaaggtgacacattacaaagccaccctaccatgaatccgctcccaagggtctcactgctcacctgaggataactcaatataactatgttgctgaaaatgcaaagctgaagaccatggatttcatggtgattccagcaagtacagagattctatgaagcccacccagaaaaaacttgctggtcctggctatttttgtgtcatttattcaagtattgagaacctggcctgtggtaggcactgtacttaatactaggatacagaaatgcaaaagatacggcccatgcaattttattaaatgcatcaatatgtattacaaatggtgaatggatttccaactttatcatggaatttaatgctgaatatatagaattcagaaaattgttgggaggacagcccttttgtgaaccttgtttggggcacagtaggaattggaaataatttagtttctatctctaagctgttctattttaaaattatttttaaatttttattgtcccacttaaaaaaaa

SEQ ID NO: 354465 - DNA, 1348 bp, Homo Sapiens
  misc_feature (630)..(630): n is a, c, g, or t
  misc_feature (647)..(703): n is a, c, g, or t
  misc_feature (1260)..(1279): n is a, c, g, or t
  misc_feature (1281)..(1281): n is a, c, g, or t
  misc_feature (1284)..(1285): n is a, c, g, or t
  misc_feature (1287)..(1287): n is a, c, g, or t
gcggccgccagcttgcaaagccgaagtctggccgcgctcttcgactcgctgcgccacgtccccgggggtgccgagccggcggggggtgaggtggctgcgccggcggccgggctaggaggtgcgggcactgggggcgcgggaggggacgtggcaggccccgcgggggccacggcgatcccaggggccaggaaggtcccgctgcgggcacgcaatctgcctccgtccttcttcacggagccgtcccgggcaggcggcggcgggtgtggcccgtcggggccggacgtgagcttgggcgacctggagaagggcgcggaggccgtggagttctttgagctgctggggcccgactacggcgccggcacggaggcggcagtcttgcttgccgccgagcctctcgacgtgttccccgccggagcctccgtactgcggggacccccggagctggagcccggcctctttgagccgccgccggcagtggtgggaaacctattgtaccccgagccctggagcgtcccgggctgctccccgaccaaaaagagccccctgactgccccccgcggcggcttgaccttgaacgagcccttgagccccctgtaccccgccgctgcgaatttctcccggcggggaggnacgggccgggccatttnnnnnnnnnnnnnnnnnnnnnnnnnnnnnnnnnnnnnnnnnnnnnnnnnnnnnnnnntcaggtgtcctacgattacagcgcgggctacagccgcaccgcctattccagcctttggagatccgacggggtttgggaaggggcgccgggggaggagggggcgcaccgggactgacttcgaggcacgcttcccttcattagagacggctgtggagagcgccgcgcctccgtgggtttctcctaaatctgaagaacgatgggaaaatgcacgtggagatgaaaccagatttttaaaaattcaattaataaaagcaacttcagaaaaaagagatgaagacgagttggggattgtttaatcacaacctcaagtgttaaaacaaaaacaaacaaacacgtttgtaggttcttactggaccagaggagtcaagaaaccaagatggtttggggtatggggtggggacggcaaaaggggtaagagctggcttctgtagccacctgtcccttctatttttcagcgaaggtcagtgtatttagtgtaattaccccttctaaacagtgtcctagtccctcccttccctctccttgagtgcattttgaattaaagcctatattgaaannnnnnnnnnnnnnnnnnnnanaannanccttgtcgggcccccctccggccctcgaaaaaagctttttctaaaaaccctttcccttttt

SEQ ID NO: 354466 - DNA, 2235 bp, Homo Sapiens
  misc_feature (1678)..(1678): n is a, c, g, or t
tctcctcttgctctaagcagggtgtttgaccttctagtcgactgcgtcccctgtacccggcgccactgtgttcctgaccccagaataactcagggctgcaccgggcctggcagcgctccgcacacatttcctgtcgcggcctaagggaaactgttggccgctgggcccgcggggggattcttggcagttggggggtccgtcgggagcgagggcggaggggaagggagggggaaccgggttggggaagccagctgtagagggcggtgaccgcgctccagacacagctctgcgtcctcgagcgggacagatccaagttgggagcagctctgcgtgcggggcctcagagaatgaggccggcgttcgccctgtgcctcctctggcaggcgctctggcccgggccgggcggcggcgaacaccccactgccgaccgtgctggctgctcggcctcgggggcctgctacagcctgcaccacgctaccatgaagcggcaggcggccgaggaggcctgcatcctgcgaggtggggcgctcagcaccgtgcgtgcgggcgccgagctgcgcgctgtgctcgcgctcctgcgggcaggcccagggcccggagggggctccaaagacctgctgttctgggtcgcactggagcgcaggcgttcccactgcaccctggagaacgagcctttgcggggtttctcctggctgtcctccgaccccggcggtctcgaaagcgacacgctgcagtgggtggaggagccccaacgctcctgcaccgcgcggagatgcgcggtactccaggccaccggtggggtcgagcccgcaggctggaaggagatgcgatgccacctgcgcgccaacggctacctgtgcaagtaccagtttgaggtcttgtgtcctgcgccgcgccccggggccgcctctaacttgagctatcgcgcgcccttccagctgcacagcgccgctctggacttcagtccacctgggaccgaggtgagtgcgctctgccggggacagctcccgatctcagttacttgcatcgcggacgaaatcggcgctcgctgggacaaactctcgggcgatgtgttgtgtccctgccccgggaggtacctccgtgctggcaaatgcgcagagctccctaactgcctagacgacttgggaggctttgcctgcgaatgtgctacgggcttcgagctggggaaggacggccgctcttgtgtgaccagtggggaaggacagccgacccttggggggaccggggtgcccaccaggcgcccgccggccactgcaaccagccccgtgccgcagagaacatggccaatcagggtcgacgagaagctgggagagacaccacttgtccctgaacaagacaattcagtaacatctattcctgagattcctcgatggggatcacagagcacgatgtctacccttcaaatgtcccttcaagccgagtcaaaggccactatcaccccatcagggagcgtgatttccaagtttaattctacgacttcctctgccactcctcaggctttcgactcctcctctgccgtggtcttcatatttgtgagcacagcagtagtagtgttgggtgatcttgaccatgacagtactggggcttgtcaagctctgctttcacgaaagcccctcttcccagccaaggaaggagtctatgggcccgccgggcctgngagagtgatcctaagcccgctgctttgggctccagttctgcacattgcacaaacaatggggtgaaagtcggggactgtgatctgcgggacagagcagagggtgccttgctggcggagtcccctcttggctctagtgatgcatagggaaacaggggacatgggcactcctgtgaacagtttttcacttttgatgaaacggggaaccaagaggaacttacttgtgtaactgacaatttctgcagaaatcccccttcctctaaattccctttactccactgaggagctaaatcagaactgcacactccttccctgatgatagaggaagtggaagtgcctttaggatggtgatactgggggaccgggtagtgctggggagagatattttcttatgtttattcggagaatttggagaagtgattgaacttttcaagacattggaaacaaatagaacacaatataatttacattaaaaaataatttctaccaaaatggaaaggaaatgttctatgttgttcaggctaggagtatattggttcgaaatcccagggaaaaaaata

SEQ ID NO: 354467 - DNA, 606 bp, Homo Sapiens
aattatggaggcttactgtggcctcacaccacattagaatttggtctggaaatcaaactttagaaacaagagattgtaagccattttatactatcgacctaaattccagtctaacagttcctttacaaagttgcgtaaagcccccttatatgctagttgtaggaaatatagttattaaaccagactcccaaactataacctgtgaaaattgtagattgcttacttgcattgattcaacttttaattggcaacaccgtattctgctggtgagagcaagagagggcgtgtggatccctgtgtccatggaccgaccatgggaggcctcaccatccatccatattttgactgaagtattaaaaggcattttaaatagatccaaaagattcatttttaccttaattgcagtgattatgggattaattgcagtcacagctacgggtgctgtggcaggagttgcattgcactcttctgttcagtcggtaaactttgttaatgattggcaaaagaattctacaagattgtggaattcacaatctagtattgatcaaaaattggcaaatcaaattaatgatcatagacaaactgtcatttggatggaaaggatct

SEQ ID NO: 354468 - DNA, 363 bp, Homo Sapiens
  misc_feature (298)..(298): n is a, c, g, or t
  misc_feature (305)..(305): n is a, c, g, or t
aatgaatcaaagaatgtcagaataatagagatgggtgagcaagaactgctcaatgttcatatcatgtgtacaaataaaataacaactatggtttagtgcttcagaatattctaccattttctaaaccttacaatattttaacctttgaatttggcaggtaatttgaagtaagttatcattatattcacaggttaaaacattaatgttaatgtaatctagatggaaccaccataaagacagttaattttcacaaataacaattaggctaaaacaaccacatgtacagagtatataatanattacanacaacttacaaccttaaaggacttaatatttaactctagtgattttcctttaataggg

SEQ ID NO: 354469 - DNA, 1229 bp, Homo Sapiens
ggcctgggtggcgaattcggcacgaggggaactggaatccctggtggatttctgattcctgtggtgagaaggaaagctacaggacctggagaaggggatgcagaggcaggcctgctgaccaacttgttgcaatcacaaaggtgggggtcctggtgcaggcagtgaacaggcttctaatgtggggttcagtagtgccagcaagtgggggaaactttcagtattgcgctaggtcaacacttcctgctgcatttccttccctttgcacagcttgaagaaatagagtagacagaatcacacatcatgtggtgggcagatggaaataagtacctgtggtgaacaagtttctactgtagttggagatcattagaattgaattcagtttctcttagaatataatcaggtataaacctaagttaaactttttcccaaacaaggagcatccaaagacacagtgacttgagctatagatagtaaaaatcatacgagagttgaactgagtcaggtttaggaagcaagtttggttgcatcaattaagcaggctcttttcaattgactgatgctggggccttcagttttattctcagtatagattgccagtattgttaagagtatccaaaggcctttctagatggagacagaataactgacttgaacatacagtgtgcctgtaagtgtccaggctcagagctggtgaaaacccttctgttgggcgtgtgcagggttaaactcctgaagtaacttgtgaggacttcagtgcttgctggtgtcctgggcagcaccatgaatgcctttaccaagacatgccaagttggatcccccgaatgaagcagatgtggctgtggtgtgacccttgctccctgcttacacagaggcatcgcaggggctgggcctgtgtggttttccagatgagggtctggggtcccgggaagcttgtgtttgaggagctcagtgggacccaccccgctttgctggaaccctcacagttcttggggttgtccagcctggacttgtagcacacatgtcctgaagcaaagctccggtgactgcatgagccacctgaccacagtcctcccatggagggcctgccgtgacgctcagtgcagagggcagggcctgtgtctccacttaggccacacagtgatgaggaaaccacagatggagcttcttgccgataatactgactctagcccatgattgccttgcccaagccacagaggaccgttacgttg

SEQ ID NO: 354470 - DNA, 363 bp, Homo Sapiens
  misc_feature (122)..(122): n is a, c, g, or t
  misc_feature (155)..(155): n is a, c, g, or t
  misc_feature (188)..(188): n is a, c, g, or t
  misc_feature (191)..(191): n is a, c, g, or t
cagtctcatccaggtcactgcaaatgttgttaattcattcctttttatggctgcatatatatactacagtttctttatccactcattgattgattggcatttgggttggttccatgattttncaattgtgaattgtgctgctataaacatgtgtntgcaagtatctttttcgagtaatgacttctttnctnctgtgtagaaatccagtagttcgattgctggatcaaatggtagttctacttttagttccctaaggaatctccacactgttttccatagtggttgtactagtttacattcccaccagcagtgtagaagtgttccctgttcaccacatctgcgccaacatctacttttaaaaaa

SEQ ID NO: 354471 - DNA, 362 bp, Homo Sapiens
  misc_feature (178)..(178): n is a, c, g, or t
gggtttaggctgcatatataagatgtctctgctgcaatgtttgcagtagaggttgttggaggcaagcaacttcagcgtccatcaagagggagaatgagtaagtgtggtggacatgagtatggaataccatgcagcagtcagaagcaataaagtagaggcatacaaccacttaaatggntcttataaatatagtattgagtaaaaagggagattaccaaacaaaatcaatagcataacaccatgtatatagattaccaaccacacacaccaacagcataacctattttctgaggacacacaggcttaggttaaacaaattagagaggatggctaagaggaaaagggataggattgaggattag

SEQ ID NO: 354472 - DNA, 599 bp, Homo Sapiens
gagagtcagacgcaggaaaaacgtgtcagggtgaagaaagacccctttcagccctgttggcagccctgggtgggggcatgagatagacagcaagcttctgatcttgaagcttgtctagaagacacatcttctaggtctcgtggtcattgggtaggctgacctttgagtgagcgaggccactattgagtggatagcaagaacattggaaccaaagcctcggcacaggcctggcactggctgtacatcagctcttacaactaaacaactcaactaagcaactgaaacgaaacaaaggagcattcgttctctgttgttaggaatcattctgctctgttagggaagggctgcaggaagggcagtttcctgaataaaaatctggctgcgaccagtcccatgtgtctggtaagtaagtaagtaagtaagtgccctttgaagggatcattaagacacagggagcatgaacctgagatcagaagcatttctttactaatttagattctgcgaaatagacggacctctccacccccaaacctaaaacaggccaggacttgtctctgtgctgaaagcaaatagcaagactaactcaagccccagcctct

SEQ ID NO: 354473 - DNA, 493 bp, Homo Sapiens
  misc_feature (336)..(336): n is a, c, g, or t
  misc_feature (460)..(460): n is a, c, g, or t
  misc_feature (470)..(470): n is a, c, g, or t
ctcgtcagagaacctcaccaagggaagatccttgtccttcaaaaccttcctcatctgggttttaataagtatttaccaaggcggcatcctcatgtatggggccctggtgctcttcgagtctgagttcgtccacgtggtggccatctccttcaccgcactgatcctgaccgagctgctgatggtggcgctgaccgtccgcacgtggcactggctgatggtggtggccgagttcctcagcttaggctgctacgtgtcctcactcgcttttctcaatgaatattttgatgttgcctttatcaccaccgtgaccttcctgtggaaagtgtcggcgatcancgtggtcagctgcctcccgctgtatgtcctcaagtacctgaggcgcaattcttcttccttcccagctactgcaagctgggcctcctaaggggctgtgcaaccccagcgggcttggccccagcanctttttgccntttccaggaacttgttgcccttt

SEQ ID NO: 354474 - DNA, 470 bp, Homo Sapiens
  misc_feature (13)..(13): n is a, c, g, or t
  misc_feature (29)..(29): n is a, c, g, or t
  misc_feature (48)..(48): n is a, c, g, or t
  misc_feature (75)..(75): n is a, c, g, or t
  misc_feature (470)..(470): n is a, c, g, or t
ttcttggaaaggncaaaaagttcttgggncccaacccccttggggttncaaaacccccttagaaggccaactttnagtaactggaaggagagaattgcgccctcagggtacttgaggacatacaagcgggaggccagctgacccacggtgatcgccgacactttccacaggaaggtcacggtggtgataaaggcaacatctgttggcaggaaacagagaaaaaggtaagagctgaccaagaagccctgggccctcatggccacagccacagaccctggccaggccaccagacggtcctaagcttgcccacggaaacatcactgtgcatttacaggggcccagctccaaatctcaggttttcttgactgcagaattgtttgacctgcataccgggcataattcattcttcttttaatggaaaaaacaaaaccaaagcattatagattgcaggccgggcgcagtggctcatn

SEQ ID NO: 354475 - DNA, 948 bp, Homo Sapiens
  misc_feature (22)..(22): n is a, c, g, or t
atgtgcagcaagacctgttatnactcagtgaacattgcctttctaagtgatggctccagcagtgtttggagatagcaatttccgcctcatgcgtgaattttgtttccaacatagccaagacttttgaaatctcggacattggtgccaagatagctgctgtacagtttacttatgatcagcgcaacggagttcagtttcactgactatagcaccaaagagaatgtcctagctgtcatcagaaacatccgctatatgagtggtggaacagctactggtgatgccatttccttcactgttagaaatgtgtttggccctataagggagagccccaacaagaacttcctagtaattgtcacagatgggcagtcctatgatgatgtccaaggccctgcagctgctgcacatgatgcaggaatcactatcttctctgttggtgtggcttgggcacctctgacgacctgaaagatatggcttctaaaccgaaggagtctcatgctttcttcacaagagagtccacaggattagaacccaattgttccctgatgtcatcagaggcatttgtagagattcccttagaatcccagcaataatggtaacattttgacaactgaaagaaaaagtacaaggggatccagtgtgtaaattgtattctcataatactgaaatgctttagcatactagaatcagatacaaaactattaagtatgtcaacagccatttaggcaaataagcactcctttaaagccgctgccttctggttacaatttacagtgtactttgttaaaaacactgctgaggcttcataatcatggctcttagaaactcaggaaagaggagataatgtggattaaaaccttaagagttctaaccatgcctactaaatgtacagatatgcaaattccatagctcaataaaagaatctgatacttagaccaaaagcaaaaaaaa

SEQ ID NO: 354476 - DNA, 571 bp, Homo Sapiens
  misc_feature (32)..(32): n is a, c, g, or t
  misc_feature (39)..(39): n is a, c, g, or t
ttcccccaggctggagatgttgagtttatctnaattttnctcgtgtcttcctgctcctccttccttgtaactctctcgcctgcagcctctgtaatttcttcctctgaaggtgcacccaggcttacttatctaccctcctccctgggccatgccctgcacaccatacctcagtcatgtcatcctggattctgtttactgtcagtctttctgtttggcataggcatccctcttggctggcctgtgaggacagcccctttcctcatttcatgctcctaatggagaagccactgcaagatatttaatgtccttcacctgattttccatggccacgcaaaaccaggacacaactcagccacccactgacttctttcctgcttctcatcctcaaatacccttcattgggctgttgtttcttttgaaaacatcctcccatgagggattccacagtgattccccagaggaaccacagagttgggatgaggacagtgcaagtgtgagagtgctgggtgtgagggcactgggtgtgagggcaccaggtgtgagggtgctggttgcgagggcaccaggtgtg

SEQ ID NO: 354477 - DNA, 361 bp, Homo Sapiens
ttttcctaatccctgctttccatactagcccagtgtggggaaaaggtacaatatgtcaaagagatgagagagtgttatttcttgggcaattttctattagtgtttcttattttggccagttcttttatttatgtccttgtgacccaggtacttggggggccagctacccttctggccttttagcgtctttgaaggagaccagacatgagtgaatacctaggagagtgtcagcatgtttctggaaaattggcagagaccaagccctgctgcagattcgtcaggccaggtgaaagggccaggcagttgcagctgatgatgtaaatattttgtacagtagataaataaatgtttaaaagaaaaa

SEQ ID NO: 354478 - DNA, 656 bp, Homo Sapiens
acgcatgtcaggtagggccttgtaggacactgtcaggatttggcttttaccaagagcaagatgagaagttgctagaaggttcggagcatagagtgatatgatctgacttcagttgaagaggaagctttgggactgctgtgttgagagtataccgtgagagggcagacaatggaagcggctgaaagaccggttaggaagctcttgcaataatcctggtaagagatcatagttgcttgggccatgatgttagcaagggaggtgataagaagcagttggattccagaaatgttttaaagaatcgatatcacacagtttgctgatgaattagacattgaataagagaaagaaaaatcttaagaataaccttagaatgtttggcctgagctattgaaagtttggagttgccatcagtgtaagacaggaatcctgcaggtgaggctgactgggaaggaaagccttatagtttaaggtgtctacagatgttgcaagtagaaatgatgattaggcaattagatatatggacctggagttcagggaaaatgtatagcctgaagatacatattttatgtatgcgtttggttggtatttgaagccatgatactggaactagagaatgaatagcgacaggaggattctctagactgaggccccggtgg

SEQ ID NO: 354479 - DNA, 1197 bp, Homo Sapiens
  misc_feature (82)..(117): n is a, c, g, or t
tcgtccccaactcgcgcgtctgtccccaactcccgctctcggcgtgcgggcagtgtggcgctgagcgtccaggcgctccaannnnnnnnnnnnnnnnnnnnnnnnnnnnnnnnnnnnttccaggcctgggctctggccgcccgcgccaccgggccgctccggggacaggccggggcggggcgcggctggcaggaaacggggcggggacttgcggaggcgttggggacgagagagggcgcggccaactccaggggggacggcaggccgagagcgcggcgcccgggcctggcgcggagcctgagcccgccggacgggaggcggccccgccgcgggctcggccccggccccagccccgccagcatggccggccggactgtacgggccgagacccggagccgggccaaggatgacatcaagaaggtgatggcgaccatcgagaaggtccggagatgggagaagcgatgggtgactgtgggcgacacttcccttcgtatcttcaagtgggtgccagtggtggatccccaggaggaggagcgaaggcgggcaggtggcggggcagagagatcccgtggccgggaacgtcggggcaggggcgccagtccccgagggggtggccctctcatcctgctggatcttaatgatgagaacagcaaccagagtttccattcggaaggttccctgcaaaagggcacagagcccagtcctgggggcaccccccagcccagccgccctgtgtcacctgccggacccccagaaggggtccctgaggaggctcagcccccacggctgggccaagagagagatcccgggggcataactgctggcagcaccgacgaacccccaatgctgaccaaggaggagcctgttccagaactgctggaagctgaggcccccgaagcttaccctgtctttgagccagtgccacctgtccctgaggcagcccagggtgacacagaggactcggagggtgcccccccactcaagcgcatctgcccaaatgcccctgacccctgagaagccggcctgcctgtcctgttgccccaggggcccctttggctttttacaaataaagaccccttttggtaaccacacaaagtgatgtacattaactcctatcccccccgggggcgcgcggctcttagaaaatccccccagagggggcccaagcttaacgcgataccccagcttttcttgtgg

SEQ ID NO: 354480 - DNA, 894 bp, Homo Sapiens
  misc_feature (361)..(438): n is a, c, g, or t
  misc_feature (543)..(570): n is a, c, g, or t
  misc_feature (608)..(740): n is a, c, g, or t
gttgaaagatggatgaccccaaagacgaggaaaagattattggctccattttttagatgcggcagccagctaaggtctagacaggcgaagggacttgccccaaatcacagttagagcaaatcagtctgaatcaggaataactccattcctatcccgcatcctgccctttcactacgccacagctgcctggctgcctggaggaacaaaggagggccgggcaagaacgccattaccaactgcaaatccacaggcaaatgcaagaggacagaaatcccaagaacccagcccctaagccttcagctctgtcccaggtctgcctctcctccaggccctcaggacgcaggctccaagccttcgactnnnnnnnnnnnnnnnnnnnnnnnnnnnnnnnnnnnnnnnnnnnnnnnnnnnnnnnnnnnnnnnnnnnnnnnnnnnnnnaacaggctcctccttggtcagcattgggggttcgtcggtgctgccagcagttatgcccccgggatctggaacgtcaaggcgctgcgaatacgagtgggtctccannnnnnnnnnnnnnnnnnnnnnnnnnnncgcaccgtgtggaggcgagaaagtagagcgactggacnnnnnnnnnnnnnnnnnnnnnnnnnnnnnnnnnnnnnnnnnnnnnnnnnnnnnnnnnnnnnnnnnnnnnnnnnnnnnnnnnnnnnnnnnnnnnnnnnnnnnnnnnnnnnnnnnnnnnnnnnnnnnnnnnnnnntgtgtaggtgtgagcatcaagagggtgcatgggaatgttcagagcccttttcataacagccccaaactggaaataacccatcaacagaatggaaaatgaatgatgccctactcactaacatgcacatagacaacagcaacgggattgactgccc

SEQ ID NO: 354481 - DNA, 838 bp, Homo Sapiens
ggcacgaggaaaatcatgtgtttaaaagtaaatgttggtaaggggctggcatctggtcctattgtgttgatgcattttcacttctgtggtcataggaaatggactggtctaaagagagtgaggcacaacacaagcagggcattagtttgaataggaagtcaatcatatttggttttatggcctggtgtattttgggtttaagataaaatagggaaaaatgtcagaaatgatccctatgcatttattttcatggatacccttaatttcatgggcatgcctaataatgatctatgttctaactggagcttagggcttattttagatattggagtgtagctttattacagatggattttatctttcaacattgcattttgatcaactttgtatattcacgtgtattaaaatattgtgcactaaatgttttgcccttgtttgctattatatggtcaaggcatttatcagcactattgtaatgaactcatgtaagtggcatgggtcagggaaaattatttcctacttttctgcctaattaaatttctgttttccagtattacattaatttatttttggcttccatttctgtataaccaaaatagttactgtatttgtgtggcattcctattattttgttgctaaaaatattgtagtttttatttaaaataatctgtaccttaattttttaaaatgtaaccaattcaagcactttaagcaataatgtcaatcttgtgaaattttaatcagtttaacaccctgcctctaaaattgtttgcaaaaaataaataaatgaataaaatgggaattctctttctagagaattatatccgggtaatgctac

SEQ ID NO: 354482 - DNA, 402 bp, Homo Sapiens
  misc_feature (95)..(183): n is a, c, g, or t
gtttgagggattctgtatcaacctccagagtagctgggattacaggcatgagccaccacgcccagctaattttgtatttttagtagagagggtgnnnnnnnnnnnnnnnnnnnnnnnnnnnnnnnnnnnnnnnnnnnnnnnnnnnnnnnnnnnnnnnnnnnnnnnnnnnnnnnnnnnnnnnnntgagccactgtgcctggcctagaaccgaactattctttaacccagctataataatattttacagctcttgtgcactttatccgccatgtacaaatacagctgtgagacattttatattgcacaaatatagccataattcttaagaaaatgtctctataataccttattcatattttgtaactctgctttgagaacctaaatatgaaattactatgttta

SEQ ID NO: 354483 - DNA, 914 bp, Homo Sapiens; identical to SEQ ID NO: 62997
  misc_feature (559)..(567): n is a, c, g, or t

SEQ ID NO: 354484 - DNA, 408 bp, Homo Sapiens
  misc_feature (36)..(36): n is a, c, g, or t
  misc_feature (281)..(281): n is a, c, g, or t
  misc_feature (352)..(352): n is a, c, g, or t
  misc_feature (394)..(394): n is a, c, g, or t
ggaaatttatctgtagcaggtgttacagggcttttnctaatcccagatcactgggtgggcacttatccaagcgatcttactgtaaaccactggatggagccgaaattgctcaagaacttctacagagtaatggacagccttctcttctagccagcatgattctctccacaaatgcagtaaatttgcagcagccacaacaatctaccttcaatccagaagcatgttttaaagatccatcatttctacagcttcttgctgaaaatcgctcgccagcatttttnccaaatacatttcctcgatctggtgtgactaactttaataccagtgtcagtcaagaaggtagtggaaattnttaaacaggctttgggaactgctggcattcccagtaccattnagggtgccgaaatg

SEQ ID NO: 354485 - DNA, 591 bp, Homo Sapiens
cttaatcagatagcttgagaatgatttaatgttacgaaatctgttaattgcattatctcaataatagatcggtgaataactttattattctctcaacaaatcctgtatttgatttacaaaatggatgggaggtttcagggagagcagttggaagcctgtgtgctcacctgttaggaacgagagtggcaacagcagtggggaggagtgctcggctcctgcacctgtctcgatggcagagccacaggcttggctgacagacgtgggatgaaggaaagagaagcctctcactcttcccacagcattgtagtgcgatttcatgcagaagtccaagcaggttccaggacaattgtgtaagaagctatggacaagaacgtctaagaaaacggaaaatgacatagaggatttgcactgtagctaagacttcacgcaaggctgtggcagctgaaagcatgttctggtgctggggctgcgtggcagagccaggagcccaggatccagcgcactgggcactgacctgggacctggtcatctttgcgtgtggaaaagatggcatttccagttattgacaggtgaatgctggccttttaggga

SEQ ID NO: 354486 - DNA, 338 bp, Homo Sapiens
  misc_feature (137)..(137): n is a, c, g, or t
  misc_feature (201)..(201): n is a, c, g, or t
cccaaaatgccagtgggtctgtccaagggagtgcagactgctcagcgtgaatggaaatcagagcgacagaggagagcactggcaggctcagacaagcctaaggaaatccaccacccagaatccgcgagcccttaagntcaggcatgactagtttcttagagacacttggcactgtgcccaaggaatactctcccagcaggnaaagaagctaaaacttgctaagggaccacccagcagtgtcttcttttgatctcctgatgctctctgctgccctgaaatctcgctcttctgacaatagcaagtgggaggagagtgagaaactggttccccgctccttc

SEQ ID NO: 354487 - DNA, 863 bp, Homo Sapiens
  misc_feature (439)..(439): n is a, c, g, or t
  misc_feature (818)..(818): n is a, c, g, or t
tcgagctcggtacctagacatgaggctccctgctgtcacacttcctagtttaacactgaaaactcagaatgagaaagagtcagaacgaactcacaatagcaaccatttccctagactcttggaattagattcctttgccgtgtaggagaacgcaggctgcccagcctccagctttgtgctttcacaggctcccaatgcatttcagcagaagtgggtggtctgccttagcctacttctgcagcaacatgaatgttccctgggaagagttaaaaatatgggtcttacaaagtgaagttggccacaggtgagaagcctgaggaagcctgtttctggtggtgagatgtgacaagcctgtagatggcaggagggagtccagggaccttttcccttgcccatctcaattcaagtcagtgaagaatctgcatgcagaagcatggcnaagttccaaggaatactgcagagatgtaaacccctaatacagcaatcccgaacacccagcgcactaatggtaccttatgtattccaggtccaccagtgagtttgccctggataatgctgggatttaataagcccttctaatgattataaagattgtcctcttgaaactagacattggaaacaacagaatatttgatatcactatattttacatggcacatataaccatataattaccagcacttaacatggcaaatattgtaaatacacattcttggagttgactttgtaattacaccgatgttattcaacagaacaaagattaaacactctccaatttgcactttgggagatttcagtcccctccttcctttcacaanaaaaggataaccctctaattacgtaataatgctcggtggtcaaat

SEQ ID NO: 354488 - DNA, 1012 bp, Homo Sapiens
  misc_feature (922)..(922): n is a, c, g, or t
  misc_feature (929)..(929): n is a, c, g, or t
  misc_feature (931)..(931): n is a, c, g, or t
  misc_feature (939)..(940): n is a, c, g, or t
  misc_feature (945)..(945): n is a, c, g, or t
  misc_feature (947)..(947): n is a, c, g, or t
  misc_feature (956)..(956): n is a, c, g, or t
  misc_feature (960)..(961): n is a, c, g, or t
  misc_feature (968)..(968): n is a, c, g, or t
  misc_feature (970)..(970): n is a, c, g, or t
  misc_feature (976)..(976): n is a, c, g, or t
  misc_feature (981)..(981): n is a, c, g, or t
  misc_feature (983)..(983): n is a, c, g, or t
  misc_feature (985)..(985): n is a, c, g, or t
  misc_feature (996)..(996): n is a, c, g, or t
agcggagtgtgttgcggatctgtggtggagaaggtatctcattcctctctaacatcatctccactttgcatctgtctctcttagtctgctttttttccaccgatgtaacagacctggagccagcaggactcagaggaaaggacttaatcaggtttatgtgtcctaaaggttatgaagacagtatggagtttccagaccatagtagacatttgctacagtgtctgagcgagcagagacaccagggttttctttgtgactgcactgttctggtgggagatgcccagttccgagcgcaccgagctgtactggcttcatgcagcatgtatttccacctcttttacaaggaccagctggacaaaagagacattgttcatctgaacagcgacattgttacagcccccgctttcgctctcctgcttgaattcatgtatgaagggaaactccagttcaaagacttgcccattgaagacgtgctagcagctgccagttatctccacatgtatgacattgtcaaagtctgcaaaaagaagctgaaagagaaagccaccacggaggcagacagcaccaaaaaggaagaagatgcttcaagttgttcggacaaagtcgagagtctctccgatggcagcagccacatagcaggcgatttgcccagtgatgaagatgaaggagaagatgaaaaattgaacatcctgcccagcaaaagggacttggcggccgagcctgggaacatgtggatgcgattgccctcagactcagcaggcatcccccaggctggcggagaggcagagccacacgccacagcagctggaaaaacagtagccagcccctgcagctcaacagagtctttgtcccagaggtctgtcacctccgtgagggattcggcagatgttgactgtgtgctggacctgtctgtcaagtccanctttcangngttgaaanntgaanantcttatttntctnncaggagngngagaanaaccngngnagggaaggggngaaaaggttctgtgat

SEQ ID NO: 354489 - DNA, 1167 bp, Homo Sapiens
  misc_feature (688)..(689): n is a, c, g, or t
  misc_feature (691)..(691): n is a, c, g, or t
  misc_feature (693)..(696): n is a, c, g, or t
  misc_feature (698)..(698): n is a, c, g, or t
  misc_feature (701)..(701): n is a, c, g, or t
  misc_feature (706)..(706): n is a, c, g, or t
  misc_feature (708)..(708): n is a, c, g, or t
  misc_feature (710)..(710): n is a, c, g, or t
  misc_feature (1058)..(1058): n is a, c, g, or t
  misc_feature (1076)..(1076): n is a, c, g, or t
  misc_feature (1088)..(1088): n is a, c, g, or t
  misc_feature (1096)..(1096): n is a, c, g, or t
  misc_feature (1098)..(1098): n is a, c, g, or t
  misc_feature (1111)..(1111): n is a, c, g, or t
  misc_feature (1114)..(1114): n is a, c, g, or t
  misc_feature (1116)..(1116): n is a, c, g, or t
  misc_feature (1119)..(1119): n is a, c, g, or t
  misc_feature (1122)..(1122): n is a, c, g, or t
  misc_feature (1127)..(1127): n is a, c, g, or t
  misc_feature (1131)..(1131): n is a, c, g, or t
  misc_feature (1135)..(1135): n is a, c, g, or t
  misc_feature (1148)..(1149): n is a, c, g, or t
  misc_feature (1152)..(1152): n is a, c, g, or t
  misc_feature (1154)..(1155): n is a, c, g, or t
aactgtgtgaattgtaggtagagaaattaactagggaagccagaagcttgaactaaagttttaaatttgtaggcagatgagaacttttatactatggttgctttgggcgattctaattttgtaatagcatcatgatcaccaaaattaattcaaacattttagtacatctttaatctgtcttatttaccaaagttctaatctgtttaagaacaggatgccaagagcatcttccattttatagaatgatatgctcacctttataagtgtcacctaaaagcttgagggtaaaaaagaagcagcccatatatctaaactacaggatgtcttgaacaagattcacagaaagaaagaaaaaaaagcagttctttcccaggaaggtggtaaggaagagcatgcatatttcttgttttaaccaaataccttttttatgtaaatgtctctattaaaccccaggtcctacaccaggaaatagggtgataaccaggaaaataccaagctttaacccagttggcagttccttgtggcatacatttggttagacttgggtttttcttggaaccaaaggaaaataagcatgttgagttcctcgttcaacagacatgacattgaagtaatagaatattttttaagtaaaatagttttcactttcaaagcctatgacataaggacatttgtgcttattgttaanntnannnnanggnacatngnanaaaccgagtagcattgaactgcattttagaagtatgtcatcagaaacaaatccacattatggaaaggatatacaaatgccaagtgatatgactcttttggcatggtggtagcatggtccattcagctttcagaatctttcggaggctctagattggtgcctagtactaattatttttgttagaacaatctctcaaaatttagataattttccagttgtatgtctgtcacttttaactctaaagcgtaagaatcatggtaaccctctcagaagtggtcctttcttgctcatttcagtttcgtattaatttcaaatcactgatgtattgtctttcaagctatcaattgtnatatgtacaatttaattnagtttgtagtanctgaagtnanaaaattggttagnatngngtnaanaatgntttncttntaccaaaagactnntancnncgcttgttcaat

SEQ ID NO: 354490 - DNA, 402 bp, Homo Sapiens
cttaagtaagcgtctccaattgatgatgatgggaatgagcttaacacacaagccagtattacataggattttctgccaaagacattgaatgcaccaattctgaagggaatcatcataagggacagcgggctgatcttacaaaacatcagcatgcttatgcaagaccccaacagcaacaaaaatgacaaagaattaggtgaaaaggaaggcaaaagcttgggaagaaacatgaaaatgtccgtgtgaagacatgtgtaaaaaaacaatggaagtgcaaaactgattttagtattatattttgttggcaataaattccatcccgttgtttgaatgcattttgatcctacgctgcagtgtccatgtgctaataatttaaataattactgttaacgttatagtaaa

SEQ ID NO: 354491 - DNA, 1577 bp, Homo Sapiens
  misc_feature (208)..(208): n is a, c, g, or t
  misc_feature (371)..(371): n is a, c, g, or t
atttgaagtatcattgaaagatgaagggaagatatcaatatttttatagtaggagggctggccaaagatgttttaaattcattgtgtacatgtgcctgtttcttagtaaaatgcaggtcatatctgtttaaatttttcacaatttctttaaaaatagtggtcagtcagtagtcagatgagagggtggctgaactgaattttggcagtncttggttaatttagaatttcatgtgttcggacttttcctgtatcccttttctgttcatcctagtcaatgtcttatcattgcatacattttctggatgcttgagccatcagatatcagctagctttttaaaatcacctttaagaaagcagtattttctaatagnaaatttataaacatcttatacatcttagctttcatatataggattactatgtattgatttgtaaacattcactgagtttaattttatttccacagggctcacaacaacattaaaccaggatgcttatgttcttaagtctatatttgcatatacattgactcttgatggaaagacttaagaagatcaaggtctcaccatttgtcctcaattcgtgtgaccataagatactgatagcattgagtcttgaaatgatttaataatatgagtgaggatttgctttctccattagagcattaagctaaaactatcaacattttaaaccaaattgccttatttttcttccaaacttcatatatgtctatcaggtaataataggcttgaaaattgatatcctgtggtgctaaagtacagtagaaagagaggagaagtgtatacatgttttattttaaattgtacgaaaggggaatttaaaaaatatgtaactgctgtttatacattggctccttactgcttattaatctgtattgtacacatgatgaaatgaagcagaagctgggagtcggcctttcctctagtaaccaccacatggctcagcatctgtgccaaacataggcgctcctagtctggtcagtgccaagaggctaccagaacatggggcaggtggctggtgttggtgtcccagcctaagagccacctgctgcagttaccatggcatgctgagttgatgcaccaggtggcagcagccatccgttattatttccaatggagacctagcccaggccaaggtaaagttagttaatagcattgggatatagtcactgtaatggtgctattaacaaacagtcaacaccattgtattttttaacttcgtgttctgtatctcctcagccatgtatcttaaatatattttgtcatcataatctttatggtgggggcagactttgcacttactgcagtgcaacacttgcactttaattttcctccaactgtctaaaattagagcaaatacattggcaatacagctgcttttgctctgagctacaatcatggcttttcatgttacttaccaagtggtgtttctggttaggaatcacagctgtaaaattgatttcagttcatcacacttcttcatgatgttgcccctaaattttgcacactatattcttgtatattatttcaaataaatggaaaaaaaagttgcttatc

SEQ ID NO: 354492 - DNA, 932 bp, Homo Sapiens
  misc_feature (726)..(741): n is a, c, g, or t
aaacacggcccccacccacgagcgacggacatcaaccggcccgacccacaccagcaccccattccaaaaagaaggtggtaccggtccgggattcccggtgacagcacctggatgtagatgactgaatgttaagaggttgcaagtgacaatctgaaaatttgcactcttgtgtgtagttttcttttcatttctttcagaaatagtttccaaaaagaccattacatctcctgatatgatttgtataattttcagttctagctaaaaataatgtaaggaactctcagcggatgcagctgcaacttacaatgaactgtgccctcctatcccccatactttacccttctttcttattttatagtgtgggatacacatgagtgatgttttctttgtgcactgagacaagcctattttttaaatatttagggagaagtactttagttcatgcttcttatacaacttttttctgttgtttagctttggttggattacaaattctttgtgcattcctgaatttgccttatttcatgtaaaatttatgtcattcagtttttgacaatgagtttgaggcatcagtgatatttcttatctacttgttacatatagtttttcaagtaatgactgtgattgtgaccgagtaatgtgcactttttcttgtaactgtggacattgctatgcttttttcttctagtgtttctagaattactgttccttacaattatgtaaacnnnnnnnnnnnnnnnncttttgtgatactgttggtgaatataatgtgaaaaatcttattgaaatatgagtattttggaaatacatagctgcacaaacatcttttaagatgtggatttagagtttgcttatttaaatgaaaattcaaaaattgagggctggtataattttctctgttttgtttggtttaataaacagatttctgtgtt

SEQ ID NO: 354493 - DNA, 660 bp, Homo Sapiens
  misc_feature (573)..(573): n is a, c, g, or t
  misc_feature (593)..(593): n is a, c, g, or t
  misc_feature (598)..(598): n is a, c, g, or t
  misc_feature (622)..(622): n is a, c, g, or t
  misc_feature (637)..(637): n is a, c, g, or t
catgttcgccagggtggtcttgaacacctgacctcaggtgatctgcccgcttcggcttccaaaagtgctaggattacagacgtaaaccactgcgcccagccgtgtctggcttttttacttagctaatgtttttgaggtttgtccatgacagataacgtcttggtagtttgttccttttattgctgagtagaattctgttgatggatgtaccacattttgtcagcagagagccttttaaacttggattccaacttcctgttgtctaaacggaaccctccgaacgtaggacttataggggaagctgctgtgcatgtcaaaaaaactactaatcagaatgagctttgtcatccagagccagaactgctgcagaaatttttataattttgcaacttctttttttacaaggaacttttgtgctactacacatcaggacttttgaagcatccaataaatccatttaataagtatgagcatgtgtctgagtggacaagaaagtgaaaccatccatgctacattggataatttttcctcccccagactggatagggaatctcaactttcaaaataggagtntcctgggctccattttacanagctngcacaggtatttaaagatcgtggnggccttgttaggcgntttgggaggggaggcccaacagt

SEQ ID NO: 354494 - DNA, 331 bp, Homo Sapiens
  misc_feature (14)..(14): n is a, c, g, or t
cctgaattccaganggaatagaattgttcccctttgaatttttcactttgagcactccctggcctactttcttcccttaacttttaatagtgctatgactttactcaagggaggatgtgttctttagaccaaccctatcatagctggaataaatctgtataactctcttcccctggatttaggtagctggatcaggtttcctagctgtagccagttccttgttcactaacttgcttgagctgatgagctgtgggtctttctagagagaagtaacccttgatatttatatctgtgaaaaaaatatcaataaatttgaaatgttaaatgatct

SEQ ID NO: 354495 - DNA, 528 bp, Homo Sapiens
aaatgaactttgggggacacattcaaaccacagcaccttccacaaaataaaagtaagtattgccacaactctttatttttaaccaaatctctgtaatgtcactctattcatagattaagatttgtacctccaagtccagtttgctcagattgggcagatgtcattaattagtcattaatcatctagaataatacatcttgtccacccaagatttcacatggtttttaatttgtaaacagtaaaatgtaacatgaagaagactattttaagtgctataataaaattaggttttgctaataggacaatgtgtttctcctcttaggtaacattttcacattaacagaggtcttctgggagacagtacctttactccaaaatttctggaaactatgttccacagaacactagtacttaatcctacttgaaggaaatgattttgtgaaacatgtatgagagctctgtgtactatatttcttgggggaaaaagtcacattatgtgcctatcaatatgaaagaaaatggagtttt

SEQ ID NO: 354496 - DNA, 810 bp, Homo Sapiens
  misc_feature (26)..(26): n is a, c, g, or t
agaaaggtgaaatttcttacaggggnacaagattaatggctagaagaactgcattgtcactgatatcacaaaatgtttttaaaaagccaaaggggatttaggcttatacacatttccttttagtgaataaagagattagcttttggacacatgagaggaaaagagacacaagcttgtgttaaattttgttttactgcttccctatttctcctattcatattacattctggaaaacttgctcctatatgttgctaaaattgaaacactattagaaatgcaagcagaatggtaacacacacatgtgcaagcaaacacacacacaattccatcttaaatcagttcctgggtatattgcaaattatacagtatatacacatttattacctaataatctctagaagagcaactaaaagtaaactttataacacaaaaaataaatatacaccctgtattgtactttttcttgatgaagcaacatgtttacacactagtttctataacttaacgctgtgtaacagcattttaaaattacaaaagaagatatctattaagaaataatctaatcatattgctcttcaatacacttatgtagacaattaagacttgaagtaaacttcagtaaactgtagcttttgttagctcacaaatggctataaaacatttcctttcaagtagatccctggaagttttgaaaggggttgccttaattcagtctataaaagtgctatataattatatatttcatgtacaaaattttgtagaagtagtgggaaggattctgttgttgtaacttaagatgatgtctaactt

SEQ ID NO: 354497 - DNA, 992 bp, Homo Sapiens
  misc_feature (793)..(827): n is a, c, g, or t
caaacaggactaaggaacactttcgtgcacagaagtcagccgcaatccaggcacaggacgaagatgggatacacgtgctcatctgtctgtcctcctttcctctccctccccgacgttctagttagcttgttgacttgttaaaccttctgttcttaaaatgtgttttagaatggacagccctcccctcaccactccctaccttggcctggtgtccttgagacatacggtctttgcttagtcgtgtgttggctgctttgagcaggaacaaggcctccaggccctgaggtgggaaggaaggattggatgccactgccctcctccccactttagcatgtaaggggccagcccatctcttccagcagggtcctgctgagttaccatagcaaccagcaactccagggtaccacaacagacaatggctcagcgagccgacgtgtggggatgatgcaggggttttggcccagccagaggacccagagttgagcttcaaatgctagagaaggggagaaacaggatggaagggtggtttaaggaactggcaggggtctttgagtcacatagagaagccgttgaaggaggtagggcaggttatctctgttccagtcacccccttccagccccatcccacttctgtttcaaactaaagctcccacctcgaacattgaccctttgttagaacaaagcaaagcatatctttagacaacagtgttaaaatgagcctcaaatgtatgtggatgagatctctaagaagagggtcttctggttttgatttttaaagaagagtatcctagtnnnnnnnnnnnnnnnnnnnnnnnnnnnnnnnnnnnggaaacctgtgctatttaaattggagcccagttgtaacttggtaaaggcaagcttctgtacctttgttataattaattgtatacctgtgtatgtaaatataaggcattcctattttgcagttcagaacaaaaaaaacttatttgtaatatagaataaagtttatt

SEQ ID NO: 354498 - DNA, 328 bp, Homo Sapiens
  misc_feature (99)..(133): n is a, c, g, or t
tttagacaacagtgttaaaatgagcctcaaatgtatgtggatgagatctctaagaagagggtcttctggttttgatttttaaagaagagtatcctagtnnnnnnnnnnnnnnnnnnnnnnnnnnnnnnnnnnnggaaacctatgctatttaaattggagcccagttgtaacttggtaaaggcaagcttctgtacctttgttataattaattgtatacctgtgtatgtaaatataaggcattcctattttgcagttcagaacaaaaaaaacttatttgtaatatagaataaagtttattaaaaaataataaaaatgcagtttgggattt

SEQ ID NO: 354499 - DNA, 1434 bp, Homo Sapiens
  misc_feature (362)..(362): n is a, c, g, or t
  misc_feature (1227)..(1240): n is a, c, g, or t
accacccttccatcctgtttctccccttctctagcatttgaagctcaactctgggtcctctggctgggccaaaacccctgcatcatccccacacgtcggctcgctgagccattgtctgttgtggtaccctggagttgctggttgctatggtaactcagcaggaccctgctggaagagatgggctggcccctacatgctaaagtgggggaggaggggcaggtggcatccaatcctttccttcccaccttcagggcctggaggccttgttcctgctcaaaggcagccaacacaccgactaagcaaaaggaccgtatgtctcaaagacaccaggcccaaagtagggaatggtgaggggaggcctngtccattctaaaacacaaaatcgttggtttccgaatggaaacaagattctttgaggtaagctagcttttcattttaagaacagaaggtttaacaagtcaacaagctaactagaacgtcggggagggagaggaaaggaggacagacagatgagcacgtgtatcccatcttcgtcctgtgcctggattgcggctgacttctgtgcacgaaagtgttccttagtcctgtttggtgaagtggtctcggtttcttaagcgtcctttgggttgctctttaactgtatcctctgttttaaattctacttttgtaagggagcccttccaaaatgtgcttgagtcaaaagatcaaagatactaacaaaggaagttctaattccaaataaagaaattgctggaagaagagctgcatagaccaagtctacttgcttttgcaatcctggcggagggaaagcttgggtcttcccatgacccatccctcacagagcctccttaaagtttgaggaaagctgataagagatgtgtaggattcggcagtaccaggggcagcccagagagccaagcatagacatcaaagcgggtgggaatggaataaagtgaggtcccgcaacccaggattttcagcctacctgaatcacctcactacctctgccaatacaaacagaaagttctttttgtatatgaaggattttgtttcgttttgtttaactttgctttgctttctggtaggcaccagtctactcaaggaatttaatcgggatcctaatgagtatgtatttctcttacaaccaaaaaattctatatacttttaaaacttggatactccctctaataaaaaaataattttatgggggagccaaaatttgtagtnnnnnnnnnnnnnnctctctcttgcatgtctgaaacttttactgcagtggattactttccaatgagaggagtggtcatttaggtttcctgtcaagagcatgccacccttagcaccatgaggagaggttagcagagtgtcccagcctcattcggcgaccgcgtggtcgacgatatcccgtgaattccgggaccgtacagccctgctgtt

SEQ ID NO: 354500 - DNA, 203 bp, Homo Sapiens
  misc_feature (41)..(75): n is a, c, g, or t
gggtcttctggttttgatttttaaagaagagtatcctagtnnnnnnnnnnnnnnnnnnnnnnnnnnnnnnnnnnnggaaacctatgctatttaaattggagcccagttgtaacttggtaaaggcaagcttctgtacctttgttataattaattgtatacctgtgtatgtaaatataaggcattcctattttgcagttcagaac

SEQ ID NO: 354501 - DNA, 1361 bp, Homo Sapiens
gagtaacataatgccgtcaatttggccccacatcgttcacagcgcgtacgtgtttggtactgtgttagcttgcgaggataaggccaggggggaggggtagtggttggagatagccccggcgtgtgtgccatctagcagcgaggttatgcaccaattaaacaggtggggggcatacaaacttcgcgcgtgtggaccactcaagagagagcgcgaaagggaaatgaacgggcgggtgcgaacattgtaccgggtgcgtgtggactatatcgattcctgccggtgcatggtattccattattcctcaaccccaggtgcatgcggtgtccggagggtattgcgcacgggtgctctcgaacgcgttgctatagtaaacattaggagaatggtgaggggtgccaacataacggggtcaccggttgaacagtcgcactgtgattatattggagtgaaacccctagacgtttccagagcgaaatgcgagcgcacaagtggcgtaatagtatagaagtggactcttgataggagcgcggtggagaccacacaataatgcgctggggctagcacggagggcgagggtatggggacgtacgtcgagcattcgatgcagccatctgcgagactgggcgtggaacgaaaacaagacaagcatccaaaaatcgtagtttaaacccgcgaaaaacggccacgttctccaagaagaaccagtaaactagtcttgctgccccaaggaggctggagcctggaggtcttgctgaaatccctaaccttgtttttactctaactcgttactttgaattttatcctgcttgtctctttaatcacctagccttgcttctcatgtaaataagactctctctagctgggaaagccggacaaactccagttgaccccttaatttacaagacactaagggctccttacccaacccccttccgcaaggagttgacctgtgtaagcagatcctcagcatttcaaaggagcccaattaattgataaggtactagcaccaacaatgtatgaagttcccaggatttttctcaaagagataacaacataaagccttgagttcgtgtccggcataccccctatatctaattataatgaaagatttaaagccttgcacctggtaccgttgctcttcttgtaaccatttgtcttttaaattgtttatcactctgtaaccatttgttttttgattctggcatgtttttacttctgtagaattattgcatttgagttcccctccccttcctaaacctagatataaaagttaatcaactcccttcctcggggccgaaagaattttgagctttagccgtctctttggccgccggcttaataaaggactcttaattcgtgtc

SEQ ID NO: 354502 - DNA, 871 bp, Homo Sapiens
  misc_feature (21)..(21): n is a, c, g, or t
  misc_feature (41)..(41): n is a, c, g, or t
  misc_feature (78)..(78): n is a, c, g, or t
caaatctcaatcttgtaaatntttacttctggacaatttgntcaattcatgaaacagaagcagtgtgatatgcctggnaaattacacaccttgtaatatgtcacagcctcttcaagcaaatcaagaataccaagactcactcagatatgaagttagtttttggatcactggcttcttcagagagactcagaagatgccttattatttttgtgatttatttctgggcttctcacatatccctgtcatacagccaaacgtgagctgatgctgacaatagtttattggccatggagaaaatcctcagtcttgatggaactccaggatgataccaaatgaacagcgaggaacatcaggatgccaaaaagtccttatttacagaggaaaggaggctagctgcttatgtgttcaatgaagtaatagatgcctcttaaagtattgaaataatactgcatagtgtattgccataatttgggcaatacagtgatagcacattttaatttaacaaattcaataatttaggtaaaaatataaaatgaaaaaaacagcaaatatccagaacttctcaatcataattcattttttacagtaatgtcaatcaatgaaaagcttaaatacatatttataagctggcaggccaaatattatgttagaaatacataatgtcacattcaatctacatatacatgtataaatatatgcatatacacacatatgcaagttaaatcttgaatgtcatattttggatacttctgagtaaacttatgacctcctgcttgatcggaaccaaagcatatcacatataacctaaagtcaaatttttgggcatataaacacaactatttaatacctaaacaggtatacatcattgagc

SEQ ID NO: 354503 - DNA, 772 bp, Homo Sapiens
  misc_feature (122)..(122): n is a, c, g, or t
tgattgtggacccctcagcattagcacagctgctctataaaaatgaggcccagactgcttttttaagcactttcccaatgccattcctcctcactgggcaaaacctccaaactggggtctcnagccacctcctacaggtgtgtttgggccagcaacaagttcattcatacctccctagggcaaagcttccaaagggagcggtaggctgccatctttgctgtttcacaggcttcactgatgataactccaggtactggaaaatctgaggctactagagactggagcgggccctgggcatactgcagcagccctatggaaaagtggccagactgttacctgggttcccattcctatatcttctcactaggcaagtcttgcaggcctgggcctctacctaacccccctgccagagctgtcgagccagtagcaactcagccactccctggacagagcctccaggggcaactgaaagcctctctgccactgcttctgcagtggaactgtccttgctaccctcagactgatgaaggagctaacacccttatctacaccttcaacaagctttaattgaccaaagcccatctcccacgggttttacacactccccactgctcataacagacagggaacccctggattggcccccacagcatgaattctccatcctgcttgctgattgcaataaacagttgctgacctgtattctccgggggtagaaccctgaggagacaaacaaaagacccttggctacagcccattgtccggtcccagg

SEQ ID NO: 354504 - DNA, 982 bp, Homo Sapiens
  misc_feature (980)..(980): n is a, c, g, or t
tcttcttttttgttggttcctccttcgtgtttttgttggtttttgtatcgtccctttgtcttccttcctctcctccttgttctcttgtttttctcgtttcatttctccgtgtcttctgtcccgttcttccttttgacttcgtagtctttctgatgcgaatcaaggttcgcttcctttttgttctgtattcatatacactgttggatggcgttcaatgttttgttgttctttaacaacagtttcccgtttctctgtgcccgtgtgtctttgttgtctcgttcacattgtcatttttattgggagtcttttcatctcctgcttatcttttcgctgagtatccttgttcttgtctctgtttctctctgcttcgattttgtttgcctgtcctgtctcttggggtatcctgcttacatctggtcctttagttatctggcacacgttacttttgtgccttggcatccactactgctgcctttcatttataataatagcccttccatctggcagtgggggtagaatacactcttgacattcttgtctcctgctttagaatgctagtgtgtatctatcatgtatgcaatactttccccctttttgctttgctaaccaaagagcatatattttactgtcagttgtctcaactcttgaatccatgtggcgttttctctgtcctgctgcttcttttggcctcctcgttttccttctctttttcgacaatggtagacatgaatgagatatttaaagttcattggaaatcttcttccctacagcagtaagcaaaaattagcaaagagatagtctaaatggcctctcagcttggtatgtgaaaatgagatcacatactttttaaatccaaatacaaaagcatagtctctgcaagattttgttctttgaatttcttgatattgtaattgattattgataactgtcatcatgaaattatctctcaataataagataaataaactagcatatgaatnat

SEQ ID NO: 354505 - DNA, 983 bp, Homo Sapiens
  misc_feature (959)..(959): n is a, c, g, or t
cccccttccagagggcccccgtggacctacacggctccctgaaccttggacctttttcctgcccatgaagtttaaagattcctatgccccatttcccttgattgaaatggcaggattcctaaagagagccctggtttgttaaaagaaaacactgtcatgctgtcagttccccaattgacaagtcacagactgggagaaaatatttgcaaatcgtgtatctgacaaaaggtttgtgtcccaggatgtacaaagaactctcaaaccggatagtaagaaaacaaacagcccaagtgaaaagcaggcaaaagacttgaatagacacttcaccaaagagcatacacgcgtggcaaacaagcacacgaaaagacgttcaagccccgatggcttggttataatttataacttacttatttttatctaataattgtagattcagtgtatttcttcaaaaaatgtttaattaaaagcatgttaatggtgagtgaatcccttgggtgacttcgtgtttaggtcgtattagggcatttgttggatcaacggatcattttaaccctgacttccccttattcccataaaagaagttttccagtggaatggagatttcattttgtcagcagcagtgaccacagccttaccaaagcagacgcgtgcgcgtgcacagatgcacgcacacagatgtcttaaaagactagaatccacacttcctgagccagaggggccgtgttgacggtaatgcattctctatagagccaagtccaaactggcaagctcaatgatgcaggcaataaaccgcctttttggcagcctaccaatgccaaaaggataaatgtctttccaaaagtgtgtattcctgttaaattaagctcttgctaacttgaaaaatccctgttctgccagcgaagcttcctcctcctctccagctggtagtcacttgcgtgaatgctggtcagtctgcccanggaaattcagagtattttgtttgc

SEQ ID NO: 354506 - DNA, 976 bp, Homo Sapiens
  misc_feature (32)..(32): n is a, c, g, or t
  misc_feature (37)..(37): n is a, c, g, or t
  misc_feature (45)..(45): n is a, c, g, or t
  misc_feature (65)..(66): n is a, c, g, or t
  misc_feature (75)..(75): n is a, c, g, or t
  misc_feature (85)..(85): n is a, c, g, or t
ttttctcccagtctgtgacttgtcaattgggnactgncagcatgncagtgttttcttttagcaanncaggctctntttaggaatnctgccatttcaatcaaggaaatgggcatagaatcttttaacctcatggcagaaaaagatcaacctcaggagctgtgtactccacgggacctctgaagaggaaggggtcttcccgtccatggaatgtggccctcatgccatgctaaacgatttaaggaggaaacaatggaaaagtagccaattatcacggacaatcatatgcatacaaaatacatggggggaaagtaactgaaaaaatcttctgttggtcttgagaaacagctaacaagcacattactactggacacgctcttaaccaaaaaattttactttgcagaacaactgtgatgtgaggtgagaaggactaaagctatttgcctgcttggtgcgtgactgtgttttttaaagcatgcacgttatttctttaagtggcaatttaatctgagaatgagtgaacccaaccacacaggtggttcctttcacagttggtttttaaccattaggaaactattcacccttccaaaaagttaataaattatcatcatcatgatgatgatttctgctgggtcagagaacatcattagataacagagacaaatgctcacactgttgaacgagcagggacaaaacctggcagcccatgcctggatgaatgacaagagaagatgagcaccagggtccccctctcatgcacgtcatgacgcgctggctgctgtccaagcagttggctcagcatctgaagacgggaggaacaacgggtttcccactgacagtgaccactcggcaggcaccacaggcccagcccacagcccatgcagtggaaactcacatccagcagagcctggtgtcaggtgtagttatgtgtaaaggaaaatggctctcagcaatcaaaggggaaactaaaaaattaaat

SEQ ID NO: 354507 - DNA, 749 bp, Homo Sapiens
gggccgccgccccgggctgggtttgggggaccgagccgctccgggttcgggatgctgaggagaccgcgggcccgcgccagcctcccacacacacacactctcccggcgcctcggccggccgggcgcggtgtgcaggggtgaggcggtgtctccaggctgaggagggacgcggaggagggtccggcgcggccccgggactggagggtgagtccctcacaaagggcggagcggggctgtcacctggagatcacggagggaagttcatccatgagctcggatttcccacattacaacttcaggatgcctaatattggattccagaatctgcctctcaacatatatattgtggtttttggtactgctatatttgtcttcatccttagtttactcttctgttgctacttgattaggctaagacatcaagcacacaaagaattttatgcctacaaacaggttatattaaaagagaaagtaaaagaattgaatttacatgagctctgtgcagtgtgcctagaagacttcaagcctcgagatgagttggggatttgcccatgtaagcacgccttccacagaaagtgccttattaagtggctggaggttcgtaaagtgtgtcccctgtgcaacatgccagttctacagctggcccagttgcacagtaagcaggaccgtggaccccctcaggggccccttcctggggcagagaacattgtatagcttaccgcaaggatcagactgttgctggacacgaa

SEQ ID NO: 354508 - DNA, 1542 bp, Homo Sapiens
  misc_feature (1139)..(1139): n is a, c, g, or t
  misc_feature (1146)..(1146): n is a, c, g, or t
  misc_feature (1188)..(1188): n is a, c, g, or t
gtccggacggacgctcgccgcccgcagcctgccgcccgccgcagggcgctgacggtcccgcacgtctgccgctgccaccggcgcgcccgaaacttccagcactatgttgaataagagtggtgagagcagatatcctgccttgttcccggtcttagggggttcatccatgagctcggatttcccacattacaacttcaggatgcctaatattggattccagaatctgcctctcaacatatatattgtggtttttggtactgctatatttgtcttcatccttagtttactcttctgttgctacttgattaggctaagacatcaagcacacaaagaattttatgcctacaaacaggttatattaaaagagaaagtaaaagaattgaatttacatgagctctgtgcagtgtgcctagaagacttcaagcctcgagatgagttggggatttgcccatgtaagcacgccttccacagaaagtgccttattaagtggctggaggttcgtaaagtgtgtcccctgtgcaacatgccagttctacagctggcccagttgcacagtaagcaggaccgtggaccccctcaggggccccttcctggggcagagaacattgtatagcttaccgcaaggatcagactgttgctggacacgacgtctgtgtggagccaggaggaacacatgtggtgtctgtatggctgctctctacctaggacaccagctgccacttcttttgcctcatgaagaactcttgggccagccaaactgggaacctaggtgtctgggtcttgtgacaaccaaagcactttgacactaccccctgccgagagaagaggagtggatgagcctgcgggtttgcctcaagaaacttcatgagggtctcttactaactccattacactctctctcctggagcctcatctccatgtcaagcaggagggtaaagaagggaactaagagcaggtctttcaagccacaccctcaactgcgtgatggatgggtttctctgtaggccatgtctaggccctttgtcgcagcaaaccttcccagctagcccttgagccaagtaaataccagcacaaccagccaccagtggttggtgaggcagtgcccacaaggctcatgttgtattcctttgataaggccntcttggntttgagtagctatgttttcttcttcacccatttccccctcangattacaacacctgctatcaaatcatctaagctgaaaacatgagatgcgcttggaaaggcctagtcagaagcccatttcctccttatcatttccctctcctatgcaccagtaaggcccgtccagagccccagcagggagtgggccctgagtccacactgtccctgagtgatccaggaggctgcccacatccccacatgtgcactgtggttccagtgtagctgctgtgagcccactgccactgcctcagaagggagccactgtgaacctctcgagtggctccaaagagcagtggctttttgagaatggcccatacttctggcccggctggatgaagggaatgccgaccctttggc

SEQ ID NO: 354509 - DNA, 587 bp, Homo Sapiens
  misc_feature (131)..(343): n is a, c, g, or t
tacttccacaggaaattatggagttattgcacacagtgcaaaaacccaaggaagtggcagtcttacactgctgaagccatcaaaaaggggaaggagaggggagaacagtagcataagcagctagcagagannnnnnnnnnnnnnnnnnnnnnnnnnnnnnnnnnnnnnnnnnnnnnnnnnnnnnnnnnnnnnnnnnnnnnnnnnnnnnnnnnnnnnnnnnnnnnnnnnnnnnnnnnnnnnnnnnnnnnnnnnnnnnnnnnnnnnnnnnnnnnnnnnnnnnnnnnnnnnnnnnnnnnnnnnnnnnnnnnnnnnnnnnnnnnnnnnnnnnnnnnnnnnnnnnnnntggaagtagtaaagaaaaaacagtgtaccctattcctttaaaagccaaaataaatttaaaacctataattgataattgaaagtattctccataaccctataacactccaataccacttcattgtcagtgtaaacaatggcgtatcctgaaagcactgaggccttcctatcaaaaatccttaacccagtaacccgtggatggcccaaatgcattcagtctgtagcggcaactgctttgttaacag

SEQ ID NO: 354510 - DNA, 482 bp, Homo Sapiens
  misc_feature (136)..(273): n is a, c, g, or t
aaattatggagttattgcacacagtgcaaaaacccaaggaggtggcagtcttacactgctgaagccatcaaaaaggggaaggagaggggagaacagtagcataagcagctagcagagacagggaaagaccagcagnnnnnnnnnnnnnnnnnnnnnnnnnnnnnnnnnnnnnnnnnnnnnnnnnnnnnnnnnnnnnnnnnnnnnnnnnnnnnnnnnnnnnnnnnnnnnnnnnnnnnnnnnnnnnnnnnnnnnnnnnnnnnnnnnnnnnnnnnngagaaagagtgagagccagaggcaaaccggagagagagacaatgtcaaagacagagaaatatacaagtagttaaaaaacagtgtaccctattcctttaaaagccagggtaaatttaaaacctataattgataattgaaggtcttctccatgaccctataacactccaataccaccttgttgtcagggttaaggctcccgggagtcctct

SEQ ID NO: 354511 - DNA, 837 bp, Homo Sapiens
  misc_feature (14)..(14): n is a, c, g, or t
  misc_feature (31)..(31): n is a, c, g, or t
  misc_feature (98)..(98): n is a, c, g, or t
  misc_feature (157)..(157): n is a, c, g, or t
  misc_feature (159)..(159): n is a, c, g, or t
  misc_feature (182)..(182): n is a, c, g, or t
ctgtaatagctgtnctcacccgacgactgcnacccatcaaagaagctaagcctcggttacagaagctcttccgagacttctggctgtattccgttctnatgggattcgctgtggagggctcaggactctggccagaagaatggtacgagggggtctntnaaatagccactaagtcccccttngctcacctttcccagcaaggagccactgcggtccgtcctccacgtataactcagccatgaaggaatgacacggtcacccccgctgagctgagtgagctccgcagcactatcatcaacctgctggacccccctcccgaggtgtccgcactcatcaacaagctggacttcgccatgtccacctacctcctctctgttaccggctggagtacatgagggtactgcgttcaacagatcctgatcgcttccaggtaatgttctgctactttgaggataaagctattcagaaagacaaatctgggatgatgcagtgtgtgattgcagtcgcggacaaagtattcgatgccttcctgaacatgatggcggataaagccaagaccaaggagaacgaggaggagctggagcggcacgctcagttcctgttggtgaacttcaaccacatccacaagaggataaggagggtggcagacaagtatctatctggtctggtggataagtttccccacttgctctggagcgggactgtgctgaagaccatgctggacatcctgcagaccctgtcactgtcactgagcgctgatattcaacaggatcagccttactatgacatccccgacgcaccctaccggatcacgtttcctacacgtcgatgcccgtg

SEQ ID NO: 354512 - DNA, 2186 bp, Homo Sapiens
  misc_feature (1966)..(1995): n is a, c, g, or t
cggtccggaattcccgggatcgagcggctgggagcgcacgcgagcgggccgtggccgcgcgggcagcgccctgagcctgtcccgcgcccgcgggcccggccgagcaggagcagctcccggggatgcccgggcggctcggagcgcgggcagcggcagccgtgcggtgagggcggtggcgcccgcgggacctgcgactgccaggaactcctgccaccgccaccggctcccatggcccacatacccagtgggggtgccccagcagcgggggcagcccccatgggcccccagtattgcgtgtgcaaggtggagctgtcagtgagtggccagaacctactggaccgggatgttacctccaagtccgaccccttctgtgtcctctttacagagaacaatggcagatggatcgagtacgacaggacagaaaccgcgatcaacaacctcaaccccgccttctccaagaagttcgtgcttgactaccacttcgaggaggtacagaagctcaagttcgcgctctttgaccaggacaagtccagtatgcggctggacgagcatgacttcctgggccagttctcctgcagcctgggcacgatcgtctccagcaagaagatcactaggcctctgctgctgctgaatgacaagcctgcggggaagggcttgattacgatcgctgcccaggagctgtccgacaaccgcgtcatcacactaagcctggcgggcaggaggctggacaagaaggacctctttgggaagtcagacccctttctggagttttataagccaggagacgatggcaagtggatgctggtccacaggactgaggtgatcaagtacacactggaccctgtgtggaagccattcacagtgcccttggtgtccctgtgtgatggggacatggagaagcccatccaggtcatgtgctacgactatgacaatgacgggggccatgacttcatcggcgagttccagacctcagtgtcacagatgtgtgaggctcgagacagcgtcccgctggaagttcgagtgcatcaaccccaagaagcagaggaagaagaagaactataaaaactcgggcatcatcatcctgcgatcctgcaagataaaccgagactactccttccttgactacatcctgggaggctgccagctcatgttcaccgttggaatagactttacagcctccaacgggaatcccctcgacccttcctctttgcactatatcaaccctatgggcaccaacgaatatctgtcggccatctgggctgttgggcagatcattcaggactacgacagtgataagatgtttccagctctgggattcggggcccagttacccccagactggaaggtctcccatgagtttgccatcaacttcaaccccaccaaccccttctgctcaggtgtggatggtattgcccaggcgtactcagcttgcctgccccacatccgcttctacggtcctaccaatttctcccccatcgtcaaccacgtggcccggtttgcggcccaggccacacaacagcggacggccacgcagtacttcatcctcctcatcatcacggacggggtcatcagtgacatggaggagacacggcatgccgtggtgcaggcttccaagctgcccatgtccatcatcatcgtgggcgtgggcaatgcggacttcgctgccatggagttcctggatggggacagccgcatgctgcgctcccacacgggggaggaggcagcccgcgatattgtgcagttcgttccctttcgagagttccgcaacgcagcaaaagagaccttggccaaagctgtgctggcggagctgccccaacaagttgtgcagtatttcaagcataaaaacctgccccccaccaactcggagcccgcctgagctccagtgcccagcagcagcatgtcagctgagcctcctgccctcccccaggcaacatgcacgctcactctgcttccttgtgggtggccnnnnnnnnnnnnnnnnnnnnnnnnnnnnnnacaaccggacctccacccccaacttcctccagcccagctgggcttcctttgttggagtcaactgttgatgcttccaggccaaactggcttcctctcctcctctccccacctttgccattcttaagtattgaatgtactttgtataattttagtggaattgttattgagaataaaatttttacaatcataaa

SEQ ID NO: 354513 - DNA, 445 bp, Homo Sapiens
  misc_feature (13)..(13): n is a, c, g, or t
  misc_feature (106)..(106): n is a, c, g, or t
aatggccaatgtnctggagggtaaatgttggatgtccaatagtgccctgctaagaggaagaagatgtagggaggtattttgttgttgttgttgttggctcttttgncacacggcttcatgcccataatccttcccactcaaggaaacttgtgaggtgtgtgctgagcatggcagacaccagataggtgagtccttaaccaaaaataactaactacataagggcaagtctccgggacatgcctactgggtatgttggcaataatgatgcattggatgccaatggtgatgttatgatttcctatattccaaattccattaaggtcagcccaccatgtaattttctcatcagaaatgcctaatggtttctctaatacagaataagcaatatggtgtgcatgtaaacctgacacagacaaaataaaaacagttaagaatgcaaaaaaaa

SEQ ID NO: 354514 - DNA, 386 bp, Homo Sapiens
  misc_feature (126)..(126): n is a, c, g, or t
  misc_feature (280)..(280): n is a, c, g, or t
  misc_feature (309)..(309): n is a, c, g, or t
  misc_feature (316)..(316): n is a, c, g, or t
  misc_feature (342)..(342): n is a, c, g, or t
  misc_feature (358)..(358): n is a, c, g, or t
ccagtgaaaaatagttaaattatcaccaacctcactgataaaaattcatctgaggtataactgacatctattgctaatggaatgaagatgaatgaagtagcttctaaatacaatgccttatctttncactatctggactagctgtaacctacccattccagggttttgtttttgtttttaaatttggggacttgactggaattgacttggaaaaaacaacgcagcacttgccatacttattatctgcctaatattgttaagatctaaaggcaattagganattctcaaggtatctaaatctgatagcanatactcntcttttaatgctttctaccttcccantgaggaaaagcagctnctcgtgggaaatgttcaaatctaccagg

SEQ ID NO: 354515 - DNA, 942 bp, Homo Sapiens
  misc_feature (837)..(867): n is a, c, g, or t
agagatccttcgtgctacaaatgtggcaacaccttgtttatttagagtaagatgtgttaacatccagcatgacaaaatttgtacaaagttcacaatttaaaaatgaagtatcacagcaacttgtgattccacacatttatagcaaaattaaagtgtcaacaaacccatgccgtgtagtacaaaaataaatcaaacttcagttccacagagagcacaataaatagtttatacaaaattctgtcttaataaatgattacttaaattaacttagaaatgaatatgaacaataagttataataaactctgatgactcacaataatccatatgaaaggtcagcattctaatatgtgacacttttgtgatccctatataatagtcacagataacttttgatttgagattatgtaccaacgttagatgagcagcaggtttgtgcttaaaatccctttccattgtacataggtgataacaataagaatccaaaactgatactatctagtactctactaaaagcattactatattggcaaagaagctgcagacacaacgcggtggggaaatgcatatgctgttatgaacaatgggggccctaaaggcagctggggccctgggccacacggacggcctcaggtgactgcaagcaccttgcttcagctctcaaaacgcattctgagcatggcagctgcaaccaatagcacaacagaaagggggcgctgtacagagaaggttccgcagagccccgaaataattacatcgtcttttcccagctagttattaaagtccttgtggaaaactgtaagcttttgtacagtgaacagtataaagtgccgctgggnnnnnnnnnnnnnnnnnnnnnnnnnnnnnnnccgaggttgagtattgtatcagaatattcgtcgtgagatccctgtagtctcccttcgcaacattattgatccgct

SEQ ID NO: 354516 - DNA, 737 bp, Homo Sapiens
  misc_feature (715)..(715): n is a, c, g, or t
ggataatatggctacacacttaagtcaacataaaactcatacttgccaagttgtaatgcagaaagtttctgtttgtatcccaacttctgagcacctttctgaatgcagaagcagcccagagatttcaaaaaatatccagggtatacctggacagtgtcccccttcgatggacacaactgatgcctgttctctctttccaaggaatgtgaataatttgactgtgggacctgctcttaggttgtggcctcaagaaatcagatcttggggagactccctttctacatggctggcctcccataaggctgatgttgtttggccagagatggctttaaggcccaccaaattgagcatacttcccactgggggctttggcttatgatcttaagcttatgagtcagttatgaccaagaaaagcccatcaaaccactgcttcagcatccaagttgaagttcagtcattttggctgctgcctttaaatctttctctagcatgaatgcagtccaaggaatataaaaactctagttgttaggaaaccatggctactttcatatccttggaacaacaggtctccacaattaagttccaaaattgcagttatttttactgacatataaaatctattaaccagtattaattctgtaattttttaacaataccgattctttgcatttttgattttttaaaaattaattttaatagctttgggttttatgtntctcaaaaattttattaaatgt

SEQ ID NO: 354517 - DNA, 1740 bp, Homo Sapiens
atcagatcttaggaaatcggccagttaaaataaatgagtcccgtggaacagtgtctcagctggaactgtcgcggtagagcttggtcggagtgcaaaagggacagacgcatcaggggtccaactcaaggctcctgacagaggtgccaagctctcctgatgaaatgtgttctgccccactgggctccagggacagtgtctggtgctgttgaagcccttattcgaactttccagaatggatagtcccccaaagctgactggagagaccctcatcgttcatcacatccccctggtgcactgccaagtcccagacaggcagtgctgtggaggggcaggtggaggtggtgggagcacaagacctaatcccttctgcccacctgagctgggcatcacccagcccgatcaagacctaggacaagctgactccctgctattcagcagcctgcactctgctccaggaggaactgcacggtctatagacagcaccaagagtaggagtcgggatggaagaggccctggagcccccaaacgacacaaccccttcttgctgcaggagggtgtgggtgagccaggacttggtgacctgtatgatgacagcattggtgacagtgccacccagcagtccttccacctgcatggcactggccagcccaactttcatctatcctctttccagctgccaccatctggccccagagtgggcaggccatgggggacaacacgcagtcgggctggagtggtggaagcgcaggaacaggagccagtgatgaccttggatactcagcagtgcggcaccagccaatgctgccggccagagctggaagcagagactatggagctggatgagtgtgggggacctggtgggagtggcagtgggggtggagccagcgatacctctggcttttcctttgaccaggaatggaagctcagttcagatgaatccccaaggaaccctggatgctccggctcaggggaccagcactgccgctgcagtagcacatccagtcagtccgaggcagctgaccagtccatgggctatgtgagcgactcctcctgcaacagttcagatggtgtgctggtcaccttcagcaccctctacaacaagatgcatggcaccccccgtgccaatctcaactctgccccacagtcctgcagcgactcttccttctgcagccactcagaccctggcgccttctatctggatctgcagccctccccatttgagtctaagatgtcttatgagtcccatcaccctgaaagtggaggaagggaagggggctatggttgccctcatgcctcttctcctgagcttgatgccaactgcaactcctaccgcccacactgtgagccgtgcccagcagtggctgacctcacagcctgcttccaaagccaggcccgtcttgttgtggccacacaaaattactataaacttgtcacctgtgacctatcttcccaatcatcacccaagccctgctggctcttccatcactagctgctctgaggaacacaccaagataagtccccacaccaggccctggcccagacccaggccccagccagccctctgagtattacctattccagaagccagaagtccagccagaggaacaagaagcagtgagttcctccacccaagcatcagctgctgtgggccccactgtgcttgagggacaagtatacacgaatacttcaccccccaacctcagcactggacgtcagcgctcccgcggcgttggatgcatc

SEQ ID NO: 354518 - DNA, 1075 bp, Homo Sapiens
  misc_feature (478)..(479): n is a, c, g, or t
  misc_feature (481)..(560): n is a, c, g, or t
  misc_feature (633)..(633): n is a, c, g, or t
  misc_feature (1055)..(1055): n is a, c, g, or t
ttaacatggtaagaccaattgtgcattcagtgaagtattatcatgccactaacttcaacctatcccaccttactcaagggtgttggtaaaagatagtaacaatgtactatttaataacagagtggactaacatctctaataatttctcttgccagtgactttaaactaaagaacttaattaaagaacattgttcccataggttaaatttttattcttatttaaacatatttttcttaacttttgtgggtacatagtgtgtgtatatatttatgccatatatggcatattttgatacaggcatatgaataggtattaatcacatcagggcaaatgaaatatccatcaactccagcatttatcatttgtattacaaaccgattctacacttttagttactttaaaatgtacaagtaaattgctattgactatagggtcattttcatgggtataataaaaattatatacaagtataaatannannnnnnnnnnnnnnnnnnnnnnnnnnnnnnnnnnnnnnnnnnnnnnnnnnnnnnnnnnnnnnnnnnnnnnnnnnnnnnnncccttgtcgggccccccctcggcccctcaaaaacttttcaaaaaccttccttttgggcgccgggggcccccanagaggaaagggaaacttgggcccatacctgtttctcctagggaaaacccggggaccagaacaaagggcctgggaatctccccccaaataaaaaaaccccccgggggggaaaccgcgagggtttctggaacaaatccccagaaggggagttccgggggggccataaacggggatttctttccaacggggagtccccaggcggagccttcaatatacaaaataacgcccccgggcgcggggccacttatttggaaaaaacgggggtgggaaaatccaattaagccattcctcggccgacgggggaagacccctcccaaaagggggggtggaggaaaccctggaaatcgccaggggaacacccttgggcgctgggaaaaatttgccggggaaacggggcaaattgcatggccctatcatgacccngtggggaatcctactggaga

SEQ ID NO: 354519 - DNA, 641 bp, Homo Sapiens
  misc_feature (17)..(17): n is a, c, g, or t
  misc_feature (40)..(40): n is a, c, g, or t
  misc_feature (52)..(52): n is a, c, g, or t
  misc_feature (71)..(71): n is a, c, g, or t
  misc_feature (77)..(77): n is a, c, g, or t
  misc_feature (116)..(116): n is a, c, g, or t
  misc_feature (291)..(353): n is a, c, g, or t
tttaaacacggcttccntgcaccccagtccccatagttcncctgtggggttnagttggaggagatgcgatntggtanagagggggtggggagaactcagcagtgtcaccgtgctgnctgcatttggtaaccttccaaatccaagagtgtctgttcctagagtggatttatacttatatgtagccaggtgtccctaatatcacgaccgagcttcccacacaccatggaagcacatacatccaacctcacaccaggtcacacaccactcagtttctcaccctcataaagcagnnnnnnnnnnnnnnnnnnnnnnnnnnnnnnnnnnnnnnnnnnnnnnnnnnnnnnnnnnnnnnngtgcacacaccatatgctcacataaggcagacacaaaccctcacccccacatccctcctgggctctattcctcctttccactgaggtgctggcgttgtagggtgtcagttctcaacccctcacttccctctgttctcctttggatatcctgaggtaggtcaaatgcactaataggagacaacaataataatgtaaacccattgtggttactgatacaggttctaagtctcatgtgaatgagcctcagtggatcccaaaacacatttcctacaagctacatgaaaggcc

SEQ ID NO: 354520 - DNA, 710 bp, Homo Sapiens
cacagagacctccctcaactggagggcagcagcagctcacccccaccccagaatcagtgttccagaggacagctgggggcagggggttaggaacaatcccactccctcctggaagaggtcctgaccccccaccccagccatctgcctgtacgtggtccctctgctatctgactggggcgagttcttttcatgagggccttgcctggtgcctggatgggaacagggtgtgggggaaaggtctgtgtgttcccccctcacctcccctgctcagcggtgtggcctctggctctggggaggatcgggaagccccagggtccgtgccttggagtggggggacagccttttctctgccacagcttctgcctttgggggcttacccttcctaggagcagaactgttgtggaggggaagaggacggtgaaggttccgaagggaagggggctgcccccactgaaaacgaagcttccagtcacagacccttcattatttatcaggacccaggggatgaggtggcaggggagggggctgcatggaggtgagtgccctacaccctcgtccccagcgcctgccccctcccgaaccacgcctgggctgagggccaaggataaggggggctagaagcaggccacagacgacgcaagaactgctccaggggccagcacctgggtaccgcgcgatggccaccaggcacacaacggacccgagcccca

SEQ ID NO: 354521 - DNA, 885 bp, Homo Sapiens
  misc_feature (664)..(702): n is a, c, g, or t
  misc_feature (835)..(835): n is a, c, g, or t
  misc_feature (845)..(845): n is a, c, g, or t
  misc_feature (864)..(864): n is a, c, g, or t
cctatatcaggggagcagccacaaagaagcaagtcttgtaaaaggtcttttgcaaaggagagtgaacccagcaatgagagatccttaacagctagtgcccattagggggctaaacctaaagcctgggtggtgatggctcaaacgctaatgagtcagtgaatccttaccgaccccctggcctttataatctgaggcaactttgtgctgcagcccgggaatgtgcagggcactagggaatacaaggccttcttcccctggttgtcttgtaataaaacagccatggggttgtccctccagtccgagagactgagatgaggcctacatagcagcgatgtggtcaggtaaaaatcaggaacccactgaaatcttgggcaagccaccctgcctgcttgtgcctcggttctctcatatgtcatatataggaggtgaggactccagctccacctgccccaggtgggtgtggtgatgatgaggaaagacaagaggcttgcaaggaccctgaagaggtcggagcatcatacagattcctttattagcccacattctgatgttccctggtgagacttgccccaagcaattgctagtaaatgggggttaatttcttctccacctccctactgaacaaaaaaagaaatgccagacttactaggagaatcgagttgcnnnnnnnnnnnnnnnnnnnnnnnnnnnnnnnnnnnnnnnaaggctccccttacacaccctcctttaagctttgggttttctctcttatagtttgttgacacatgctaaaaatgtctttgggagagaacttctggcctggataaacacccaattctaggactgtggggtgggnttttcgagcntgacggtgggtcaattccntttcattaaggcagtgatctg

SEQ ID NO: 354522 - DNA, 480 bp, Homo Sapiens
ctccgccgccgcctcgggaggtgaggacgaggaggaagcgagcagcccagacagcggccacctcaaggatggaatccgacgtggtaggcccagagcagatactgtccgcgatttaataaatgaaggagagcattcatccagcagaatccgttgtaacatctgtaatagggtgtttccacgggagaaatcgctccaggctcacaaaaggactcatacaggtgagaggccctatctgtgtgactatccagactgtggaaaagcctttgttcaaagtggacagctcaaaacacatcagcgtcttcacaccggagagaaaccttttgtttgttcagtggctgcctgagcagattcacccatgcaaaccgccactgtccgaagcacccctacgccaggctgaagagagaggagcccacggacacactcagcaaacatcaggctgccgacaacggccgcggccgagtggctggcgaggtttgggtg

SEQ ID NO: 354523 - DNA, 991 bp, Homo Sapiens
atgtcattatcttgaagaattatctcacaacagcacttatacaaaacccaaacttttcaggggagagaaaaatgttgcccattaaatgcacttcctgcagtcagagcagattgtggggtttatagaacaatgatgtcggagcttccagattggtttggcagctgcattgttctcggagggtaaaccagacgcacttaagtcccagtctcttttataggcttttgttcataccaaattattctttcactgtgctagcattcatgatggcatgttaaaggcgtgcagcttagcaaccagcttctggttgccaagcagcccagcttccaataggttttcctcgtttaagatacttttggtgggagcgccatgaaggccatggtgtggacttttcttaactgtatccctttattaggatgctgctgtgatttgttacttgcattatggtgttagtatattacagtagttaataaatcacagggtgtaaaaatctgtttttaaaattccttccttcaattctaagtaattgggctcatgcatatctatatttaaataggaaaaaattgaagtggataccacttcataatgaagcagttgtatacagagctctccctaagggataattttctttttatgaattgcccaatccaagaggctagggggaaatggattattttcttttaaaaactaaatggaaacccgggtattagttagaaaccatgggatatttaaaggttggtcttatctttctccggggaaaaaaggccccttgaggaaaaaccccctgtaaaaatgttgttaggaatttttaaccctgggggggaagttttaaatgtgtttttttcaaccggaaaaaattcccgggtttcctccctcccttagggattttaccccaagggttaaaacaaaaaggggttttcctttatttgtgggcccccccacataaaaaattttccccacggaagagctcttgccacattttgggaaaaacctc

SEQ ID NO: 354524 - DNA, 1071 bp, Homo Sapiens
gtccccttcggtcctttttccaagtttttcacaagcggttgtcatttgagggggtgggaaatcccgacctggccaaggcttctttgtccaaaaaaggacaatcgtttccatttggacgggcggcgaattttcctttgtttaaaccctggggtgttctttagtccgtttccgtttttgctcacagtttcctgaggaataatctttttaaggtgcccccggatggcgatgcgagccaagtctgggaggctgcgaactgccactggtggtaactggacaggtcttgattttcctgactctgaatggcagggttctcttcccagtggcatgacaaggatccctcccactttgagaagattcttcatgtactcttcatgctctttctgcacgccagccccacagtatacacgatcatactgagaacaatccggagaaatctccaggcaattcccagtaacaaaggaaggttcacagaagtcaaacttgtcaaaactatcacttgttctgatgaagaagtccagtttctgctttgcatactctatcacatctgagtgaagttccaccccatggttcacaccaaaaggacctagaatgaggcccaccatggagctgagatacccagtgccactgcccaggttcagaaacgagagtccaggctgcagatctagggcttccatcacctccgagtagatgcacggggctgagaggtgaatgtttccatgcttccatgccaagtctttataagcattttctttaaattcttcaagataatagtctgcacgatcgatagctctgaaagcctgctctaccagctcagtccggatatactgtgcttctttcaaattatctatcagctcatcattgtcttcaccagcactcacagcaccgcccatgttcaagattacacttaggcaatactccaggctcggccggccgacgggttcggaccgcctgggctgccacctgcagctcctcgggcgcgtccctcgtgtgtccgcggccgagcagcgccgctccaacctcggccgccgtaaacatccgccgccgatcccgggaattccggaccggtaccac

SEQ ID NO: 354525 - DNA, 2108 bp, Homo Sapiens
  misc_feature (53)..(228): n is a, c, g, or t
ggtacccggacaataataaataaatggttttgagatatcgtatatctatatgnnnnnnnnnnnnnnnnnnnnnnnnnnnnnnnnnnnnnnnnnnnnnnnnnnnnnnnnnnnnnnnnnnnnnnnnnnnnnnnnnnnnnnnnnnnnnnnnnnnnnnnnnnnnnnnnnnnnnnnnnnnnnnnnnnnnnnnnnnnnnnnnnnnnnnnnnnnnnnnnnnnnnnnnnnnnnnnnacagccagacaactatcagggaacctgcccagataatcacataggttcttttctattttccctaagcatcggccggcttgagaaataaagggacagagtacaaaagagagaaattttaaagctgggtgtccgggggagacatcacacgtcggtaggttccgtgatgccccacaagccacaaaaccagcaagtttttattagggattttcaaaaggggagggagtgtacgaatagggtgtgggtcacagagatcacgtacttcacaaggtaatagaatatcacaaggcaagtggaggcagggcgagatcacaggaccacaggaccggggcgaaattaaaattgctaatgaagttttgggcaccattgtcattgataacatcttatcaggagacagggttttgagagcaaccggtctgaccaaaatttattaggcgggaatttcctcttcctaataagcctgggagcgctatgggagactggggtttatttcatccctacagcctcgaccatagaagacggccacgcccaggggggccatttcagagacccacccccaggcgcgtattctctttcccagggatgttccttgctgagaaaaagaattcagcgatatttctcccatttgcttttgaaagaagagaaatatggctctgttccgcccagctcaccggaggtcagagtttaaggttatctctcttgtttcctaaacattgctgttatcctgttctttttcaaggtgcccagatttcatattgtttaaacacacatgctgtacaatttgtgcagttaacgcaattatcacagggtcctgaggcgatgtacatcctcctcggtttacgagatgacaggattaagagattaaagtaaagacaggcataggaaagcacaagggtattgacttggggaagtgataagtatccatgaaatcttcacaatttatgttcagagattgcagtaaagacaggcgtaagaaattataaaagtattaatttggggaactaataaatgtccatgaaatcttcacaatccacgttcttctgccatggcttcggccggtccctccgttcagggtccctgacttccggaaatcagaaaatatcttgaattgccgtaataaatagtaatgtcttctttctgatagccattccaaagtaggtatgagttctacttcctttacactaccaactatattaataacctttgagataaatgaagcagtaataacccaaaattctttgcaatgtttagcaagtatgagccgatactacctgaagatcatatggattgtaaaaggatttaggacttttccgaggaaggcaataaacaaattctccatcatcttccaaaggtttctttaaagtaatcttctgaattgcaattttggagcttccgtatttcaaactgtgctgcggtaatatagtttgccaaccaagcttttctcgtagcctaataatatttcttatcacatcatcatcttttggttctgttctatcataggacacaggcctggctttcctaacatttggacaagcatgagtttgatccttttttctccttgacttccctttctccttaagggaagctggctctggagaaaccatatgttgttgaattatactttctctaaggtaatcttctgttttctctgacttcaaagattcagagaatgttctaactgttttatattccaatgtttccttttctgctatttcagctggttgagtctctaatggtttcacatcttcatattttttctcttcatatcttaaaagtcttggttttgtcttggtttcctccttgtccatctcttgattttcagttgtcaaatcaatgggtataaacgtctccatatgttttctcgtgccgaatcctgcagcccg

SEQ ID NO: 354526 - DNA, 651 bp, Homo Sapiens
  misc_feature (439)..(439): n is a, c, g, or t
  misc_feature (444)..(444): n is a, c, g, or t
  misc_feature (492)..(493): n is a, c, g, or t
  misc_feature (540)..(540): n is a, c, g, or t
tatgaatagggtgtgggtcacagagatgacatgcttcacaaggtaataaaatatcacaaggcaaatggaggcagggcgagatcacaggacccaggtgaaattaaaaatgctaatgaagtatcatgtcccactgggcacgcattgtcattgataacatcttatcaggagatagggtttgagagcagacaaccagtctgaccaaaatttattaggtgggaatttcctcgtcctaataagcctgggagtgctacgggagactggggcttatttcatcccttatctccaaccgtaaaagacagacattcccagagtggccatttcagagacctcccactaggaacgcattctctttctcagggctgttccttgctgagctctgttctgcctggctctcaggcagccagacctaatggttatctcccttgttccctgaacatcngctgntatcctgttcttttttcaaggtgcccagatttcatattggttaaacannattgtgcagtaacacaatcatcacagggtcctgaggcgacatacatnctcagcttacgaagatgacgggattaagagataaagacaggcatagaaatcacaagagttttgactgggagtgataaatgtcatgaatcttacaattatgtcagagattca

SEQ ID NO: 354527 - DNA, 700 bp, Homo Sapiens
ggattttcaaaaggggagggagtgtgcaaataggtgtgggtcacagagatgacatgcttcacaaggtaataaaatatcacaaggcaaatggaggcagggcgagatcacaggacccaggtgaaattaaaaatgctaatgaagtatcatgtcccactgggcacgcattgtcattgataacatcttatcaggagacagggtttgagagcagaaaaccggtctgactaaaatttattaggtgggaatttcctcgtcctaataagcctgggagtgctatgggagactggggcttatttcatcccttatctccaaccgtaaaagacagacattcccagagtggccatttcagagacctccccctaggaaagcattctctttctcagggctgttccttgctgagaaaaagaattcatcaatatttctcctattcgcttttgtaagaagagaaatatggctctgttccgcccggctctcaggcagtcagacctgatggtcagctcccttgtttcctgaacattactgttatcctgttctttttttcaaggtgcccagatttcatattgtttaaacacacatgctttacaaacaattggtgcagttaacgcaatcatcacagggtgctgaggcgacatacattctcagcttactaagatgacaggattaagagattaaagtaaagacaaggtagagccgaggggtaccg

SEQ ID NO: 354528 - DNA, 304 bp, Homo Sapiens
  misc_feature (21)..(21): n is a, c, g, or t
  misc_feature (36)..(36): n is a, c, g, or t
  misc_feature (236)..(236): n is a, c, g, or t
  misc_feature (259)..(259): n is a, c, g, or t
  misc_feature (265)..(265): n is a, c, g, or t
cagaatgactaaatgaatgantgaatttaaaaattnagttagttatgtggacgtttggcaaatgtacaaaaagaatcagcaaagttttattacaatgcaaatgttatgctagcatttaaattatctatttagcctctaatatgcaacattaaagtcaaactattgtgtacaagaaccttaaagttcatttaatgtgattttaatatcatgttataaattaaattatttgcaatggnaatggagaaatgtcttatatctnagtttngactttgtcagctttccagggctaattttgtgcacagta

SEQ ID NO: 354529 - DNA, 956 bp, Homo Sapiens
  misc_feature (44)..(80): n is a, c, g, or t
tgatagatcctataggggacccggggtaatcgcggtggcggcgnnnnnnnnnnnnnnnnnnnnnnnnnnnnnnnnnnnnnatcaggccaaatcggccgagctcgaattcgtcgagagcggagacgcaagatggcggacagtgcggaactaaagcaaatggttatgagccttagagtttctgaactccaagtactgttgggctacgccgggagaaacaagcacggacgcaaacacgaacttctcacaaaagccctgcatttgctaaaggctggctgtagtcctgctgtgcaaatgaaaattaaggaactctataggcggcggttcccacagaaaatcatgacgcctgcagacttgtccatccccaacgtacattcaagtcctatgccagcaactttgtctccatctaccattccacaactcacttacgatggtcaccctgcatcatcgccattactccctgtttctcttctgggacctaaacatgaactggaactcccacatcttacatcagctcttcacccagtccatccggatataaaacttcaaaaattaccattttatgatttactggatgaactgataaaacccaccagtctagcatcagacaacagtcagcgctttcgagaaacctgttttgcatttgccttgacaccacaacaagtgcagcaaatcagtagttccatggatatttctgggaccaaatgtgacttcacagtacaggtccagttaaggtttggttatcagaaaccagttgtccacaagaagatcacttcccacccaatctttgtgtgaaagtgaatacaaaaccttgcagccttccaggttaccttccacctacaaaaaatggcgtggaaccaaaggcgacccaagcgacaattaatatcacctcaattgtccgactgtccacaacagtaccaaacacgaatgtgttcttggactgccgaaatggggcgaac

SEQ ID NO: 354530 - DNA, 370 bp, Homo Sapiens
  misc_feature (79)..(79): n is a, c, g, or t
acaagggggagaatcgatacggaggaagagtcacctcctaccttggagggcaaacccagagagagcaatgttcctatgncccaggagagaaaacagtttttagaaataggtgtggtcagaattcaaatgggtaaaaactgaatacgggccatttggaattgactggtcatttatgagcttccatagacagagcctttgggagggggctgtgtaaaactcaaatcgttggaggaatgaagagctgcagtgtaaagttgctggattttcttcttttgaatagtacctgggacaacttttcattggtatacaagtttatgatgtagaatggtgactccatggaaggacccatttgaacacccagaaatcttag

SEQ ID NO: 354531 - DNA, 688 bp, Homo Sapiens
  misc_feature (28)..(28): n is a, c, g, or t
  misc_feature (32)..(32): n is a, c, g, or t
  misc_feature (67)..(67): n is a, c, g, or t
  misc_feature (117)..(117): n is a, c, g, or t
  misc_feature (159)..(159): n is a, c, g, or t
aaaatggaaaaggaggccccttgtgacnatcntagagccctttttggaaccttttgcttgccacagnaccaagtaaatctgcctccccatttttcttaagtaaattgtgtgagaagnacaaaaagccagtcttgtaaatcatccttatgaattattatnaaatccacaagagtctccaaaaacatactgaaaactctcttgctatgagggtcagcaaacatccgagtgaagatctcacacaaccttttcagttcaactcgactcagtgttctttggctcttcagtaagttctgcaggcccagaagcccttctttcctttctgaccagtttgaactagcacagtggttgagaacttctgctacatcctcagtctgccgcagataatggggaatgccaccattcctggagccatatgagcgctcagagcaaacacttgaggcatcactgttggcatcatcgtcagaatacatcccatacggctcatatctcctcctcacaggcttcttctgacaggtccaatgagggatgggagtgattgaggaagaaatagaaaggtgaaatgactgtgagtcacaccaaacaaaatctacaacaaagagttaagtgtaaaaagacacatgcacacacacacttttcctgtgcttatagattagggaaataaaaacagaaaagcagttttccattaggt

SEQ ID NO: 354532 - DNA, 450 bp, Homo Sapiens
  misc_feature (26)..(26): n is a, c, g, or t
tttaggcaggagttagaacagttcancttgggccatgttaagtttcaaatgaaacatctgagaaaagatactgacataattcctatagatgaagtctggagttcaaagcgagtatctggtttggatatatacattgggcattgccaacatccataaatggtgttcaagccatgagattggcttgagatcaccacgagggtaagatgtgacggaaatgctcaaggcttgagagctttctaatgtgttccaccatgaagaaactggggagatgtggaagaacctccaaacgagactgagaaggagaggccagtaaagtagaaggagtgctgggcagggatgttctggaagccaggtgagaaaatgtctcaaggaggtagtgatcacctgcgtcacgtgatactagtgggtcaagtaagttgagggccaagacttagccactggatttagcga

SEQ ID NO: 354533 - DNA, 715 bp, Homo Sapiens
cgtcgggttcgcatcagtctattggcagctgcgcatcccactccttatctactcaggtacgggttttactcccctgtcatgtgtagacctgtatggatgcctggatgtggcaaaacttctcttgcaacgccgtgccgccgcaaatcctgcagggtaagaacggccttaccccgctccatgttgctgctcattatgacaaccagaaggtggcgctgctgttactggagaagggtgcttcccctcatgccactgccaagaatggctatactccgttacatattgctgccaagaagaatcaaatgcagatagcttccacactcctgaactatggagcagagacaaacattgtgacaaagcaaggagtaactccactccatctggcctcgcaggaggggcacacagatatggttaccttgcttctggataagggagccaatatccacatgtcaactaagagtggactcacatccttacaccttgcagcccaggaagataaagtgaatgttgctgatattctcaccaagcatggagctgatcaggatgctcatacaaagcttggttacacacctttaattgtggcctgtcactatggaaatgtgaaaatggtcaactttcttctgaagcagggagcaaatgttaacgcaaaaaccaagaacggctacacgcctttgcaccagcgctcagcagggtcacacgcacatccgtacagaccgcg

SEQ ID NO: 354534 - DNA, 444 bp, Homo Sapiens
  misc_feature (342)..(361): n is a, c, g, or t
  misc_feature (395)..(395): n is a, c, g, or t
  misc_feature (403)..(403): n is a, c, g, or t
ggctgattgacgacatctacatttcagtgctttttccctaagctgtttgaaagttacgcttttctgttgttctagagccacagcagtctaatattgaaatataatatgatttgtcaggtcttataatttcagatgttgttttttaagggaaattgaccatttcactagaggagttgtgctggtttttaaatgtgcatcaagaaagactactgaaaagtattattttgtaactaagattgctggtactattaggaaaaatctgtgtgtattgtatagctctagctgtttgactatctgtaatgaaaatgctgcacttcaactgggtatttcattaggagaacnnnnnnnnnnnnnnnnnnnnggtgcctttgagcaactttatttatgggttaccntatttttnaaaaaggattttttgtccagggatgactttaacaggggact

SEQ ID NO: 354535 - DNA, 975 bp, Homo Sapiens
  misc_feature (20)..(20): n is a, c, g, or t
  misc_feature (43)..(43): n is a, c, g, or t
  misc_feature (59)..(59): n is a, c, g, or t
  misc_feature (842)..(864): n is a, c, g, or t
  misc_feature (916)..(916): n is a, c, g, or t
  misc_feature (931)..(931): n is a, c, g, or t
  misc_feature (943)..(943): n is a, c, g, or t
  misc_feature (952)..(952): n is a, c, g, or t
  misc_feature (957)..(957): n is a, c, g, or t
ccccaaaaaacggctcctgnggccctgcctaagaaaagattancgcgtccacgaaaaancccccacagaaccccagacttttaacccaacctactagcttctgcatcagtatcacaatgcccgagctctgaattttaaatgtgccacatattgtcatattcatatagtgacttagagttttcaaagcactaggtacatggtcctcaaaaatggttggctttatatgacccaaactaaggacatttcacaggtttcaatgttaacgcgtattgtgagggtttgtgcataattatcttcacaccagtaaaggtattcactacaatacataaattcattacacaaaccaagaataagcttctaacttatattgacagatatgtcacacacgtaatttgtccatattgcactattccataaatacttactatttctatcaataatgctactggaatggaataatattacatagaaaaacgtaggaaaacccagatataacaagcctcctaaagggcctaaatttcagttataaaatgggtcagaggctgagaaatcactatttatccacaagaattgccttataaatcaaaagatgactgcaggtttctcttacatatccaaatctaggaataagttcattccatagcagatttgaaaaaacacaaatataatgtaggaagtaatatcattcatggcaaaccaacagcatgaaatttggtaggcttatttaggatgaaaaggaataatctagattgttttaataccctataagagtccatgttaagtcaccctgacaaaaaatctttttaaaaatatggtaaccataaataaagttgctcaaaggnnnnnnnnnnnnnnnnnnnnnnnggttctctaatggaaataccagttggaaggtgcagcattttcattacaggtngtcaaacagctaggngcttttacaatnacacacagnttttntccctaataggtacccgg

SEQ ID NO: 354536 - DNA, 526 bp, Homo Sapiens
tgggctcaagggaagcaactccgggagagatggagaatagcatcacccctggctgcccagtgattggggtggtaaatgataactctgagcagctgaagtgtgagtccccactcctggtgtctctagcccacccagcccccattattgagcattcacccaccaccattccgccaatcactatggtgttcacccaggaacatttgaatgcaagctgtcacatcagagaccatgataaggagttggagaaattgagttctaccgaggaggctgtgctcaaccaagccccccagcagaaaaaggcagtgcgcagggccctgtctgaatgttctcacctctcagttcccccagctgtcaaccttggcagataagtaccctgaaacttccctgcccgagaagagccttcttctggcctgctgcctccccctagtagcccaatgcctagtcctacacctgggaaactgggagctcctgctatgaagcgctccatgactgtgggtgaggaacagacagctagctacaaattgag

SEQ ID NO: 354537 - DNA, 1094 bp, Homo Sapiens
ggaccggtccggaattcccgggatgacagacacagctgagatcctctcaagactcggcggggtggagctcctccaagacacattaggacacgtcatgccttctgtacagctgccaccaaatatcaaccttgtgcccaaggtccctgtcccactaaatactaccaaatacaactctgccctggatacaaatgccacgatgatcaactctttcaacaagtttccttacccgacccaggctgagttgtcctggctgacagctgcctccaaacacccagaggagcacatcagaatctggtttgccacccagcgcttaaagcatggcatcagctggtccccagaagaggtggaggaggcccggaagaagatgttcaacggcaccatccagtcagtacccccgaccatcactgtgctgcccgcccagttggcccccacaaaggtgacgcagcccatcctccagacggctctaccgtgccagatcctcggccagactagcctggtgctgactcaggtgaccagcgggtcaacaaccgtctcttgctcccccatcacacttgccgtggcaggagtcactaaccatggccagaagagacccttggtgactccccaagctgcccccgaacccaagcgtccacacatcgctcaggtgccagagcccccacccaaggtggccaaccccccgctcacaccagccagtgaccgcaagaagacaaaggagcagatagcacatctcaaggccagctttctccagagccagttccctgacgatgccgaggtttacccggctcatccgagtgactggcctttgccagagcgagatcaagaaagtggttcagtgaccacccgatatcggtgtcaaaggggcatcgtcccacatcaccagcgaaatccccttgccaaaagaccagtttgggccatcgcgggccttcccgaaacgggtcgcacgtaatcattgcgtaccccaaactttgcccccccgaaaaatttaaaagggaaaacccgggggtcagggtttaaaaatcttggaaaaacagctttttttaaaaaattctttttccctccccaaaccaaaaattgggatcgggttaaaggggggg

SEQ ID NO: 354538 - DNA, 1040 bp, Homo Sapiens
  misc_feature (932)..(932): n is a, c, g, or t
caagcaggttcctaaagcccagaaaggtggaagaagatgagctcttggaaaaatcaccactgcagctagggaatgagcctttgcaacgcttgctcagtgacaatggcatcaacagactatccctcatggcccctgacaccccggccggtaccccacttagtggtgtgggtcgccgcacatcagtcctcttcaagaaggccaagaatggggttaagctacagagaagcccagacagggtcctggagaatggcgaggaccatggtgtggcaggctctcctgcctctccagccagcatcgaggaagagcgccactcccggaagcggccaaggagcaggagctgtagtgagagcgaaggggagaggtccccccagcaggaggaagagacaggcatgaccaacggctttggaaaacacaccgaaagcgggtctgactctgaatgtagtttgggtctcagtggtggactggcatttgaagcttgcagtggtctgacgccccccaaacgcagccgtgggaagccagccctgtctcgagtgcccttcctggaaggtgtgaacggagactctgactacaatggctcaggcagaagcctcctgctgccctttgaagaccgcggagacctggagcccttggagctggtgtgggccaagtgccgagcctaccccctcctaccctgccttgatcatcgatcccaagatgccccgggagggcctcctgcacaatggcgttcccatccctgtccccccgctggacgtgctgaagctgggagagcagaaacaggcagaggctggagagaagctcttccttgtcctcttctttgacaacaagcgcacctggcaatggcttccaagggacaaagtcctgcccttgggtggggaagacaccgtggacaagctcaagatgctggaaggccgcaagaccagcatccgcaagtnagtgcaggtggcctatgaccgtgcgatgatccacctgagcagagtccgggggccccactccttcgtcacttccagctacctgtaagggcaagggctggcctgcatccg

SEQ ID NO: 354539 - DNA, 383 bp, Homo Sapiens
  misc_feature (282)..(282): n is a, c, g, or t
  misc_feature (319)..(319): n is a, c, g, or t
  misc_feature (353)..(353): n is a, c, g, or t
aagaggaggtgtctgctattattatccagagggcttacagacgctacctcttgaagcaaaaagttaaaaaggtatcaagtatatacaagaaagacaaaggcaaagaatgtgatggaacacccatcaaagaagatactctcattgataaactgaatgagaattcaactccagagaaaaccgatatgacgccttccaccacgtctccaccctcgtatgatagtgtgaccaaaccagaaaaagaaaaatttgaaaaagacaaatcaggaaaggacgacaaagggnaagatatcagggaaagtaaaaagtaaagagaaaccangacttttccattttgtgatcaatttgtttacagnccgtgatggtgatgtgtttgtgtcaacagg

SEQ ID NO: 354540 - DNA, 206 bp, Homo Sapiens
  misc_feature (138)..(138): n is a, c, g, or t
  misc_feature (178)..(178): n is a, c, g, or t
aaggataatggcagaaaggaaatacagaaagtttgtattaaaatatggctaatacaaatatgagatatgctgcatttaaatgtactgtaggttaaatttgcaaacctattctgtagagtaagcatgtagcagtttgtnttgctttccattagtctgtgcctggggttacatgtataangcagcagttcccccagactagtgattct

SEQ ID NO: 354541 - DNA, 280 bp, Homo Sapiens
ccaatctttcattaatgacacaaagtagaatgcacaaagtagtatgcagtatggctgggggacagtcaaggaccatctagacttttaattgttagaagcaccacaggtccaaatgctccccagagtggaccaaaactggattttgtccatggcaacactgttctccactattctgtctataatgagaatatatcaatagcaggaaatctactttcacacatggcaaaccgcgaagaaaaacaaggataacctcagaccacttttacttgctgtaagtggg

SEQ ID NO: 354542 - DNA, 809 bp, Homo Sapiens
  misc_feature (8)..(8): n is a, c, g, or t
  misc_feature (22)..(22): n is a, c, g, or t
  misc_feature (30)..(30): n is a, c, g, or t
  misc_feature (34)..(34): n is a, c, g, or t
  misc_feature (40)..(40): n is a, c, g, or t
  misc_feature (55)..(55): n is a, c, g, or t
  misc_feature (78)..(79): n is a, c, g, or t
  misc_feature (83)..(83): n is a, c, g, or t
  misc_feature (105)..(105): n is a, c, g, or t
  misc_feature (133)..(133): n is a, c, g, or t
  misc_feature (135)..(135): n is a, c, g, or t
  misc_feature (162)..(162): n is a, c, g, or t
  misc_feature (182)..(182): n is a, c, g, or t
  misc_feature (804)..(804): n is a, c, g, or t
agaaattnaaacagaagcatgnattaaggngtantttcanatgtagtgaaaagcngtaatgtccattcaaagtaatgnnggcncaccgcattactctcctaaaangattcacacgctaggggtggggcgattntntttcttagtgggaacaaattaagatgntttcccttacagaaattgcnataattacaagtaattatcttgtactctctaaatttaccactatagcacattctgcaaatatcattcccttcaaagactttatttggaaatacaggagagattgttgctctgtgaattgtgctacagatctcaaactgattgtttaacagtactacataatatatgtagtaaagacatggcattctgaagttggaagagcttggaattccaaatacaggagagtcccttcatcaggtaactaatattacccaaaggagtgcaaacaaaatgagaatggcaaacattcaaagataaactagtcaaatgtgggcttatgcatgaaacaatgagcagaatcattctgatatgcatggggcaatcatggaaaacatgtaaacagctgctgtagtatttataaaaatccttgcagagccgaaataaaatcccatcatttgcagcctactcagtttttcattttcctttaataagaaaatgggagaaaaaccagttactcattgggcattaagaggagaataagcatgtaaaaacctaatttcaccatctttgaggccaatcaccgtctggatttcagctggcatttgaagtctattctccagccaaactgagattccttaccattgnaatag

SEQ ID NO: 354543 - DNA, 1454 bp, Homo Sapiens
  misc_feature (1)..(1): n is a, c, g, or t
  misc_feature (129)..(129): n is a, c, g, or t
  misc_feature (132)..(132): n is a, c, g, or t
  misc_feature (156)..(156): n is a, c, g, or t
  misc_feature (176)..(176): n is a, c, g, or t
natgaaccaccacgcccagctcagagaccaaaattaaagaatctcaagtaattaactactgtaggccaggtttacaatatagtaccagagtctcagggtatgggaaggaattcatcatacaagatcctngtnacctataaccaggcctcacaaaanccatcttttcaaaattgaancatcactataaaaagaaaattggtgtcagtgagtcccaggaatacacataatagtttctttaaaggcagggctaattggtgacacatctctcttggaaagacacatgtaccacaaacaaaaacaggatccaaccacttgtatctagatagttatctttctaggcagaaaatctaacattcagtaactaaaccaaatcccagagcctcagcagccaaaatggccctagctgacatttcatccagcctcattttatagaggagaaagtagaggcccatatcttgtccatagttgtacacctgggatccaggccagaattcttatagctacacgggcctgggatccagcattttaggttgagtaaaatcatttcctgctaggtccctgattctattgagaaccagggctaaggctttatggatttgggaaaacttaagtttctattgcaaacttcaaccagtgggtcccagaggtgctttgaagtctccggcttccacatttgaccacaaagtgctgcttatgtcctgatgcttacatgattcagttaaggtgctttccaaacccggtgacaacagctggggccttcatctccagtaagtttcctgatgagcagcagaggtctatacttagggttcctgtgaaaaacacaaactcccagtctcacatttggtcacactgaaggtttggccaaattatttcatacaagtagttctcactggccaaacaggtggtttttctcctggaaaagtgggatcaaagtgactttggtcctgattgttcttgcttccaagatgtgtaagaaccagatcaccaccccccaaccaaaaagcaaaacaaaatagatatagcctccagattaatagttgcagactgggattccaaatgtttaagaatcagtggggacattttccatgtcttccatggagtaattaaagtaaccaaaggcttaccccaaaatgggctcatgctcatatctcaggctgttcctccatcctgcagtttaattacaaggagcaagactgaatccatggacccttaaattctccttgtgcctctccaaagaaaagaaggaaaagaattaaagatggtgaccctgggggacgggctagtagcaggagtacagctgtgacttcacagctcgcaaggagtcgtcacactgtgcatctgaggtcaggccctcgggcagcagcgtctggcccaggatgctgtcacaggcaggaacaggttggcagaactctttcctcgtgccgaattcgacacccaggcctcgtacctagccg

SEQ ID NO: 354544 - DNA, 978 bp, Homo Sapiens
  misc_feature (227)..(323): n is a, c, g, or t
caccatctggtagtgtgcaagactctgggacggcatgagaaaggcagaaagggagcaaaggagctggtggggtgtcacagggcctatgtatgaggcagatgtgagttctgcatccagtttgcaatttatccatttacctgcctgagacttggaaacacctactttatagtcctgattcaagtgttggcggatggaagggaggagactcctgaccctcagaatggctnnnnnnnnnnnnnnnnnnnnnnnnnnnnnnnnnnnnnnnnnnnnnnnnnnnnnnnnnnnnnnnnnnnnnnnnnnnnnnnnnnnnnnnnnnnnnnnnngatcaatggcttttcaaaagcagcacaccaaactgtcaaagtggtgatccctcttcatttgacatgctcacaaagaggagaataagacaagaaagcaagctaacccagaaacagtgaggtgacagtgcgcctcaaacacaggaaaataaaatgcataactatactgattggatgctgctcaaaatcagcctacatgccatctttggtacgtgtgaacaaagttaccaattcctattctaactatgatatactcaaaactgtacaatcagtaatgggatgctctaaagacaaaagaactgcaaaccctttttaaaaacattattttcagtaacagtgttactttttggtattaacgattgtaagaataccttgtggataactgtggaacaaaccaaatgaatacttatgtgaatgtgatattctcaaattatcatccctggtattccagagtaacaagattcttggtgggtgacacgaaggcgatacaaataagatagaagttaaataaaaaccttgtagtcttcaatttaaataaaactatacgtattaaactttaatttactacaattatgattgttacatcttttaacatagacacacaaggcctagaaaccatgatcatgcacagccaataggatctctagaactaaatact

SEQ ID NO: 354545 - DNA, 442 bp, Homo Sapiens
  misc_feature (251)..(308): n is a, c, g, or t
cccccacgaaaggaccataggtttacttcgtccatgtatttcaaccaggtattttattggtctggcaactgcaaaatatacaaatttctgaaaggcatctcctgtttgaaagctagcatagctttatatcccaggtcattaattcagacaaatacacagaacacagagaagtcataagtcacacataggaggctcccaaaccaattaacaatgaaacccaatctctacagctttctattgtttaggctccnnnnnnnnnnnnnnnnnnnnnnnnnnnnnnnnnnnnnnnnnnnnnnnnnnnnnnnnnnttcaagtattacaaagaaaaatatcattggtgtggttccaaacagtttttcttctctctcaaaatgaagagctttgcccgtggtctcaggacagaataaggaggggggaaactcacccaaaaacaaataggcaa

SEQ ID NO: 354546 - DNA, 813 bp, Homo Sapiens
  misc_feature (146)..(152): n is a, c, g, or t
  misc_feature (155)..(155): n is a, c, g, or t
  misc_feature (158)..(160): n is a, c, g, or t
  misc_feature (163)..(163): n is a, c, g, or t
  misc_feature (165)..(167): n is a, c, g, or t
  misc_feature (171)..(173): n is a, c, g, or t
  misc_feature (178)..(179): n is a, c, g, or t
  misc_feature (181)..(232): n is a, c, g, or t
  misc_feature (234)..(234): n is a, c, g, or t
  misc_feature (731)..(749): n is a, c, g, or t
ggggagaattccaaccctttatttctttccccggggtttcctttgggaacaaggttttgcccactgttccctttccctttgggggccgcgcccccaaaagaaatgtttagaaaagttttttaggggccgagggcggccgccaaggnnnnnnnttnttnnnttntnnntttnnncaatnntnnnnnnnnnnnnnnnnnnnnnnnnnnnnnnnnnnnnnnnnnnnnnnnnnnnngnatttcaaccaggtattttattggtctggcaactgcaaaatatacaaatttctgaaaggcatctcctgtttgaaagctagcatagctttatatcccaggtcattaattcagacaaatacacagaacacagagaagtcataagtcacacataggaggctcccaaaccaattaacaatgaaacccaatctctacagctttctattgtttaggctccttatacatattaaataaataaatagcacatctgctatcaaaataataaaaaaataaatttcaagtattacaaagaaaaatatcattggtgtggttccaaacagtttttcttctctctcaaaatgaagagctttgcccgtggtctcaggacagaataaggaggggggaaactcacccaaaaacaaataggcaaagttaaaaatattggtccccgttattttgtggggtggagagttggaggaatcagtagacgccaaaagttcatgactgtagctcaaacccaannnnnnnnnnnnnnnnnnntccaatgtcccctcaaaaggcaggtcactggcttgcaaagtaggcagtgttctcctttctatcc

SEQ ID NO: 354547 - DNA, 1079 bp, Homo Sapiens
  misc_feature (350)..(367): n is a, c, g, or t
  misc_feature (867)..(874): n is a, c, g, or t
  misc_feature (877)..(878): n is a, c, g, or t
  misc_feature (885)..(885): n is a, c, g, or t
  misc_feature (943)..(943): n is a, c, g, or t
ttaacctgggttggtatttttttcgatttgaacatggaagggcctggttgcttttgcttcttgagaaatagtttctcgtgtcccccttgccaggcttcattctttgaacatcaactctgaagtttgatacagatagggggcttgatagctgtggtcccctctcccctctgactacctaaaatcaatacctaaatacagaagccttggtctaacacgggacttttagtttgcgaagggcctagatagggagagaggtaacatgaatctggacagggagggagatactatagaaaggagaacactgcctactttgcaagccagtgacctgccttttgaggggacattggacnnnnnnnnnnnnnnnnnnttgggtttgagctacagtcatgaacttttggcgtctactgattcctccaactctccaccccacaaaataacggggaccaatatttttaactttgcctatttgtttttgggtgagtttcccccctccttattctgtcctgagaccacgggcaaagctcttcattttgagagagaagaaaaactgtttggaaccacaccaatgatatttttctttgtaatacttgaaatttatttttttattattttgatagcagatgtgctatttatttatttaatatgtataaggagcctaaacaatagaaagctgtagagattgggtttcattgttaattggtttgggagcctcctatgtgtgacttatgacttctctgtgttctgtgtatttgtctgaattaatgacctgggatataaagctatgctagctttcaaacaggagatgcctttcagaaatttgtatattttgcagttgccagaccaataaaatacctggttgaaataccnnnnnnnnganngggaagnaaacgaaccgcaaaacaacccggcggggggaaaaaaacacacgggacgagaaaaaaanctttggtggccggccccggccccccaaaagctttctaaaaccttcgtttggggccggggcccccgggggaaagggaaacgggggcttagctgtttcccaggaaaacctgggcctgaccagggcttggattcccccc

SEQ ID NO: 354548 - DNA, 962 bp, Homo Sapiens
  misc_feature (610)..(791): n is a, c, g, or t
ttctaagctcaaagaacccacaaaagcaggatatgcaaatcatgggtgcaacctggcagcgtggagtgtcatagaaacacattttcttggggacgcagggaatgggtccacgggccatgctcacagctgccactgtcagtggcaaaggaaggtacgtgtgtcacccttattccacccagacattacgaacactccccaagaaggacctttctcaagggagtcagcattcgggcttcatgactatgtttcctgccatctgttttcaaagcttgtctttttttggagggagaggaaggtagactttgagactggtctcctgagagcggcagtcaggagctgcgctgtaatcccacgccccgggtgttggccctccgtggggaccttgcctcctcagagtcccgagattgcagattctcatcatgctgagaaagttatcttttagcttcttggtcctagagtctttagtagcacctgccacttgcagacccaatgcaggattgatagaaagggacattaatcattcatgcttgacttttgcctctctcactgaagtgttagaaccttttaaaatggcttcctttattaatcagccaattgtgttctctctctnnnnnnnnnnnnnnnnnnnnnnnnnnnnnnnnnnnnnnnnnnnnnnnnnnnnnnnnnnnnnnnnnnnnnnnnnnnnnnnnnnnnnnnnnnnnnnnnnnnnnnnnnnnnnnnnnnnnnnnnnnnnnnnnnnnnnnnnnnnnnnnnnnnnnnnnnnnnnnnnnnnnnnnnnnnnnnnnnnnnnnacacacacacaggcatgacagtctcctaaaattaattcactcagttcttagttcttaaatccacgtgaaaacacaagaattttaacaactatgtcataggtcttcgcctggtgatggctcctttctgaaactggcaacccaagaagttaactgaaaatgcatccagattgc

SEQ ID NO: 354549 - DNA, 1489 bp, Homo Sapiens
tgctgctgctcaagcactttgaagttgaaccatgtctaccagtttgaatacatggcccagcacctggtgtttgccaactgcattcctttgatcctaaagttcttcaatcaaaacatcatgtcctacatcactgccaagaacagcatttctgtcctggattaccctcactgcgtggtgcatgagctgccagagctgacggcggagagtttggaagcaggtgacagtaaccaattttgctggaggaacctcttttcttgtatcaatctgcttcggatcttgaacaagctgacaaagtggaagcattcaaggacaatgatgctggtggtgttcaagtcagcccccatcttgaagcgggccctaaaggtgaaacaagccatgatgcagctctatgtgctgaagctgctcaaggtacagaccaaatacttggggcggcagtggcgaaagagcaacatgaagaccatgtctgccatctaccagaaggtgcggcatcggctgaacgacgactgggcatacggcaatgatcttgatgcccggccttgggacttccaggcagaggagtgtgcccttcgtgccaacattgaacgcttcaacgcccggcgctatgaccgggcccacagcaaccctgacttcctgccagtggacaactgcctgcagagtgtcctgggccaacgggtggacctccctgaggactttcagatgaactatgacctctggttagaaagggaggtcttctccaagcccatttcctgggaagagctgctgcagtgaggctgttggttaggggactgaaatggagagaaaagatgatctgaaggtacctgtgggactgtcctagttcattgctgcagtgctcccatcccccaccaggtggcagcacagccccactgtgtcttccgcagtctgtcctgggcttgggtgagcccagcttgacctccccttggttcccagggtcctgctccgaagcagtcatctctgcctgagatccattcttcctttacttcccccaccctcctctcttggatatggttggttttggctcatttcacaatcagcccaaggctgggaaagctggaatgggatgggaacccctccgccgtgcatctgaatttcaggggtcatgctgatgcctctcgagacatacaaatccttgctttgtcagcttgcaaaggaggagagtttaggattagggccagggccagaaagtcggtatcttggttgtgctctggggtgggggtggggtgtttctgatgttattccagcctcctgctacattatatccagaagtaattgcggaggctccttcagctgcctcagcactttgattttggacagggacaaggtaggaagagaagcttcccttaaccagaggggccatttttccttttggctttcgagggcctgtaaatatctatatataattctgtgtgtattctgtgtcatgttggggtttttaatgtgattgtgtattctgtttacattaaaaagaagc

SEQ ID NO: 354550 - DNA, 878 bp, Homo Sapiens
  misc_feature (44)..(80): n is a, c, g, or t
agggtattagtctatgggcacctggatttcccgcggggcggcgnnnnnnnnnnnnnnnnnnnnnnnnnnnnnnnnnnnnnatcaggccaaatcggccgagctcgaattcgtcgagagcgggcggacacccgccggtggaagaagaaacagctccgccgtccttcgcttcttttgctgggctgctgctccttcggcatcatggcgccgtcgctgtggaaggggctggtgggcatcggtctctttgccctagcccacgccgccttttccgctgcgcagcatcgttcttatatgcgattaacagaaaaagaagatgaatcactgccaatagatatagttcttcagacacttctggcctttgcagttacctgttacggtatagttcatattgcaggagagtttaaagacatggatgccacttcagaactgaaaaataagacatttgatacgttaaggaatcacccatccttttatgtatttaatcatcgtggtcgagtacttttccggccttcggatacagcaaattcttcaaaccaagatgcattgtcctctaacacatcattgaagttacgaaaactcgaatcactgcgtcgttaagatttttacaaattataataataggacaggacacagagctggaatattggagttcggggtataaaacactcctccctgcccccattagtatttatattgatctttcagacctactttagtaaaaaaaaccatggcccttgtttatatactgataatccaatcttaatggcaggtaagtcattgtgacacgcgtctgggattcatataggaatacaacagagacaataaacaaatcacaatcatggaaaacacagttgcaaacattctgacaattggggaacggg

SEQ ID NO: 354551 - DNA, 578 bp, Homo Sapiens
  misc_feature (53)..(53): n is a, c, g, or t
  misc_feature (95)..(95): n is a, c, g, or t
  misc_feature (137)..(137): n is a, c, g, or t
ctataaatatccaccattatgtattgggaagtcgcctggttgtttagcttatncttaacagaattggatgtggactgtaccgtcctttacaaatnattctaatcaagtatataatgtgttcagtactaactcttttnaacttctcactgtcaaacgtaccccacatgaggcatggagagttcctctcactaccaaaactaataaaacaaaaggactgccggactgtccaaagaaacctacaaaatgggccttttatagtgacttcaaattttatgggataattgtaatgctcccaaggctgttgtactccaaactctagccatgggtattgttattgattgggctccaaaaggacattattggcaagattgctccagcaaaaataccttatgctcggagtttatttattccttagattatatagagcatgggtggcagtcttacacgatgagacaacgggtgtctccttacccatttaaagggacggacacaggtattgctcctcctaagacaaaaaattactcacacatatttgaccccaaaccgacgcgaactactggaacttacctacacctatg

SEQ ID NO: 354552 - DNA, 1828 bp, Homo Sapiens
tgtaggccttccggggtaaggcccttgggggatggggtcaacggaaggcctcgagcgaggcaccacggaagggcccgaagtaaggctcacaggaccgcctgtggggataaggtcccgagaatggcctcgagaatggcccggggagggctcagggcgtttccccgcgaaggccgcggggccggccccattcaggccaaggatggccgagtgggctgcgcaagccccgccgggggaggccggacgtgggcgtcagggacagggcctgaggctgtgttgtcctccccctggcaggccccgtgccgtcccgcagggcccggcaggccgggttgaccccacgagaggctccagcgcctgggcggccggcgggcgaccccgcaggcccgcgaatacgcgtggaccttgtggaacgccagggcctccccgggcgcccccgctctctaggtagttgccgggagacccaggccggtcggggaagcccgcggagccgcagccccggccccggaaggtctctctgggccccgggcccgactcccacccctgcgccggcccgcgggcttcgcaggccctgcactgccgaccgggctgcgctcaaggccgccagccgcccgccgccctctttgtccccccgctgcaggaaggccgcggcagagggggcgccctccaagccgtcagccacgcacgcggaggcgctcgggcctcggggcggcgcaccgggagagcacgccggggaggacacgtgggccttcgcgcggattttaaggaaacagagcaacagctacaacaaaatggggagaagaaatgagaactgtgctaacagcctacgtgtgtcaaacatctctcaggagaacttatctcactggaatttggattcagaagtacctgtttctgaaaataaaaacctcccagctggaagggatggagcagcaggtggcaaaattaacaagaactatttggaaattccagtggagcaactgatgctagaacctaatttgtcggtgcatagtcaaaaaagtacacagaatagtaaacaagggatctttcaattatggaattgtcctcttaatgaaggaagtaccatagagaagaggtcaccatagtgacagctaatcaacatgatcctttcatttctcaactcgtcttcagataaagcaaaggacggcataagacagacaatagagacacaatgaagaatcaaagccatgcctccactgatcactctatcagagtgtggttagaagctgcatgcctacttcagatcactacaagagttcctgttgtcctatcaactgctgatgattttaacattaagtttttccaattgtagtcccgcatgacaaataccgcatgactggcatccaaagtttcctgtttgtcgtttttcttggtttcagatcaagacgagtaagtgacgtaccccttccttctggaagactatctcatggctgaaaataattttgaatatatttaggttgtacatcaagactttacctcactccatttgtgatgtttctgggctgcttttagaatacacacgagttcatgcagctgttggatgtgccacaatttttaaagatggcactgtgatgggatttttcaaagtcctccaataatctgtgattgcatcaagcagcatgccttttgcatggtgttacaatggaactcctaaaggtaatataaaatggtggacttacgaataatagcctcctgtgatcggccagattattttctgggaggttgggaattctcctttggaaaactttttcccaatggccacgggggcccaaaaaaagagaccactctgtgaaatttaaaggggggcaccttggaa

SEQ ID NO: 354553 - DNA, 775 bp, Homo Sapiens
gacagttaatcaactggcccatgcccttcacatggacaaagatttgaaagctggctgtcttgtacgtgtgttgtggccaaaagcaaaatgtgccctcttgagagatgacctggtgttagtagacagtccaggcacagatgtcactacagagctggatagctggattgataagttttgcctagatgctgatgtctttgttatggtcgcaaactctgaatcaacactaatgaatacggaaaaacacttttttcacaaggtgaatgagcggctttccaagcctaatattttcattctcaataatcgttgggatgcctctgcatcagagccagaatatatgggaagacgtacgcagacagcacatggaaagatgcctgcatttcttggtggaggagctcaaagttgtaaatgctttagaagcacagaatcgtatcttctttgtttcagcaaaggaagttcttagtgctagaaagcaaaaagcacaggggatgccagaaagtggtgtggcacttgctgaaggatttcatgcaagattacaggaatttcagaattttgaacaaatctttgaggagtgtatcttgcagtcagcagtgaaaacaaagttcgaacagcacactatcagagctaaacagatactagctactgtgaaaaacataatggattcagtaaacctggcagctgaagataaaaggcattattcagtggaagagagggaagaccaaatgatagactggactttattcgaaaccagatgaaccttttaaccactggatgttag

SEQ ID NO: 354554 - DNA, 1504 bp, Homo Sapiens
  misc_feature (1343)..(1378): n is a, c, g, or t
  misc_feature (1388)..(1388): n is a, c, g, or t
  misc_feature (1418)..(1418): n is a, c, g, or t
  misc_feature (1450)..(1450): n is a, c, g, or t
  misc_feature (1466)..(1466): n is a, c, g, or t
gcggccgccctgaacggggagcaggcggccctgctccggagaaagagcgtcaacaccaccgagtgcgtcccggtgcccagctccgagcacgtcgccgagatcgtcggccgccagggttgtaaaattaaagcactgagagccaagacaaacacgtatatcaagactcctgttcgtggtgaagagcccatttttgttgtcactggaaggaaagaagatgttgccatggccaaaagagagatcctctcagctgcagagcacttctccatgattcgtgcatctcgaaacaaaaatgggcctgccctgggaggattatcatgtagtcctaatctgcccggtcaaaccaccgtccaagtcagggtcccttatcgtgtggtaggattagtggttggacccaaaggagcaactattaaaagaattcagcagcagacccacacctacatagtaactccgagcagagataaggaacctgtctttgaagtgacagggatgcctgaaaatgttgaccgagcacgggaagaaatagaaatgcatattgccatgcgtacaggaaactatatagagctcaatgaagagaatgatttccattacaatggtaccgatgtaagctttgaaggtggcactcttggctctgcgtggctctcctccaatcctgttcctcctagccgcgcaagaatgatatccaattatcgaaatgatagttccagttctctaggaaagtggctctacagattcctactttggaagcaataggctggctgactttagtccaacaagcccatttagcacaggaaacttctgggtatggagatacactaccatctgtaggctcagaagacctagcagttgactctcctgcctttgactctttaccaacatctgctcaaactatctggactccatttgaaccagttaacccactctctggctttgggagtgatccttctggtaacatgaagactcagcgcagaggaagtcagccatctactcctcgtctgtctcctacatttcctgagagcatagaacatccacttgctcggagggttaggagcgacccacctagtacaggcaaccatgttggccttccaatatatatccctgctttttctaatggtaccaatagttactcctcttccaatggtggttccacctctagctcacctccagaatcaagacgaaagcacgactgtgtgatttgctttgagaatgaggttattgctgccctagttccatgtggccacaacctcttctgcatggaatgtgccaacaagatctgtgaaaagagaacgccatcatgtccagtttgccagacagctgttactcaggcaatccaaattcactcttannnnnnnnnnnnnnnnnnnnnnnnnnnnnnnnnnnnggactcgtanaggcatgggtataatggtaccccccagtanacttcctaatggattcttatgactggtatcangctttattgggattangctaaagttgttagtaaacttataaaaggctgctatgg

SEQ ID NO: 354555 - DNA, 856 bp, Homo Sapiens
atagtggtgtgagctcctgaggctgccagcagccagcagtgactgcccgccctatctgggacccaggatcgctctgtgagcaacttggagccagagaggagatcaacaaggaggaggagagagccggcccctcagccctgctgcccagcagcagcctgtgctcgccctgcccaacgcagacagccagacccagggcggcccctctggcggctctgctcctcccgaaggatgcttggggagtgaggcgaagctgggccgctcctctcccctacagcagcccccttcctccatccctctgttctcctgagccttcaggagcctgcaccagtcctgcctgtccttctactcagctgttacccactctgggaccagcagtctttctgataactgggagagggcagtaaggaggacttcctggagggggtgactgtccagagcctggaactgtgcccacaccagaagccatcagcagcaaggacaccatgcggcttccgggtgcgatgccagctctggccctcaaaggcgagctgctgttgctgtctctcctgttacttctggaaccacagatctctcagggcctggtcgtcacacccccggggccagagcttgtcctcaatgtctccagcaccttcgttctgacctgctcgggttcagctccggtggtgtgggaacggatgtcccaaggagcccccacaggaacatggcaaggcccaggatggcaccttctccagcggtgctcacactgagccaagctcactgggctagacacgggaggctactttaggagccacaatgactcccgtggactgacaaccgatcaccggcaacagggttacatctatgggcaaaatccacg

SEQ ID NO: 354556 - DNA, 561 bp, Homo Sapiens
  misc_feature (296)..(518): n is a, c, g, or t
ccgcatgttctcacttctaagtgggacgctaaatgatgagaacacatggatacataaagggaaacaacacgtgctggggcctttctgagagtagagggtgggaggagggagaggatcatgaaaaataactaatgggtactaggcttaatacctgggtgatgaaataatctgtataacaaaccaccatgacacaagtttacctatgtaacaaacctgaacttgtacccctgaacttaccatttaaaatttttttaagtttgctgtattacatgagtgcagtttgtggatccccaggnnnnnnnnnnnnnnnnnnnnnnnnnnnnnnnnnnnnnnnnnnnnnnnnnnnnnnnnnnnnnnnnnnnnnnnnnnnnnnnnnnnnnnnnnnnnnnnnnnnnnnnnnnnnnnnnnnnnnnnnnnnnnnnnnnnnnnnnnnnnnnnnnnnnnnnnnnnnnnnnnnnnnnnnnnnnnnnnnnnnnnnnnnnnnnnnnnnnnnnnnnnnnnnnnnnnnnnnnnnnnnnatgactacttgaaagtcggtatcactggatatgaaaccccgct

SEQ ID NO: 354557 - DNA, 1195 bp, Homo Sapiens
ggtccggaattcccgggattgcccatatgctgctgatagaagagaggaagaaaagatgtgtgaccatcttatcagtgctgctaaacatcgagatcatgtaacagcaaatcagctgaaacagaagattctcaatattctcacaaataaacatggtgcttggggagcagtttctcatagccaattgcatgatttctggcgtttggattactgggaagatgatcttcgtcgaaggagacgatttgttcgcaatgcatttggctccactcatgctgaagcattgctgaaagctgcaatagaatatggctacggcaagaagatgtacgtaaagtcaaagaaacacattcagaacgtcaagcaatagtgaaccaaaatgcagagacagaacttatgctggaaggagacgatgatgcagtcagtctgctacaggagaacagaaattgacaaccttgcaggcccagatggttctcagcacccctgcccagctcatcgctcccgtggtggtggccaaggggactctctccatcaccacgacagaaatctacttcgaggtagatgaggatgattctgccttcaagaagatcgacacgaaagttcttgcatacactgagggacttcacggaaaatggatgttcagcgagatacgagctgtattcaccaagacgttaccttctacaaaaacactgcttcggaagtaattactggcaaaccgaacctcagttatgtttaatttccctgatcaagcaacagtaaacaaaagtagtctatacgcttgcctcgggtcggagtagggaccagctatggtctgccacaagccaggagggatatccatggccacatccatcgaagcagcttttattaaaatcttcccaataatgactcaagcgctggccaacagaagggaaataccaaacttcggaatattcgcatggttccatataataactaatagcaggacgggacacttatcactggaatctggacaacaaataataccaggagaacacaccggagcggctgatagaagcccaaccgtagggaacgccaagaaaggaagatcggaacgtgcacatccttatccagggcaaacacgcaaagcggaatcaccaaacaaacacccacaacacaggcggccgtctgacagaccccaagaagaacgcaccgcgggtgcaagagacaagaacacgatcacgggcac

SEQ ID NO: 354558 - DNA, 864 bp, Homo Sapiens
  misc_feature (769)..(795): n is a, c, g, or t
ttgatgaactcttcatagcaggagtagatggcagccaggcacacggccaccaggttgggcaggacccgggggtggggccagtgccctgtgggcccgtgcatgctctgaatgaaacttctttcaccactttccatccaccgcgttgagctcgttcaaggcaaggatgtactcctgagtaaacagcctcagtcgcgggcacttcccaaagtccatgttatgcttgaggattcgctgcaccacgggggtgaacacctcgatgaccaccatggaccggggccgctctctgcagtgcttgcaaaagaattcacagagatctggtggtgggtggttgttttccagacaaaggagcgattgccacaatgatgtgattcatagctcctgggctggtcaagtattgatgttctctcgagagcaagtttcgagaacgatttccagtcggggcctggttgatggagtcatcctgcagtgggcggatgtcagggccatgtccaccagggtccggatctcgtttcaagacaacgttcccagcggcttgggcttactcagcactttctgtataatgttgctaaatctttttctgggcaacacttgccatcgctctggcaacagtcagcagaggcaagcacagtacgccagggttatcaggcacagggaaagcagagcctgttgctcctgccacgggagacaagtcgtcacgcaggaatgtgcccctctagccaggagaggagtgactcagaatgcactggaagcacgtcgcgccaggcagggnnnnnnnnnnnnnnnnnnnnnnnnnnncgcagcctctggggctcgcgcgcgtacacccgctctcgacgaattcgagctcggccgatttggcctgat

SEQ ID NO: 354559 - DNA, 364 bp, Homo Sapiens
gagtcattgatgctgagagattgtgaagaatatactgacagcatccttgtagctgcatcacagtaaatcggacttctgaatcaagcagcccagcctagcagctgataagagtgaatgtaggtgagaagcattaccttattcctgtaacaagagaaccgttttgtgataagtgaaactaggaatgtagaagaagaaatatcctatggctattataaaagaagaaggacttgcctgaatgacttggtggtgcaccagaaaataactttcagaagaatgctttctgttaagctgctgcattgttcctggaggaaatgttatttctaatgcatgttatttcttcaaaagataggataacaaagaattg

SEQ ID NO: 354560 - DNA, 2565 bp, Homo Sapiens
  misc_feature (17)..(17): n is a, c, g, or t
  misc_feature (1647)..(1647): n is a, c, g, or t
gtcagagccccgggcgntgtctcacagggcaacagtgtgaaccttaagaattcgaaacaggcgtgtctgccctctggcgggataccttctctgaacaatgggacattctccccaccgaagcagtggtcgaaagaatcaaaggccgaacaagccgaaagcaagagggtgcccctgccagagggctgcccctcaggcgctgcctccgaccttcagagtaagcacctgccaaaaacggccaagccagcctcgcaagaacatgctcggtgttccgccattgggacaggggagtcccctaaggaaagcgctcagctctcaggggcctctccaaaagagagtcctagcagaggccctgccccgccgcaggagaacaaagttgtacagcccctgaaaaagatgtcacagaaaaacagcctgcagggcgtccccccggccactcctcccctgctgtctacagctttccccgtggaagagaggcctgccttggatttcaagagcgagggctcttcccaaagcctggaggaagcgcacctggtcaaggcccagtttatcccggggcagcagcccagtgtcaggctccaccggggccacaggaacatgggcgtcgtgaagaactccagcctgaagcaccgcggcccagccctccaggggctggagaacggcttgcccaccgtcagggagaaaacgcgggccgggagcaagaagtgtcgcttcccagatgacttggatacaaataagaaactcaagaaagcctcctccaaggggaggaagagtgggggcgggcccgaggctggtgttcccggcaggcccgcgggcgggggccacagggcggggagcagggcgcatggccacggacgggaggcggtggtggccaaacctaagcacaagcgaactgactaccggcggtggaagtcctcggccgagatttcctacgaagaggccctgaggagggcccggcgcggtcgccgggagaatgtggggctgtaccccgcgcctgtgcctctgccctacgccagcccctacgcctacgtggctagcgactccgagtactcggccgagtgcgagtccctgttccactccaccgtggtggacaccagtgaggacgagcagagcaattacaccaccaactgcttcggggacagcgagtcgagtgtgagcgagggcgagttcgtgggggagagcacaaccaccagcgactctgaagaaagcgggggcttaatttggtcccagtttgtccagactctgcccattcaaacggtaacggccccagaccttcacaaccaccccgcaaaaacctttgtcaaaattaaggcctcacataacctcaagaagaagatcctccgctttcggtctggctctttgaaactgatgacgacggtttgagtgacatcattggtgtagaaagtttgtgtgtttatttttcttctccctagttgccaaaattaaaaaggtggtgttttcatttttgtataatactttaatggaatgctttttaaaaaaatataaaaccaaggtaaattattgtttcatcttcacgtatggatgctagtgcctttaatggaaggtaaagaatgctttgctagttagaagtacatattgaggttttaatggtggtgatagtgagttttgtggcaccagctgttttttatnttaaactttctgagcatccggcaaggtacaggttttgatgttcaagttttattgggataagatcttttgatcccaaggtcaggtggatggaatttttggatttatatttgttccttgagtcttcagggcagtgtctccatgagggttttcctgttgaggggcaccacatacaatagtgtgaagtaggtatgaggggcagtcattgtattctatagtttttttatgtagtctacatttctcagatgtatccccattcggttttattctcagaactgttactagactcatgacttggaggccaaaccttaaatccagagatagcagcctcgatagggaccttaaaaggattcacaaaaacttttgccacacttggtgcctaggacctgttcctaataacaccttctagggccgtttatccaacatttagatgccttcttttccctccctaatttgtagccagtccaacctttcattccttggaggatttagttttgggataaaattttggtccttgggcacagagacattcactattaatgaagtaacccttgggcatgactccaatcccagaattgctcactgagcgctatgccaccgaagcgttgacctgaacatattagtgcaatccagtccagattggacctttgatcctatgtggaagggctgttttttaagaaaaaatttttggtaaacagtattgtgtaaaattgctttttgtataccaatatatgcatgttttgtgcatgagtagtacttgtgttgatactcctgttgatgttaaattactatataatataaacagtatgtgtttttatatatcattgtgtaaatttaatataacatatgcagtaataaaccatttgttttactgctgttaagtttgttatttgggtataaaaccgagatgtttacacctgt

SEQ ID NO: 354561 - DNA, 210 bp, Homo Sapiens
gttacatagatgttatgttagctcatgatttcaaaggaatatagtgaaattttacatactacgagttttctcttttatatagaacaccacattgaaaaaaagtggcagaatatcggtatgctttttccctatttgaaagtcgaatttaagccaactatgattgagaggagaaagtgaattttaaaaaggaaagcaacagaacggccgggt

SEQ ID NO: 354562 - DNA, 940 bp, Homo Sapiens
  misc_feature (47)..(47): n is a, c, g, or t
  misc_feature (219)..(219): n is a, c, g, or t
  misc_feature (475)..(475): n is a, c, g, or t
  misc_feature (893)..(893): n is a, c, g, or t
ctcggagtggacgtgccactatggggtcgtccaagaagcatcgcggnagagaaggaggcggccgggacgacggcggcggccggcaccgggggtgccaccgagcagccgccgcggcaccgggaacacaaaaaacacaagcaccggagtggcggcagtggcggtagcggtggcgaacgacggaagcggagccgggaacatgggggcaaacgcgggaacagngcggcgcggggccgaagctgaggcccggagcagcacgcacgggcgggagcgcaccaggcagagccctccgagcggcgcgtgaagcgggagaagcgcgatgacggctacgaggccgctgccagctccaaaactaactcaggcgatgcctcctcactcagcatcgaggagactaacaaactccgggcaaagttggggctgaaacccttggaggttaatgccatcaagaaggaggcgggcaccaaggaggagcccgtgnacagctgatgtcatcaaccctatggccttgcgacagcgagaggagctgcgggagaagctggcagctgccaaggagaagcgcctgctgaaccaaaagctggggaagataaagaccctaggagaggatgacccctggctggacgacactgcagcctggatcgagaggagccggcagctgcagaaggagaaggacctggcagagaagagggccaagttactggaggagatggaccaagagtttggtgtcagcactctggtggaggaggagttcgggcagaagcggcaggacctgtacagtgcccgggacctgcagggcctcaccgtggagcatgccattgattccttccgagaaggggagacaatgattcttaccctcaaggacaaaggcgtgctgcaggaggaggaggacgtgctggtgnaacgtgaacctggtggataaggagcgggcagagaaaaatgtggagct

SEQ ID NO: 354563 - DNA, 608 bp, Homo Sapiens
  misc_feature (431)..(432): n is a, c, g, or t
  misc_feature (437)..(437): n is a, c, g, or t
  misc_feature (459)..(460): n is a, c, g, or t
  misc_feature (478)..(479): n is a, c, g, or t
  misc_feature (494)..(494): n is a, c, g, or t
  misc_feature (526)..(527): n is a, c, g, or t
  misc_feature (554)..(554): n is a, c, g, or t
atccttgtacaggacccgatggtaaatagggggctggcagctccctgctccctgttcagaaccaaggggttgttggagaccacagtgcagaaggtggcccgggtgaaggcccccaacaagtcgctgccctcagccgtgtactgcatcgaggataagatggccatcgatgacaagtacagccggagggaggaataccgaggcttcacacaggacttcaaggagaaggacggctacaaacccgacgttaagatcgaatacgtggatgagacgggccggaaactcacacccaaggaggctttccggcagctgtcgcaccgcttccatggcaagggctcaggcaagatgaagacagagcggcggatgaagaagctggacgaggaggcgctcctgaagaagatgagctccagcgacacgccccctgggcaccgtgnngcccntgctccaggagaagcagaaggnnctcagaagaccccctacnnatctgtgctcagcgngcagcggcaagaggcatgaacgcgaacaccanntcaccaaagtgacagcggccctcccgnccccggccctgcctcaaccttcatattaaataaagctccctccttattttttca

SEQ ID NO: 354564 - DNA, 1857 bp, Homo Sapiens
  misc_feature (1090)..(1148): n is a, c, g, or t
  misc_feature (1288)..(1303): n is a, c, g, or t
  misc_feature (1361)..(1369): n is a, c, g, or t
  misc_feature (1439)..(1439): n is a, c, g, or t
  misc_feature (1730)..(1738): n is a, c, g, or t
ctcctcccctcacctaccgcgcgcgccttaatattatcaaacgtcctaagtagcgaggcctgggtggcgaattcggcacgaggggagactcggccatgctacgcgcgctgagccgcctgggcgcggggaccccgtgcaggccccgggcccctctggtgctgccagcgcgcggccgcaagacccgccacgacccgctggccaaatccaagatcgagcgagtgaacatgccgcccgcggtggaccctgcggagttcttcgtgctgatggagcgttaccagcactaccgccagaccgtgcgcgccctcaggatggagttcgtgtccgaggtgcagaggaaggtgcacgaggcccgagccggggttctggcggagcgcaaggccctgaaggacgccgccgagcaccgcgagctgatggcctggaaccaggcggagaaccggcggctgcacgagctgcggatagcgaggctgcggcaggaggagcgggagcaggagcagcggcaggcgttggagcaggcccgcaaggccgaagaggtgcaggcctgggcgcagcgcaaggagcgggaagtgctgcagctgcaggaagaggtgaaaaacttcatcacccgagagaacctggaggcacgggtggaagcagcattggactcccggaagaactacaactgggccatcaccagagaggggctggtggtcaggccacaacgcagggactcctaggggcccagtaaggacagtgcccgccagggaccatgtatgtatcatggcggaagagttggccctgacctggaataaagcagttggtgttgcttatgaggaaggttcagccttatccagcacagccttcacgttttgccctctgctgtcaccacttggtcagaaacttccaaacgcagtgccctgttctgccggtgtgtacagcctcagcgcaccaggagaccctagagtggtttccatctcacagagaatcagaccaggccacagccccctcaggcagccaggtcatctgagtatcattaagagtagtgatgggaagattacagtctgagggccaaacgtgcctgcttcctgtttttgtaaataaagttttgttggannnnnnnnnnnnnnnnnnnnnnnnnnnnnnnnnnnnnnnnnnnnnnnnnnnnnnnnnnnaccatatctttctattaaaatacgacccccacatgccccccataacgccgaccacgcaataaattaatacttttgtgccgggcccgcccccggccattcagaagaagattttttaaacacccccttccccttttgggcannnnnnnnnnnnnnnnttacagggcgaataggagaacccccggggcctatataaagtggtgctttcccaccccnnnnnnnnncctcgtgggacccttaagacataagagggcggtttgtgggccatattttccgccacccaccaacaaaaanacaaaccctccccccgcggcgcgcgccgacaatcgcagagactgttttctcttgtacaccaaaatttcctctatataatgggcccatttttttggggcggccctattttagttgtggccttctttttattctccccccgggagttttttcccacggcgcaccgcccccgaatataacacgaattcacacggcgccccaccacctgtttgctaccccctacttgcgtagacggactcgcgtgtcaacgaatttccatccttagaatccttctccgccgggaagtgtagtggnnnnnnnnntcctaaatacgctcgttgtgtttaaaaccctcacatatctccccccccgggcaatgtacagctccctttgtggggcgccttggcgcaccaaccaatatcccccaccccgggacgcaaaa

SEQ ID NO: 354565 - DNA, 2458 bp, Homo Sapiens
  misc_feature (1650)..(1650): n is a, c, g, or t
  misc_feature (1653)..(1653): n is a, c, g, or t
  misc_feature (1679)..(1680): n is a, c, g, or t
  misc_feature (1684)..(1684): n is a, c, g, or t
  misc_feature (1713)..(1713): n is a, c, g, or t
  misc_feature (1724)..(1724): n is a, c, g, or t
  misc_feature (1726)..(1726): n is a, c, g, or t
  misc_feature (1774)..(1774): n is a, c, g, or t
  misc_feature (1782)..(1782): n is a, c, g, or t
  misc_feature (1836)..(1836): n is a, c, g, or t
  misc_feature (1839)..(1839): n is a, c, g, or t
  misc_feature (1850)..(1850): n is a, c, g, or t
  misc_feature (1871)..(1871): n is a, c, g, or t
tacgcaaacataccggctaacggtacgaggccgggtggctacatcggcacgaggcggggccgaagctgaggcccggagcagcacgcacgggcgggagcgcagccaggcagagccctccgagcggcgcgtgaagcgggagaagcgcgatgacggctacgaggccgctgccagctccaaaactagctcaggcgatgcctcctcactcagcatcgaggagactaacaaactccgggcaaagttggggctgaaacccttggaggttaatgccatcaagaaggaggcgggcaccaaggaggagcccgtgacagctgatgtcatcaaccctatggccttgcgacagcgagaggagctgcgggagaagctggcggctgccaaggagaagcgcctgctgaaccaaaagctggggaagataaagaccctaggagaggatgacccctggctggacgacactgcagcctggatcgagaggagccggcagctgcagaaggagaaggacctggcagagaagagggccaagttactggaggagatggaccaagagtttggtgtcagcactctggtggaggaggagttcgggcagaggcggcaggacctgtacagtgcccgggacctgcagggcctcactgtggagcatgccattgatttccttccgagaaggggagacaatgattcttaccctcaaggacaaaggcgtgctgcaggaggaggaggacgtgctggtgaacgtgaacctggctggataaggagcgggcagagcaaaaatgtggagctgcggaagaagaagcctgactacctgccctatgccgaggacgagagcgtggacgacctgggcgcagcaaaaacctcgctctatcctgtccaagtatgacgaagagcttgaaggggagcggccacattccttccgcttggagcagggcggcacggctgatggcctgcgggagcgggagctggaggagatccgggccaagctgcggctgcaggctcagtccctgagcacagtggggccccggctggcctccgaatacctcacgcctgaggagatggtgacctttaaaaagaccaagcggagggtgaagaaaatccgcaagaaggagaaggaggtagtagtgcgggcagatgacttgctgcctctcggggaccagactcaggatggggactttggttccagactgcggggacggggtcgccgccgagtgtccgaagtggaggaggagaaggagcctgtgcctcagcccctgccgtcggaccacacccgagtggagaacatggacatcagtgatgaggaggaaggtggagctccaccgccggcgtccccgcaggtgctggaggaggacgaggcggagctggagctgcagaagcagcctggagaagggacgccggctgcgacagttacagcagctacagcagctgcgagacagtggcgagaaggtgggtgggagattgtgaagaagctggagtctcgccagccggggctgggaagaggatgaggatcccgagcggaagggggccatcgtgttcaacgccacgtccgagttctgccgcaccttgggggagatcccccacctacgggcctggcttggcaatcgcgaagaacaggaagagctcatgccactttggaacgggatgaggagcgctcagccaacggtggcnccnaatctgacggggaggagaacatcggnnggancacggtgaacctggacgaggagaagcagnagcaggatttntntgcttcatcaaccaccatcctggacgaggaaccgatcgtgaatagggngcttgttnttgccctgctcctgtgtaagaacaaagggctgctggagaccacagtgcagaagnttntccggtttaantcccccaacaagtcgctgccntcagccgtgtactgcatcgaggataagatggccatcgatgacaagtacagccggagggaggaataccgaggcttcacacaggacttcaaggagaaggacggctacaaacccgacgttaagatcgaatacgtggatgagacgggccggaaactcacacccaaggaggctttccggcagctgtcgcaccgcttccatggcaagggctcaggcaagatgaagacagagcggcggatgaagaagctggacgaggaggcgctcctgaagaagatgagctccagcgacacgcccctgggcaccgtggccctgctccaggagaagcagaaggctcagaagaccccctacatcgtgctcagcggcagcggcaagagcatgaacgcgaacaccatcaccaagtgacagcgccctcccgccccggccctgcctcaaccttcatattaaataaagctccctccttattttttcctccctggtcgtggtacagattccagggttggatctttggttgggtgtggcacagagtctggctcctgctaggtgagacctggccgtcaaatgacacaaacaactaaacgatggaagagagagcg

SEQ ID NO: 354566 - DNA, 1047 bp, Homo Sapiens
gggggaaaacataggcaggtcgaggctgggtggcgaattcggcacgagggttgtctgggctcggcggcagccgggctcggagtggacgtgccactatggggtcgtccaagaagcatcgcggagagaaggaggcggccgggacgacggcggcggccggcaccgggggtgccaccgagcagccgccgcggcaccgggaacacaaaaaacacaagcaccggagtggcggcagtggcggtagcggtggcgaacgacggaagcggagccgggaacgtgggggcgagcgcgggagcgggcggcgcggggccgaagctgaggcccggagcagcacgcacgggcgggagcgcagccaggcagagccctccgagcggcgcgtgaagcgggagaagcgcgatgacggctacgaggccgctgccagctccaaaactagctcaggcgatgcctcctcactcagcatcgaggagactaacaaactccgggcaaagttggggctgaaacccttggaggttaatgccatcaagaaggaggcgggcaccaaggaggagcccgtgacagctgatgtcatcaaccctatggccttgcgacagcgagaggagctgcgggagaagctggcggctgccaaggagaagcgcctgctgaaccaaaagctggggaagataaagaccctaggagaggatgacccctggctggacgacactgcagcctggatcgagaggagccggcagctgcagaaggagaagggacctggcagagaagagggccaagttactggaggagatggaccaagagtttggtgtcagcactctggtggaggaggagttcgggcaagaagcgggcaggaacctgtaccagtgccccggaacctgcagggccctcactgggggaacatgcccatttgattcctttccgaagaagggggagaacaatgatttctttaccctccaaggaaaaaggcgttccttccaggaaagaagagaagacttccttgttgaaaccccaaccctggggggaaaagggagacggccaaacaaaaatgggggtagtttcccg

SEQ ID NO: 354567 - DNA, 995 bp, Homo Sapiens
  misc_feature (635)..(687): n is a, c, g, or t
  misc_feature (964)..(964): n is a, c, g, or t
tcccctatcatacatccatgtaactctctcccctcgaagtacctgccatccacataccccatccctcacttacaccccccccttcccgactcttcctcaacagatttcaccccaactcttgtcatctccctccagtaacttccccctcttctatccaggccttctccttctgcacctccagctcctctcgatccagctcagtctcctccaaaccacggtcatcctctcctagggtcttatcttccccagcttttggttcacaggcgcttctccttggcagccgccagcttctcccgcagctcctctcgcttgtcgcaagcaatagggttgatgacatcagctgtcacagggcatcctaccattggtgcccggcctcacttcttgatggcattaacctcccaagggtttcagcacaccaactttgcccggagtttgttagtctcactcagatgctgagtgaggaggcatccgcactgagctagttttggagctggcaagcaggccactagtagcacgtcatcgcagcattctcccgcttcacagcagcccagctcggagggcctctgccccatgggctgccgccatccacagcacacagtgcagtgctgcataccagggcactcaaagcattcggnnnnnnnnnnnnnnnnnnnnnnnnnnnnnnnnnnnnnnnnnnnnnnnnnnnnnttcccaggctcacagcttcacagtcgttccagccacacgcctaccagcacacatgccgcacactcacggtgcttgtgttttttgtgttcccggtgccgcggcggctgctcggtggcacccccggtgcccggccagccgccgtcgtcccggccgcctcattctctccgcgatgcttattggacgaccccatagtggaacgtccactctcgagcccggctgccagcacgagcccagacaaccctcgtgccagaattcggccacccaggcctcgctaccntaacccgggaggggggttttaaacattggca

SEQ ID NO: 354568 - DNA, 751 bp, Homo Sapiens
  misc_feature (472)..(472): n is a, c, g, or t
  misc_feature (572)..(572): n is a, c, g, or t
tgcggatagcgaggctgcggcaggaggagcgggagcaggagcagcggcaggcgttggagcaggcccgcaaggccgaagaggtgcaggcggagctcatggacttttgaacgggaggaggagcgctcagccaaaggtggctcacgaatctgacggggaggagaacatcggctggagcacggtgaacctggacgaggagaagcagcagcaggatttctctgcttcctccaccaccatcctggacgaggaaccgatcgtgaatagggggctggcagctgccctgctcctgatgtcagaacaaagggctgctggagaccacagtgcagaaggtggcccgggtgaaggcccccaacaagtcgctgccctcagccgtgtactgcatcgaggataagatggccatcgatgacaagtacagccggagggaggaataccgaggcttcacacaggacttcaaggaaaagggacggctacaaancccgactgttaagatcgaaatacggtggaatgaagacgggccggaaactcacacccaaaggaggctttccggcagctgtcgcaccgcttccatggcaagnggctcaggcaagatgaagacagagcggcggatgcagaagctggaccgaggaggcgctcctgaagaagatgagctccagcgacaccgccctgggcaccgtggtcgtgctcaagtagaagcagaaggctcagaagaccacaacatcgtgctcagcggcagcgcatagaggcatgacgcgac

SEQ ID NO: 354569 - DNA, 527 bp, Homo Sapiens
aaaagccttatggcctttggatgggatttgaaacatgattaaaatgacagagtaaataaaagccccctagtcaagtgaattcctaatgggggaaataagagggcctatataaaaattgaaccctctgttttggaaaacaaatccttcccccaggaagtggtacccactctggggtcaagagaaattgtaagaacaataaaatgagcacacatgaccttcctttccctataaaaatatgaagcagaaaactcccccatgatttcctcatgttgcttagaatagtgtgtatttcagaacttttccatttaatatttttggaccacagttgactataactgaaactgaggatgggaggaagggatgcttaaaaccttggatagtaccaaaccctatatatattatgtttttttctatatatacacagctatgataaagttcataaattaggcacagtaagagattaaaaatattaaattgggccaattaatatattgtaataaaagctatgttaatgtggtcaaaaaaaa

SEQ ID NO: 354570 - DNA, 392 bp, Homo Sapiens
  misc_feature (343)..(343): n is a, c, g, or t
tttgcaagagtcccagcagtctggttaccccattttcctgcaaagatttaatagtggagtacttgcatgaagcctcgtatttcaaagactttacaagtgtggctgctgtatattttattagcatgcaagggggcactgtcaccaactcacttgtcaaaaataaatgaatagagtgcattggcgatgcatttattcattatctatttgacatgtgactgagcctgcagggctggggaagtgataaaagatctcctggttttcacttcaaagaggtgccttctgcactacaactctgtcaggcgttggttgccccaggtgaatatgattaaggtgagggacccangaaagtgattccattgatggcaccgtgggggaggggagaaggtaggctt

SEQ ID NO: 354571 - DNA, 1603 bp, Homo Sapiens
  misc_feature (1358)..(1358): n is a, c, g, or t
  misc_feature (1389)..(1438): n is a, c, g, or t
  misc_feature (1525)..(1525): n is a, c, g, or t
  misc_feature (1527)..(1527): n is a, c, g, or t
  misc_feature (1533)..(1533): n is a, c, g, or t
agaaacaaagaatcaggctttatttttgttattttgaatacaggtattgtattgtagacatctgttagtctcataattcagtatggccaacacacagaaattaaaagtagaaacaaaatgagggcacacttgctcctgtccttggcttggcccctccaacctccaaaagaactgtcctccccattgtcatatcctttccctgctacgaaagacaaaacaaaatgatgccccaaagaaaagtcccagaggctctctcccagcagtcagtgggatgaagcaagacactgttaccttgggtaggatggagaagccaccaggtccataccacagaggccacagtgggatggagaagccaccaggtccataccacggaggccacgtgtgccaccagtggagccaaaccctggccatggctggcaaaactcaccaccaggcgagaccagagcatattatctaccagtaatccccgaggtccaacgccattcaagtcaggcagccctgagggcaagcaggagggagccctgtccctctgggggtgctggcttccagaggaggccccaagggacagtctcttcagagaggggctcacccgggaaagggggttcctgagaaggcgtgcaaaggtcaagggacccacccttgccacctgtcccagggcttactgctgactccactgtcctgggagtgctggaatctccacaccacttaaaatgaaaaaggaaatcagaaataaggcattagacgtttgattcttttatttccatatgcaatgtaatgtttaggcacgctgcttgggatgctacttctaaaaaaattgttggccatttttcagaatatccttttggttttaaatactggtcaggaaaaacaaatgatgtaaaaatacgtgaataattttctattacagaaatgaaaaactgatttgcatctaaaagtgcaagaggtgaagtaatttaaccctttcaccagacgatatgggcaatatacaatatattgcttgagctgtttgagaaggctgtgatgtatttttgtattgacatagaaaattataaattacattgaattagtatccataatcactatatatatacacaaaccagttctaaaaaaatacactggtttaaatttatgagtgaaaacctcacaaggtacagtaaacaattagcatgcttcggtgccagattttgatttctacttttaaaatactagcctgtaaaatgaacgcactctaattccattagcagcacgagcattttcaactgacttgcctaataggatttattttaggtctgttaaatatgcagattgctctgaaatgttcattggtgatgcttgttaacaaggtaaattttggtgantgggttaaaaggcagatgaactaccaaatgnnnnnnnnnnnnnnnnnnnnnnnnnnnnnnnnnnnnnnnnnnnnnnnnnnccaaaacacaagccatatacactccaaatagtctagtgtttcacttgtaggaataatcatttcaagcaaacaagacttgaacagacntnatggcngtacgataacatcaatttatcaactatgatgtagcaataaatactttacttaatctctaccaatagactt

SEQ ID NO: 354572 - DNA, 355 bp, Homo Sapiens
  misc_feature (159)..(175): n is a, c, g, or t
tactataaaggtccctaggcatggttgcatctatccctttaaggggcttgtagcacttattgaatatgtgaataattgtctttcatcaattctgaaaaattttgagtcattatcttttcaaatattgtttcttctccacttttcacctctctgtctttnnnnnnnnnnnnnnnnntctttttctatattttgtctctgcatgcttcagtattttcagatattttatttgatttatctaatttccactttacaaaatctctctggctatacctaacaagcggttaaattcatccactgagtttttaatttgttattataacttcttagttctagacttttcattagaatgtttcta

SEQ ID NO: 354573 - DNA, 543 bp, Homo Sapiens
  misc_feature (429)..(454): n is a, c, g, or t
aaattggcagatgcctgaggtcatagctgtgtcctgggtcactgtggctggtgaggacctcaaggaccccatcaagtgtacacagcagcagcaaaatcaagggatgaccctcctctggggccccctgtcctcagcacattccaggcagctgtgccctgacccacagggacccgtggggatgggaggaggtccaggcctgtgttgccagagctggcagtgtgagctgtaggcagggacggggagggactgtcgctgtgatcagagtgggttaagctgaccaggaacacccatttaacccctttttctttttgctttcatttttataaaggaaaagaggacctgtcagataggcagccccatgctacgtgattctttatgttgtgttgttttgttttgtaaattgtataatttttaaatatctgagttttnnnnnnnnnnnnnnnnnnnnnnnnnntcttgttatggccttaaaaaggggttagtgcatctttcaggggtcactctgccatggggataaaaaagctgtttcacaaacagttttat

SEQ ID NO: 354574 - DNA, 1483 bp, Homo Sapiens
gtgggcattggagaaaagtggctaatatataagggtaaaggattttaggcaggctttccctagttcctaggttcttgccaaggttgtcattctgtaagggagtcccattccaaaagaaagaatattgcggaaagagctttaggcctgaccagaactgtctttcttgggaactttgaatgaggtgatgttttgttttctacagcactctttggatacagaggaataaaaacatcatcttctactgcctttttcattcttgaaacaatggatttaagtaaatcctgtctgcttttactaacttcattttcacaagtggaatgttcttcaagaatcactctgcaatgtgttattaaacttgttgtctgtgaggttgacaaaggatcccaaaggaattctacaaagtctgtaagtcggggaataattgttttgttgatgattgcagacaagacttttttatctgaactactttccttctttgaatcttccacactgctatccataaattcttctacagatttgaaccatggcatctcttttaaacctgtggattccaacttaagaggattccaatcaatcaactgaactcgtattaggggatttaaaagctttggtatgcataaactaatgaaagcttcataataggagtcaggaaacttttctcgccattgctgaaatttcaacaaaatattctggatgttacaaaaatcatcttgcacttcttcaaaaactttcttctgtttctgtaaaatgtcaccttggcttttttggaagtcaatcatctctgctgaaggcagttcatcatcactagatgttccttcctgatggttacaattccccagaaagcacccttgcttgtcttctttttgtccttcgagattcaatctcttcgtaaaatccactgagttttttcatctactgagaagtttccacttgtggatgtctcatctttgccttttcattaaggcagtcaattaaattttccacataaatttttcatgcttttatagaatttacaatttagagcttgatttgatgaactctctaggttctggatggtactctttgagcttttgacatcttgtacgtatttttcatactccctcaggtgtgagcggtgagtttcctgtagtaatgttaatctagtatttaattgcttctttataatttctaaatttactggcggaaatgaaatggaagtatcaaatttcttcacttttgaagagccattgccacaggaaagatctatgtctctttcctctatgattttaactgctttcctcatttgctgttgttcccaagtatcttgcttttcatcttcctgactttcttcacttgtttcttcatttcttgccttactagcggaaaaaaagctcacattgtaaacgtttagtatttttccattttaattgcagcaagccaacattttttgagattatacaaacgccgctctcgacgaattcgagctcggccgatttggcctgat

SEQ ID NO: 354575 - DNA, 2291 bp, Homo Sapiens
  misc_feature (307)..(316): n is a, c, g, or t
  misc_feature (466)..(474): n is a, c, g, or t
  misc_feature (1491)..(1499): n is a, c, g, or t
ctctttaataatgctcgtcctctaggggggcgcctgcgtgatgacaaaaaccgcgggcgggcgacgaaaattgtggtgccccgcccgcgggggtgcattttgtacgggcccgcccccccctcttagtgtgtgcatgtgatctagtgtgggtaagatagctgtgatttgtggcgtgttctggctcggttgtcgcttcagtgatcattgttggtattgtgttgttgtgaaattagtcgaaaccttttaattcgattgactaatctttacaggataaaccaataagacagctattcaaggttacactttnnnnnnnnnntccagcagtgcaaatctaatagactaaatacgttcatctcctcccaaaacaggcatttgatttgaaaacagaaaccagaacagagcatacaccacaaggaaacatggtacttacaaatattgtcaaataattcagcagaactctttaagnnnnnnnnnggttcttagaaattgagaaagcagtagaaccacccaagcctggcagatcaatctaccagatgttctgcatgcgagagggctcccaaccacctgtaacttcagaaaggccgccaggcactattacgaaggaaacaggtgcagatcctaactggagatgactttatcacaaagccttaagacaaagggaccatcctcttccaagacaacaggtgtgaacagaggcaaggagcgagaggagagggctccctcagcagatgggtggaaagcaagcctgcccttgcacggcccttggcacactcaatctaccccctttcccttctctgcccctggcaaagaaagactgggcaagtgcaagagcccagaatggctcctcaaggcacatggttaaagtaagagtaagaggaaaacgagccccttctgggtgaaatatggcaacttttctgagacatggcaacgaggcagagttaatctctttggccctcatcaggtaaagcagcaactaaggagcctactcagggccttacgtgggccccttctatgtccacaagaaagtgcatccttagctcagttcaacatttaaaaagagctaacgctacttgcaaaaggcccaccatggattcaaacacttaataccaaagaggtccagcaactcgcgagtctgtctgtgttctgtgatctgaagcagagctaaggggggcctggctcacagggtcacgctcttctgccaaggcgcctcagggagggaaaaaaaggcatgatgatgtctgtgagccagaacctgcaggaggaccaccggtagagattctagaagacaaagaagccctcaggaggctctgagaggtgtccaatgtctaagagacggccaccccctccatctctagcttcgagtcaacgctgttacagtcactctccggaaaccagctcttcctttatccacctgcacggcccctgcccacagtgagggaaagatctggtccctctgacagtaaggaaattgtatagaaattatcctgaggnnnnnnnnncccactgtgacgctacctaaaagaaagagtatttcaatttgcttacacagatttagtcagtacactccagactgtaagaaatgtatgaagagactgcttacggaactcaaagactaaacagtgaatactactgtggcccagacacggatcgaaaacacttctcccagtggcttctggtgctatgtctgctctcccgagagcgtccagcaaggtcttccatgcagacagggtgaggagccacagagctcaagattgttgaagctgatttagtgagctctgtaaagcaatactcaaacagctccgtacgaaaaggtgtcatttacattattatttatatatagtatctcgaagtaaggaaaaaagcaccattttactgaaaataaaaaggctcacgcaggctttggtcctcctgaaatgacaccagcctgagtgagaagcagttggcccttggggagcggggagatgatggaacgctgtcaccggcaagaagggaagccaagtggcccggcaagccacaagaatggggcaataaggggagcaggtggaggggcctcggagagcagccaggctagtctggggatggagccacctgctctgagagatcaaaagtaggtgtgcggcactgtcaggacaagtctctaggactggggcattggcaaacaaaaggggcaatgtctgacccgagatgatgttctacttaatgcatctcatttcccccaaaacctgtcacctgcagacagaggcttggacaagtagctcagatgtactcttttccccaggaactgcaggccg

SEQ ID NO: 354576 - DNA, 325 bp, Homo Sapiens
  misc_feature (78)..(87): n is a, c, g, or t
  misc_feature (236)..(245): n is a, c, g, or t
ggtctcgcatgcagaacatctggtagattgatctgccaggctgggtggttctactgctttctcaatttctaagaaccnnnnnnnnnncttaaagagttctgctgaattatttgacaatatttgtaagtaccatgtttccttgtggtgtatgctctgttctggtttctgttttcaaatcaaatgcctgtttgggaggagatgaacgtatttagtctattagatttgcactgctggannnnnnnnnnaaagtgtaaccttgaatagctgtcttattgtttatcctgtaagattagtcaatcgattaaagtttgataattaaaaaaaa

SEQ ID NO: 354577 - DNA, 1418 bp, Homo Sapiens
  misc_feature (11)..(11): n is a, c, g, or t
  misc_feature (298)..(320): n is a, c, g, or t
  misc_feature (1387)..(1387): n is a, c, g, or t
cctctctctcnactctctctgtccctgccccagcggcttccagtgtggcatctcaaacagtgtcctggcccctccagagcagtgggacatctggggactgtttttgtgtttaggggaaaaaattctgctgcactctgcttgggccttgaggtctgtggcagggctcctctggcccgcagtggcctggatctatctgggccatgagtgacgggcagtgaccagagggactggaggccagcggtgtccacccttgccctcagcaagagagaatgcattcttaaaagaaagctgtacatgnnnnnnnnnnnnnnnnnnnnnnngtggctctagcctcaggctccagccccagtggggtactgtacagttaactgaagaagaattttaaagacgatttgaacaagaaaatgaaggcagtgggaaagcaatgccaaatggttgtggagaaagtggccggagcctccctggagtggagcagccctgaagcctgtgccccccgacctgcgggccgctgttttggtttgacatgacaaggaaaggacttcctgctgaccctgagagcctctggggtgccgcggcaccacggggcatgcatgattgtgctagcgtttagtctgagttgatctttttaaaactgcaagtgttgaatactagaggttgttagacccttttttatgttttttaattaatcagtcacttgtaaaagcaaacaagcggtccatccccttttcaaggtcacttttttgatggtaccgaagatcccatggacattaagggacagctaactgtggccagactcagccccatgtccttggccaggcccaaggagaggactcggccccatgggttgttgccagtcttgcagtccgccccacctgagtagcgtgagcagatgacgccacagagacccgcctcttccctgaacgcgggtcggtgtggaatcagtgactgctgactcagggagctccttggccccgtgggcactgtgccagggctggggccttctgctgctgccacacccagctcaggcctgggccagcccctgcccccagcccactgagggggtgggcttactccctgggcagtcttgggggccagagctgaggccagtccatattacagtggctgggctgtttttttcagtagcccctagcattggctgggattcctgttcctgggtgcgcctccacctcccttctgatgtttcctggctatggtggggtgggaacctcagtttcccccaaagtcttccctggatgctggcttcaggttgaagtccctggttcttccagttcctcacgggttaggtaggggctcctgcatcaccttcagaatccagttccaacccccactctccttaggccttgtgctctgctctgccctgccaggntgcccttgttccatgtgagtagcatggggcg

SEQ ID NO: 354578 - DNA, 702 bp, Homo Sapiens
  misc_feature (13)..(13): n is a, c, g, or t
  misc_feature (38)..(38): n is a, c, g, or t
  misc_feature (63)..(63): n is a, c, g, or t
  misc_feature (80)..(80): n is a, c, g, or t
  misc_feature (112)..(112): n is a, c, g, or t
  misc_feature (347)..(347): n is a, c, g, or t
actgacaaaattnaattccactttaaaaacagatgtanccttaaaggggttggttaacacttntgtggggtttttccctncttgttttctttcctcagagtcaaataatggnctgtggcttcctgaacacatagagtgcattaaagaatcaggtccatggccacccttgccccagtgaggtcagtttcctgccaacctgctctgcacctcccacacactagcaactacaaccaagggcctgatttgtgatctccggctacgttgtctgcctaatggggcgatcatgcaagctacaaccagagacaaagaagcctgcgttcctaccagcgcagctaacttcatggaangcagcatagcttgcaaatctatcaaactaaactgcaagaaagacaatctgatttagagaaaaggcattctgctacagtcattaagcacaagtaatttagattttttatattgtctcctcatttacaaatttactgtatcaatgccaaccaatggaacgaatttcttaagtaaatgagaaataaataaaagagatagaaagataatcaaattacttaaaataatcctcttccctagatgtatttttgagagaactaataacagtggcaaaatcataggaataataacatatcataggaagtaattaatttaaattagcatcatgtttgaagaatataagtgaaacgctttatggac

SEQ ID NO: 354579 - DNA, 1505 bp, Homo Sapiens
cggcggagcgggcggcagagcagggcggcggcgactcgcagggtaccaccatcttaaggacagaaaagctacaggactctaggaggccaccgtcctgatttgggaagtccaacttactttggccagacagcagctaagctggttcatcccatcagcctggattggtgaaactgaatcacaggagatatttccaggtttgctgggatgggaaacctgctcaaagtccttaccagggaaattgaaaactatccacactttttcctgggattttgaaaatgctcagcctacagaaggagagagagaaatctggaaccagatcagcgccgtccttcaggattctgagagcatccttgcagacctgcaggcttacaaaggcgcaggcccagagatccgagatgcaattcaaaatcccaagtgacattcagcttcaagaagaaagcttggaatgcggtgtgccctcttgttgtgaggctaaagagattttacgagttttccattagactagaaaaagctcttcagagtttattggaatctctgacttgtccaccctacacaccaacccaacacctggaaagggaacaggccctggcaaaggagtttgccgaaattttacattttacccttcgattcgatgagctgaagatgaggaacccggctattcagaatgacttcagctactacagaagaacaatcagtcgcaaccgcatcaacaacatgcacctagacattgagaatgaagtcaataatgagatggccaatcgaatgtccctcttctatgcagaagccacgccaatgctgaaaacccttagcaatgccacaatgcactttgtctctgaaaacaaaactctgccaatagagaacaccacagactgcctcagcacaatgacaagtgtctgtaaagtcatgctggaaactccggagtacagaagtaggtttacgagtgaagagaccctgatgttctgcatgagggtgatggtgggagtcatcatcctctatgaccatgtccaccctgtgggagctttctgcaagacatccaagatcgatatgaaaggctgcataaaagttttgaaggagcaggcccccagacagtgtggaggggctgcctaaatgccctcaggttcactacaaagcacttgaacgatgaatcaacttcccaaacagattcgagcaatgccttcagtagagctctgctcaaagaagaggatctatgtgctgacctcagaagatgtatatgtttacataatttaatacagattgatgttaatacttgtgtatttacataaccgtttccttcttgtcactgaaatatatggaccttaatttgtatcctgactgactcaacccagcagagcataaattgacttgagagccttacctttgatgtctgaaatgaaacccccttctccaaaggcaaaattcggagactttgatctttgctactggagtcctttaacaacatctataacgataaaaaattccctaattgtttgtggtagtaaaaaaaa

SEQ ID NO: 354580 - DNA, 707 bp, Homo Sapiens
  misc_feature (251)..(251): n is a, c, g, or t
tagaggtagtgtcatcccctcgatcaggtgtattctctgtatgggattgtcactgcagagcccatcatttcacagcgtagcaacagatgaaaactaggctacctactgatggatgtgaggctgctgtctacaggagctcatccaagcctgtttaactgggcagtggcaaggatactcgtcatcgggcattgcactgggggaactcccctcacccatggcttccaacttgaaacccagatttacctccaggnagaggtgagaaaaaaattgtaaatagacttgctaaagagcaactcagggttggggtgtgttttaattctcctgatcacttgaaataatctgtaggctgagtgcttatgggggtgggggagaagggtgactccagggtccttccattttgtgaagctctgggggtggagtgtgggcatctgaggccctatgatggcactacattgagctgtctgcccttccggaaacccaacctgcaatcaactgcaaatcaaattcttcacattccagctacagtctttctttccccattgaatctcagtccctggccatgtggtcaaggtggctttctgttaagctaccctaatttcgggaatgggaggggagagaggagggccattacaactctgccttcaagactcatctcttaaaaacaaaacgaaacaaaactacaaccaccatcaaaaccacacgcaaaa

SEQ ID NO: 354581 - DNA, 915 bp, Homo Sapiens
  misc_feature (142)..(168): n is a, c, g, or t
atgtaatgtttatagctgctgatgtatgcacatttgggggtatatctatttctgaagaggtaagctgatcaaaataaatagagtgtaaattctttttaatgctttagtgattaaatgttttagtattttgaactgaaatggnnnnnnnnnnnnnnnnnnnnnnnnnnngacccacagctttgaatgatcatgttgtggctgagcagccgctttttagacgttatcattttgcctcatgttggaggactttatggaatttaagaaatacattttgtgtgcatattgtttcatagcaagaattcgttgcaaaaatgctttatttttgaacaatgcttggaaatattatgtgacttttttgtttgtttgttttaggaggatggtgtatggtgggggcaataaatgaggttttttgcattccaaggaaatggcatatggattaactgtaagaaatgaaataagtaatttattgtaagacaacatcaagccatggaaacttggcagaagattcaaagcagcttaaacagcacttttaaattaactcctaagcgttacatggttgtgactatggaaactccagttaagacaggatcttatcagaggtggacaaccgtgaagatttccttttccattttcaataaactttggaacaaccttctcgtatctcccctagagtttcgtgcccctctgaactgtctgttattgcaatgtagtttatcaacagaatttgtgtgtttacgatttaagctaaaagataatttaagaacatttatttccccttttcactttaaaaaattatgattattcctattattgttatgaaccttcttattttacatttgagggataaaggcaaatgattttgtgagtcttctagttactggaccgaggtttctgctggatctggtggggaggcag

SEQ ID NO: 354582 - DNA, 320 bp, Homo Sapiens
  misc_feature (177)..(177): n is a, c, g, or t
cctacttatagcggagactacagtcaaaacaaaataaaacaaatcctctaatgctatcagagccaagaaatctatcaatcatatatacattttttaaatccaggagtgtttacatttcagcatataaatcttatcaagctaaaatagagtatatattctgatgttgtaactgatagntcataccctcactggctttgagagtccccaaacatttattgtaaaggtttccaactacactagcaatcttttgtaattgaataaaatgccaatttatatttgttgaataaaagattatctggggtactgctccttccgaaatg

SEQ ID NO: 354583 - DNA, 1950 bp, Homo Sapiens
tttttgacataagaaaaataatcagtttaataattacaacagtgtagcatcaacattgtagtagtcaacactaggacattgtctgtgacatttaaattaggagtttctccacacttgtcaacaggcgccctgggtgtcccagagaagtgaagaaatgattggcattaaggagtccacacaaccagggcaggcattcaaggtcccagacgcccagcgcatgtggacaagcacagacgccactgagtgtgaaggaacgagcttctgatgctacattccaacatcgctgaaaactgaaagtgcttcacatctacaggataagaaatggcttcatctcctcatccatacaaggtgagagcaaaggagtaaccctcgggcaaatcgtggcccctttaaacgtttatatcaagttcccacccccttgggaggtcacacggtgaaacagacacagttatatacaacagggcaggtttttaaaaagagttgctctcagacgcatttttcctgctccctaaaaagccgaggaagatactggatccacagaaagaaaaggcaatgccgtaacatgaggccctcatggccgcaccgtccaggggaagggctgttaaaaacacaagtattcttgtgaaatacttcgatctgagcattaaggcaggtctgcaggagatccgtcctggggactcggacagcaacgctaccggctccgagaggacagttaatgtcgcctcccggcagaggggcggagagatcagacaagagttgttcctgagttaaaacctgctacaacagcaaactccaataaactcaagttgaatggtttcccactgcaatgtcttacgcatcaccaaaaaataacttgtaaaactcaagcttaccaaaaaagaaagtgttgatctttgcttgtgcccgcatgagtgaatgatctgctaagttgaggaagctggcaattctagtgaaaagtccaggtgaggccaggttctgcagcatggggcaggtccacgctgagcccaggcagacaacgtgaccagtcacggaaggaagccaaaggggcttgctgggcaccagagactgtaattagcaagggcaaggaagaaccgtaaacagcaacacaacactctcccaaggtgcccagctcaaaggcatcagtacacaaaggattcaagtgcagttaaagggcaatttggccaatagacagaaaatcagagagtcaaatctgatgcgcaatgagttgttctgagaccagtaatccacggtgctgcaatttgggtttttaaagatagaacacttgttctacggaaaagtgtatctcactttaaaaccaaccttttcacaggaaaggaaaccaaaagcaaagtccctgtggtcacccttatttattgctgaagcagaacgaaaacctgctccacgggccgggcttcctgcccaggaccgcacaggctttccagagccagcctgggcccagcgagccgcggtgaggacaggcttcgtctcctctgcactggaacacagtgggggaaacgttccctgcttatgcctatgttacttagtggaacctaaggtgtatattgctttattcttgctgaaggaggggattttactttcggtgagcactgaagcctgctggctacggccaatggtggaggagacctcgggatgaggctggcctgatgacaaaactccacccatcagtatcagcctgcagcatggcctccatctgttttcatcagctgcagtgacttataataaataatacattctatttacaggttctagtaagatctctctttgagggaagacaaaacagtgtattttgttgttactgaactagcctatacagaaccgtctgtgtcctcccaacaacgcagcaaactaatctgagaatcacagtactcagacagcggacaagagcaaacacctcgaggtggatgcggcagtgccgtatggccttccttg

SEQ ID NO: 354584 - DNA, 652 bp, Homo Sapiens
  misc_feature (560)..(560): n is a, c, g, or t
  misc_feature (562)..(562): n is a, c, g, or t
  misc_feature (616)..(616): n is a, c, g, or t
  misc_feature (634)..(634): n is a, c, g, or t
caggttgagcccttgaaaaacacaaaaaggacaagttcctgtgttgaaacacccccatcccctcacgttctcacccccaggcccagaagtaggttgcaactgcctttggaagattttgccccttagccatccccacccacttgtaccagctaagaatgctggagactctgccaccatgctctgcgtgcccctgaacctctgtgcagcccggaaggctgatgtacaggtgtacctcaatccacattacagccatgctcctaatgtacatggacatttttgtaactcagctcatattctgactgtatttgagaagctggctgtttaagggaacccagaagtgaattcttttgtaaagtaaagcacccttttgtaatgcaattaattatcccttaatgtatctgttttgtaagtctgcatttttgtatatcggatttaccttaagcttctctagtgaggcattctgagcagtggtgatcacatgccagatcgccctgcctatccacaaagtagatgaccaatgcacgctcctcaaacatctttggaggaactacctgggccanancactggccagggtggcagcaagcagcagcaggggctgacagcagggtttactgncattcaacattgcttganattgcctctaatgttctg

SEQ ID NO: 354585 - DNA, 1797 bp, Homo Sapiens
  misc_feature (1704)..(1704): n is a, c, g, or t
  misc_feature (1729)..(1729): n is a, c, g, or t
  misc_feature (1772)..(1772): n is a, c, g, or t
gctcgaatccgaaatccgggcatgggatcattgagaatacagggcgaaaaagaacgacgttactgtaggtagacattgctagtgcaaggtacggaatccatgtgcaaaaggtggctggaacaaatgttcagataaggtgcgatttgccaacaggagcagagaactctgacaccagatctcagatgaggccaaggaaatgcgcggggcacatacagagaggacgacctgcagccctccaatggccacgtcattccaccggggaacttgtttggagttttggcaccgtgggctaaccgagcactcttctgacatattcttacaactggaaatgctttgttggtccccatgttccttgactttctctagggccataaaggcaacatcttctattgcaggtcctcaaacattccaaggaaaacactgcttcacctcctgcagacagctcatttcccagaagcctctacagaagcccgtcctccctgggacagcaggggcaggggtttgcaagataaaggagggtcagctaaggacatgaagcctgcagaaaaggctatcagatggcgcctgaacttaaggtgggaggcccccttctagaaggcatcccgggagcatccaacagcaatgtggcacttagggctgtgggacaaacaagtggaagagtcttttggagacgtggacccttttcccatgctactcacagtgaagcaaaatgcgacaaaagcatccacacacggtgacttagtaaagcaagcaccgtcggggtgctactttcatgacagcatatggtcaagctataaaggtgtgcatcgatcagtcctgtgaaaatagaagcttagttattagcatgtattcaggcaacttgtactttgattcttgtgtcttcttcacatgtgtgaatgactgctatgggacagaacatatggttaaaaacaggagcgacaccaacataacacacagggttggccggctccattacgggtaagactcagaggctgctccaggtgtgtccggggaagccaggccctcacactgcacagcttacagggccctggggtgggggctgtgagctggcagcctagaggacacagctcacctgcacatggtctctgaaagtgttcaaattggttgccaacatttataaatggagagatggcaccaaaaaacatctaggtttcttgtctcttgaaaaatcaaagctgtggccaccctaggcccacttttccacatggcaacaggcgtggagcttgggctactgcccctactgtgtaggcggtgggctccccatagtctcctctgccctgctgccgtgtacctggctcccttcactcatccacatcaccggccctaggccagggtctgaaccacacacacagaatggctgcagtaagcaggaacgggaagagctttcacattcagaacaagaaggggcttttgagtaactaaaaaacaatctgagcatgttccagcacttcaaccttactctttcagagctttggggtagcaggcagccagctagagcacactctctaaggaactcttgaaagttgatgtctaatttttaagtactcatgaggtgatggaggagaaactaactcagatgactgcgatacgatacatctttccttataagaagtccttaaagatgatgaaaaatgtgaagcaactcatgtgagaaagctaaatctgaagagttctgcgtctgantttgaaattggactttataaagccnagaaaacagaggaggcggtgccctgcccttgtcagttgttgtnctctttggtggtgatggtaaccagc

SEQ ID NO: 354586 - DNA, 542 bp, Homo Sapiens
acgtattactgcttcctgagctgtaactctctcaagaatatgtccatgaacaaatttcatttatagttccagccataggaacggagttggaagggatggaaaagttttcacaaactttaggacaatgaaactatacttttggatgtatgtgatcaactcaacagttgttgacaacacaaccgaacatcagaatactaaaccagcaaataggcacaaaataaggcaagtgggttaaatagttgaaaattggttagaaaacatgcaaaaataatactgagttttctttataaaagagtcttaaaccgtcattaaatgtttctttttgtagaaatctgaagagtactgcgtctgaatttgaaattggactttataaagcctagaaaacagaggaggcggtgccctgcccttgtcagttgttgttctctttggtggtgatggtaaccagctgcttggcagccttggcgatttcgtacgcacactgtatgacctgctgcgtgaccagctgaacgtctgtgggtgagctgggttcccctgggagggtc

SEQ ID NO: 354587 - DNA, 1191 bp, Homo Sapiens
cagctttccacttccaagtgcccgaaggtgcccggcgtggccacagcttgggtcacgtgcaggccacagatgaggatgggggtgccgatggcctggttctgtattcccttgccacctcttccccctattttggtattaaccagactacaggagccctgtacctgcgggtggacagtcgggcaccaggcagcggaacagccacctctgggggtgggggccggacccggcgggaagcaccacgggagctgaggctggaggtgatagcacgggggcctctgcctggttcccggagtgccacagtgcctgtgaccgtggatatcacccacaccgcactgggcctggcacctgacctcaacctgctattagtaggggccgtggcagcctccttgggagttgtggtggtgcttgcactggcagccctggtcctaggacttgttcgggcccgtagccgcaaggctgaggcagcccctggcccaatgtcacaggcagcacccctagccagtgactcactgcagaaactgggccgggagccacctagtccaccaccctctgagcacctctatcaccagactcttcccagctatggtgggccaggagctggaggaccctacccccgtggtggctccttggacccttcacattcaagtggccgaggatcagcagaggctgcagaggatgatgagatccgcatgatcaatgagttcccccgtgtggccagtgtggcctcctctctggctgcccgtggccctgactcaggcatccagcaggatgcagatggtctgagtgacacatcctgcgaaccacctgcccctgacacctggtataagggccgaaaggagggctgctgctgccaggtgcaggagccactctctacagagaggaggggcccccagccactgccacagccttcctggggggctgtggcctgagcccttgaacccactgggggactatggcttcccagcagatggcaagccatgtgtggcaggtgcgctgacagccattgtggccggcgaggaggagctccgtggcagctataaactgggactacctggcttgagctggtgccctcagttccaaccactggccagtgtcttcacaagagatcggttcggttccaggatgaagctcggccatgtccccaagttcccgttatcgaccaacaccctcatcactgccgggccaacccag

SEQ ID NO: 354588 - DNA, 815 bp, Homo Sapiens
gacaaacttgagctggtcatcaaagttcctattcatgcccctgctaacatcaataccaagaagaaaaccatcaaccagcagctttccgtctggcatttgtttctgctcaaagtcctgctccagccccagctggtcagtgcaaaagtacatgagtttttcagctgatgcaagcttggtcgcagcagctctcttgatatagggctgcagggccgtgcttcgatgaggttgaaaagtctgatcatcaataaattcagtctgctccacaatgtgcatcttacattccacacaatcctccagggagcggctaacttctccccagtagagaaagtggtcattattgaccactcgccctccaaagtcactggtgctgaggacggaggtatggtccaagtgaaactcgtcagcactcgggcgcacgaagcggttgcacaaacaagactttccaatcccacactggcccttatccttctcggtcccagaataatccaccacactgatgttgtaggtgggaattcggacatcttgctttcttgccatcatcatcgtcgacacatcctgccacgatcagccacttctgagatcagattagtgtttccaatggaccagacagcttcctacattattagtgggggtgggctgcacatgcagcaaaaatgccaggtcccatagtgttgtataccagtatggtcactgttcaccacctctcatcgccaatagccaaatttcttcagctggcgccctcagcgcgggcccggctccaaaatcccggcagcacgacgggggcccgaagcgctgtccctgggtccgagctcaat

SEQ ID NO: 354589 - DNA, 962 bp, Homo Sapiens
  misc_feature (241)..(286): n is a, c, g, or t
  misc_feature (928)..(928): n is a, c, g, or t
  misc_feature (932)..(932): n is a, c, g, or t
gggagattgcgcgagggggagcgagcgagcgggcgctgccaggagcccgcagccctggcgcccgccgccgcccggagccccgcaatatgccgccgcggccctctggctctaggccatggcgaggctctgccggcgtgtcccctgcaccctgcttctcggcctggccgtggtgctgctgaaagcgcggctggtccccgcggccgccagagcggaactcagccgctccgacctcagcctcatnnnnnnnnnnnnnnnnnnnnnnnnnnnnnnnnnnnnnnnnnnnnnnaagcagctggaggaggctgaggaggagaggacagaggtgcctggggcaacctccaccttgacggttccagtgtctgtatttatgttgaaagtccaggtgaatgacatcatcagtcgtcagtacctgagccaagcagttgtagaagtgtttgtaaactacacgaagacaaattccacagtaactaaaagcaatggagcagtgctgataaaagtaccctacaaattaggacttagtttaactattattgcttacaaagatggctacgtgttgacccctctgccttggaaaaccagaagaatgccaatatattcatcagttacactttcactgttcccgcaaagccaagcaaatatatggctatttgaagacactgttttaattactggaaaattagctgatgccaagtctcaaccaagtgttcagttttcaaaagccttaattaaacttcctgacaaccatcatattagcaacgttactggctatcttacagttctacaacagtttttgaaagtggacaattttctgcatacaactgggaattactctcaataaaccaggttttgaaaacattggaattgactcctcttgctgcaatatgtggtggaaaataatattctggagggaaaaggaacttaagggtcnatgngctctatttcaagtttctcttcctcttcta

SEQ ID NO: 354590 - DNA, 2010 bp, Homo Sapiens
aaaggattgacttgtggtggcatgagctcatgcaagaggcaggggatgagtgtgagcccgagtggtgtgatgccgaggacccactcttcatcctgtacaccagaggctccacaggcaaacccaagggtgtggttcacacagctgggggctacatgctctatgtagccacaaccttcaagtatgtgtttgacttccatgcagaggatgtgttctggtgcacggcagacattggttggatcactggtcattcctacgtcacctatgggccactggccaatggtgccaccagtgttttgtttgaagggattcccacatatccggacgtgaaccgcctgtggagcattgtggacaaatacaaggtgaccaagttctacacagcacccacagccatccgtctgctcatgaagtttggagatgagcctgtcaccaagcatagccgggcatccttgcaggtgttaggcacagtgggtgaacccatcaaccctgaggcctggctatggtaccaccgggtgagaagtgcccagcgctgccccatcgtggacaccttctggcaaacagagacaggtggccacatgttgactccccttcctggtgccacacccatgaaacccggttctgctactttcccatactttggagtagctcctgcaatcctgaatgagtccggggaagagttggaaggtgaagctgaaggttatctggtgttcaagcagccctggccagggatcatgcgcacagtctatgggaaccacgaacgctttgagacaacctactttaagaagtttcctggatactatgttacaggagatggctgccagcgggaccaggatggctattactggatcactggcaggattgatgacatgctcaatgtatctggacacctgctgagtacagcagaggtggagtcagcacttgtggaacatgaggctgttgcagaggcagctgtggtgggccaccctcatcctgtgaagggtgaatgcctctactgctttgtcaccttgtgtgatggccacaccttcagccccaagctcaccgaggagctcaagaagcagattagagaaaagattggccccattgccacaccagactacatccagaatgcacctggcttgcctaaaacccgctcagggaaaatcatgaggcgagtgcttcggaagattgctcagaatgaccatgacctcggggacatgtctactgtggctgacccatctgtcatcagtcaactcttcagccaccgctgcctgaccatccagtgaacatgatcctgacctttacctaggattcctcctgctccaaactttgcccatcctctttgccccctcaggagtgctgagggccagtgttgacccacactaccctcccttgaccagctgtctgggaccggaaaccagctttgtctccaggtagagacaacatcctgtgactgccaggcagaaaggacagggcccaggtcagcctcagtctgctgtgcctccagactgcagagctctcagaacccagaacagagacgaaaaggctacctctcctacccaagttaagtgttcaaaggggatgtgagggcctccactgaagcagggaggcagctgtgtaatcctatgtcagctctcttaggaagccccagtacttatattgggcatgcacttgcccttaaaaacaatgatttgtgagtccaggaacaatttactatttttaaaatattttgctgcttctgttctgggtctgaattcccttttgtgccagatgccagtactgtctgcccattggctccaggggctgtatgggcagattcagtctccagagggtattcagatcatctgcttctttgaaggagtaaatgtgttttgttcctagggccagaggagcttgtcttccttgtcctctgttcccaccctcccctgaacagaacccagcccataagagacattctcagatgaaactctgttttcttgccccagtcaggctcaagccctgtggttgtaggaataaagcctgtgatctcaaaaaaaa

SEQ ID NO: 354591 - DNA, 1648 bp, Homo Sapiens
  misc_feature (68)..(68): n is a, c, g, or t
  misc_feature (72)..(73): n is a, c, g, or t
  misc_feature (77)..(77): n is a, c, g, or t
  misc_feature (126)..(127): n is a, c, g, or t
  misc_feature (136)..(136): n is a, c, g, or t
  misc_feature (264)..(264): n is a, c, g, or t
  misc_feature (351)..(394): n is a, c, g, or t
atggggtgaggatggcagggtggttggagtacccagtaagctggggtctgctccctgttctttctgtncatnncatncctgaaggggcttctctcccttcctgtactctactgcccctgtccactnncattccctncaggggcaaggtacgggtgtatctgtcccccatcttgagctgttcacagtctttccctgcccatccctgcagatctcatggaaccaagggattgacttgtggtggcatgagctcatgcaagaggcagnggatgagtgtgagcccgagtggtgtgatgccgaggacccactcttcatcctgtacaccagtggctccacaggcaaacccaaggcaannnnnnnnnnnnnnnnnnnnnnnnnnnnnnnnnnnnnnnnnnnnattatgtaggggtaagaagtaagtttctgaggaaacaagtaatgaaattatttttttcctacaaccctgagttttggaaatgtagcattgtcttttctaaatcaaattaagacataaatcctcaatctataggtggtgaggcccagggtgagacagttcaggtggagggttttcatacagctgacatggatgttctttccctatgcacccatggtttggttgaaggagagctattctgttaactcaaggccaagggtgggcacagagatccctctcaggcttctaagaccataactcttagagttcaattccttccacctggcacactattaacatatagtcctctgccagcacacaccatgggagccggaaacacttaagaaaactgtttcttcccattgacttgaaagctatgtcactctaccttctgcccactccacccctaaattatctccatatgctttggaatatccctcaataaggctttagaaacacaattttggcctctctttcatagagatgagggtagggatggaataagcaaagggaattatcttttttttcccactcactctgatggtgtgtaattgagtgtgtggcgcacaaatacacaacagagggactattatgagtgtgctatgagagactcatgtgtgagtaatgtgggtggctctgaaataccatctgagggtgctggtatgaatgatggcctgatagacatatgtgtcatcaggagtgtgataaaggagatgagatgggagcatggagaaaaggagatggaagggagatggatgctgtgaaaagggtgctggcagggctggaatccctgaggaggatcttcctccagctctgcccagcctccatttggtggtcagtaggggtgggcataagaccctaacctgttccccattcttcccacagggtgtggttcacacagttgggggctatcatgctctatgtagcgcacaaccttcaagtatgtgtttgacttccatgcagaggatgtgttctggtgcacggcagacattggttggatcactggtcattcctacgtcacctatgggccactggccaatggtgccaccagtgttttgatgagaagggagccacctggcctagctgggggatggacaagattatctctgtggtgactacctccaaaggctgcttggtctagagggagggggacttatacaatcatctattttctggagaaagagaaaacctgaggggataacgtatcctgactaggat

SEQ ID NO: 354592 - DNA, 447 bp, Homo Sapiens
gcagacagactacatcagaatgcactggcttgcctaaaacccgctcaggaaaatcatgaggcgagtgcttcggaagtagtctggtgtggcaatggggccaatcttttctctaatctgcttcttgagctcctcggtgagcttggggctgaaggtgtggccatcacacaaggtgacaaagcagtagaggcattcacccttcacaggatgagggtggcccaccacagctgcctctgcaacagcctcatgttccacaagtgctgactccacctctgctgtactcagcaggtgtccagatacattgagcatgtcatcaatcctgccagtgatccagtaatagccatcctggtcccgctggcagccatctcctgtaacatagtatccaggaaacttcttaaagtaggttgtctcaaagcgttcgtggttcccatagactcggaagtatgtagt

SEQ ID NO: 354593 - DNA, 527 bp, Homo Sapiens
accacggaagctgatcatatgagctctacgagaaatcaagggccatttatgaaagtaggcaacaagtgcagccgaggacagttttcgaatggattcctctggtccagattataaggaattggatgttcatcctcggaggatggagtctggatttggcttcagaatcctcgtgggagatgagcctggacagcctattttgattggagctgtcattgccatgggctcagccgacagagatggccgccttcacccaggagatgagcttgtgtatgttgatgggattccagtagccggcaaaacccaccgctatgtcatcgacctcatgcaccacgcagcccgcaatgggcaggtcaacctcactgtgagaagaaaggtgctatgtggaggggagccctgcccagagaacgggagaagtccaggctctgtatccacccaccacagctctccacgcagtgactacgcaacctacaccaacagcaaccacgctgcccccagtagcaatgcctctccccctgaaggcttcgcct

SEQ ID NO: 354594 - DNA, 1190 bp, Homo Sapiens
agcggacgtttcccaggggctgcgggactgccgggaggagtgggggcggtgcctcacgtctggtacagtcatcacaagcctgttcggcgggactgtgatggccagagagatgacgatcttaggatcggctgttttgactctcctgttggccggctatttggcacaacagtatttaccattgcctactcctaaagtgattggtattgatcttggcaccacctattgttctgttggggtgttttttcctggcacaggaaaagtaaaggtgattccagatgaaaatgggcatatcagcatacccagcatggtgtcttttactgacaatgatgtatatgtgggatatgaaagcgtagagctggcagattcaaatcctcaaaacacaatatatgatgccaaaagattcataggcaagatttttaccgcagaagagttggaggctgaaattggcagatacccatttaaggttttaaacaaaaatggaatggttgagttttctgtgacaagtaatgagaccatcacagtgtccccagaatatgttggctctcgactattgttgaagttaaaggaaatggcagaggcatatcttggaatgccagttgccaatgctgtcatttctgtaccagcagaatttgatctaaaacagagaaattcaacaattgaagctgctaaccttgcaggactgaagattttgagggtaataaatgaacccacagcagcagctatggcctatggtctccacaaggctgacgtcttccacgtcttggtgatagacttgggcggaggaactctagatgtgtctttactgaataaacaaggagggatgtttctaacccgagcaatgtctggaaacaataaacttggaggacaggacttcaatcagagattgcttcagtacttatataaacagatctatcaaacatatggcttcgtgccctctaggaaagaggaatccacagattgagacaagctgtggaaatggtcaaattaaatctgactcttcatcaatctgctcagttgtcagtattactaacggtggaggagcaggacaggaaggaacctcacagtagtgacactggaactgccaaaagacaaactttcctcagcagatgaccatcgcgtgaacagtgggtttggacgtggcctttctggataaggaaaagtgggagaaagttcaggttttattttgaaac

SEQ ID NO: 354595 - DNA, 368 bp, Homo Sapiens
tttcaaactggaggagtttgcaacaaaatccttttcaatactggtaaatcaaattggagatcgtgtatgaacatacactgatttttaacagattatgttcacattgctcttccttatgactttctggaaaagctgcttttaagtttgtttcctattgaatttcatctttcctgcataaccaatggtgtctggtccaacgttgagtaagaaacactataggggaggaagtatgcatatacatgtccatatgtttatcataaattttgctgatacgaaagatatgtggcacacagtctataagtaacaatgaaatatacagtattctttatggcaaattccatatagtgaattggttcccatgacagcca

SEQ ID NO: 354596 - DNA, 717 bp, Homo Sapiens
  misc_feature (168)..(214): n is a, c, g, or t
cctttcctcctaagaggaaagttcacagccctaaatgcatacatcaaaaagactgaaagagcacaaactgacattctaaggtcacacgtcaaggaactagagaaacaagaacaaaccaaacccaaacccagtagaagaaaggaaataaccaagatcagagaagaactnnnnnnnnnnnnnnnnnnnnnnnnnnnnnnnnnnnnnnnnnnnnnnngctggttccttgaaaagataaataaaattgatagaccattagtaagattaaccaagaaaaaaagagagaaaattcaaataacctcaataagaaacaaaatgggggcagaaatacaaaagatcattcaaggctactatgaacacctttacgcatataaactagaaaacctagaagagatggataaattcctggaaagatacaaacttcctagcttaaatcaggaaaaattagataccctgaacagaccaacaacaagcagtgagattgaaatagtaattgaaaaattaccaacaaaaataaaatacaggaccagacagattcacagcagaattctaccagacattcaaagaagaattggtaccaatcccattgacactaatccacaagacagagaaagaaggaaccctccctaattcattctatgaagccagcatcaccctaataccaaaaccaggaaaggatacaactaaaaaagaaaactacaggctgatatccctgatgaa

SEQ ID NO: 354597 - DNA, 554 bp, Homo Sapiens
gccaccaaaacaggagcggaggcctgaggacagcacaggagagacgaacgccgtggccccgggggcctgtgtgactcggggtgcggccgggtctcgtattgcacagaaaagaaggagctgagcctctgtgggcacccggcggctcagtggtccccgcacatgggcaggttcacaaaggtgaacacgttgaactcagtcatgatggagaagcacaggaacacaccatacaggaggaggcacccacagcccagcttcttgtccagctgccacttgttcaggtggacgccgaacaccgtgacaaaaacagaggcccaggagcaagcctacggagtagatcagccccctgctattcagccggatgtaggatccgtaatccacagccagggtctgcagagcccaggggagaccgaggccaatcaggatgtcaaacacgttgctcccaatggagttggacacagccatgtcccccatcccttgtctggccacaatgaggctggccatgcagtcaggcacgctggtcccagcagccaggaaggtgatccccatgatgacgt

SEQ ID NO: 354598 - DNA, 468 bp, Homo Sapiens
  misc_feature (20)..(20): n is a, c, g, or t
gtcactgaaggctgcctctncattgtcatagcaactctcatccttatccgacatatggttgtccatctccatggaaactggctcctcaattttagacttccacaggtgggagagggtgagctgcagaactcaggaaacttctctctcagacattgcccgcagctccttatccaacttagggttgtcaaacaggggagctaggtgtgccaagacccgtttctccacaatgtggttgagggaggaaaagacaccctgccgcacgtggccctccaatggtggatagaagttgggaatgatgcggcacatgaaggtccaggagtgtggcagtgatggctgggtggggcttcatggagtggtgcatgaccaggatggctggttctatgttcataatgctatccttgtctggactaaagaacagccagtcataaaacaaagccagcttggcattggaggcagcgacatttgacg

SEQ ID NO: 354599 - DNA, 475 bp, Homo Sapiens
aggtactgctaatgaatctgttttcttagtgagtaaatttgcataattttataaatattattttagagaatcttttgaaattgttgtgatcatattttgctttctatggcttctccttaacttattgattaattttttgaagttatagatatgttctcctattttaaaagcaaaaataacaattgacattccttgagcaaaatatactgctgtgaatttgcaaacaagaaatctgagccaaaacttgacattgtgggttacattgccagaaatgttggtcaagtttgcccttagatgtctacaactagctggcataggttgccatcttaacaagtaatctaaaagtcccattcggttctacattattaactttttttttctatatcctgatgaccagtaaattagagccacactggttaagtttgactcgtctctaaaacgtttttgttaattggacaccaagaggaagaatctg

SEQ ID NO: 354600 - DNA, 396 bp, Homo Sapiens
  misc_feature (220)..(220): n is a, c, g, or t
  misc_feature (341)..(341): n is a, c, g, or t
  misc_feature (357)..(357): n is a, c, g, or t
attgattgacagatgattcatagataacttgcaacgtttcttcagtgaacgcatatttatttcttgggtaataagaaaaaacaatagaatgtggaatttggggcttggcctcttttagctcatttaaaaaaatattaaacacttggaattatcgagcgctgaaaaaggcaatagaaaattcaccttttaactccctcaaagatagaaatgtgtgaatctnctagtgggttgcgtttggctggtcctgcaggctgatttggtctgtcctctctcccagagagatccccaagcccggctgagatgtgcttgtttgtcttgagggcagacaaagcctagcaaantcttatggaaggctgntataaaagcttaattggcttataaaagctctaaaaaatg

SEQ ID NO: 354601 - DNA, 1070 bp, Homo Sapiens
taggagcgaggcctgggtggcgaattcggcacgagggactggccttgatccagaaaaacctcatcagtctctcgataccatccaaaaaaccatcaatgagtataaatctgaaattcgacaaacaagaaaattccgtgatgctgaacaagaaaaagatagaacattgcttaagactatcataaaagtttggaaagagatgaaatcccttcgagagttccagagatttacaaatactcccttgaaacttgttttgagaaaggaaaaagctgaccagaaagcagatgaagaagcatatgaagcagaaattcaagctgaaataagtgaactgttagaagagcacacggaggagtacgcacagaagatggaagaatacagaacgtcgttacaacagtggaaggcctggaggaaagtgcaaagggccaagaagaagaaaaggaaacaagcagcagaagaacatcccggtgatgagattgcagagccgtatcccgaggaggaccttgtgaagcccagccctccagagcccactgatcgggcagtgatagagcaggaggtgagggagagagcagcccagagcaggaggaggccttgggagcccacgctggtcccggagctaagcctggcaggaagcgtaacacccaatgaccagtgccccagagcggaggtctcgagaagggaggatgtaaagaaagcgctcagtgtacttaaaagtgctgttcaacaacaaggaggtgtccaggacagtcagtcggccactaggagcagacttccgagttcactttgggcagattttcaatttgcaaatagtcaactggccggagagtttaactctttcagtctatgaaactgtcggacacaggaagtcccaccttgctagcagaagtgttttctggcctattcctgaaaactactgttggtcactggaaaggcctccctactgaaaaaagtggaattttaacagtaattcaacatggggaccctggaaccccaaggggaatttggggaagtgggaatccccctttctcctttggaagctgaatgggaagtaaacccacctggacttctgaatgacc

SEQ ID NO: 354602 - DNA, 360 bp, Homo Sapiens
agggtagcaagggtgggatggttagggggcctttctcccttcccaggtggactgtctgagggcaccagagtcaccctgctcccatagttatcctcgcctccaggcggaagggagggaaggccttggaacatttcctctccccttcccccctctgcagttgcagtttccctggccccctcttggcatctggaaaagtttgggaaacttaaaaaaaatatttttggagagtttgtctattgctccccagccctgtgagggagctacagccaagaggaagaaggaaaaggagtgggttggggtgactaggggatagagagtaaagtcaaagagaagcagagcactcggaaaaagggcagcacc

SEQ ID NO: 354603 - DNA, 324 bp, Homo Sapiens
  misc_feature (19)..(19): n is a, c, g, or t
  misc_feature (22)..(22): n is a, c, g, or t
ctggctccctcttctctcnccncccttatttccacccccaggtcttgctggacctacctccagaacatccagaactggtcccttttctccaccgtcatagccaccccttaattccaagcaccagctctcatttgaattccagcagtggcttcctaaccactcattggagagtgattccatcctcgacccactgaggtttattctccacatctcagccagagagagtttttagaaactcaagtcagactgtgttgcctgcctgcttaaagccctccagaggctttctgatttcctgagaataaaacccaaaccaaccaggccatg

SEQ ID NO: 354604 - DNA, 297 bp, Homo Sapiens
cacaagtgttatatcttaacgagtgatctttcttgtgattatgtagtaagtagctcaggcgacatttatgcatttaatgttctttaaaatctttgttaataatgtaggttgttgtgtttttcctcaggcgatgtcattccctagtttttaaatgtatgtgaatttttagagctctttcagcagtctacagttgctctttgtgtgtatgctgcagtgatgtttgtttctgtttatagaggatcttatgtctctccttgatgccgacattcattctgcccacccaagtgtcattattga

SEQ ID NO: 354605 - DNA, 892 bp, Homo Sapiens
  misc_feature (596)..(615): n is a, c, g, or t
ccttcctcagctaataagcggaaaaacaaccccttttcagacatggagctgaattctagctcagaggactcaaagggagcaagcgtgtccgtactaattccatgggctcagccactggccccttcctgggacaaaggtagaaccactgttctggacagaaactgcccctcccccgtcctaattgactgtccccacccaaactgcaacaagaagtacaagcacatcaatggacttaagtaccaccaagctcatgcccatacagatgatgacagcaagccggaagcggatggggacagtgagtacggagaggaacctattctccatgcagatcttgggagctgcaacggtgcatctgtctcacaaaaaggttccttgtcccctgcccgctcagctacccccaaagttcgacttgtagagccccatagcccttctccttcaagcaaattcagcacaaaaggcctctgtaagaaaaagttgagtggggaaggggacacagaccttggggccttatccaatgatggctctgatgatggaccctcagtgatggatgaaacaagcaatgatgcctttgattctttagaaaggaagtgtatggnnnnnnnnnnnnnnnnnnnnccctctagtttaaaacctgaaaagatttccttccaagagcctaaagtcagcccgtcccattgcccctgccatccccccacagcaaatctacaccttccagacagccaccttcacagcagcgagcccaggctcttcctcaggcttgaccgccacagtggcacaagccatgcccaacagtccccaactcaagcccattcagcccaagcccactgttatgggagaacctttcacagtcaaccctgccttgactccagccaaggacaagaaaaagaaagac

SEQ ID NO: 354606 - DNA, 1148 bp, Homo Sapiens
ctgcacacccagagacgtctaggctcagcaacagcgcggggcgaaccactcggaggtacccggggttgttgtgaggggaggggagcgtcgacttatccattgggccgctacccgccacagcaaggactggcagggggcgaacggctcgtggtcacaggtcgcgcggcaggggcgccacaaagggggcgtaaacgactgatgtgtgcgactacggtgtgaataactcgggggtggacaacatcagaccgcgcggaaggctccgggcatggggtcggggtttaggaagggggagagcggggttcgacgcttggacagacttggagaatgagtggtgcggggaacaccggggcccgataaaccttccgtcctaagccccttggggcctttccccagggggaatccccacactggtcttgcctcttctattccactccttggctcttaagcctcaggcagataaactagtattccccccagcttggggaaccttggagtctgccaggtcaccttagggcaaggcccagaaggcagcccctgggagcacccagcagttcttggagatgtcctgtcatctagccatctgatatcttcctcatttgaggccacagatatatacagcccaattcctctgtctacaagtacatgattttatatagctcagtctataacctccatgtgggccaatataagctgtgtttcttggtaacacatattttgtttgaggggccactggccatgggaggttatttgttccttagaccctggaataacacatccaagccattacttattagagtctcagaatgtactcagtggagctgtgctttgaggcagccaacatttctctgctctccttagaaatgcagtctcccaatggaagctttatactctttgtactgggaaagtgaggatgatttggtagctttattggggtcatgtcttccccaaggtgtggggagcttagcttacttggcttttgaggtatcatccctctgttctcccctcctatctttccatgaccctctggactgagagagagagataaagactgacagacaccagtgtaggctggaaaagggagtgtgtgaccagagtgccaaaaatactagagaggactaatccgctcatgaccattggaaccgccgtca

SEQ ID NO: 354607 - DNA, 354 bp, Homo Sapiens
  misc_feature (17)..(17): n is a, c, g, or t
  misc_feature (241)..(241): n is a, c, g, or t
cagcagctgagacatcntgtaatggtgaccacagagagctaatagctaccagctacctacagatttgcagttcataatcccgcatgttgtcaacatactacagcattagccaccacaccttaagatgcatttcacagccaaaataagtctcatttcttttcatgacacatttctctttacatgttaacaccttgctactaccaaggcataattacttaacatgcttcgaggctgtagattnccaagtatcttaaaagaaggaactataaacattgcactgaaaacttgctttaaagctttacctgacctgtcagtttgtagacaaacaactgataataagctttgaatggtgcc

SEQ ID NO: 354608 - DNA, 434 bp, Homo Sapiens
  misc_feature (41)..(41): n is a, c, g, or t
  misc_feature (75)..(75): n is a, c, g, or t
catgaagcccactttatgttccccaaaactcttcaaaatgnagtgacccaaaaaatccaaattgacctcttctgntagctctacacccagtgtgatggagacaaatacttcagtattgggacccatgggaggtggtctcacccttaccacaggactaaatccaagcttgccaacttctcaatctttgttcccttctgctagcaaaggattgctacccatgtctcatcaccagcacttacattccttccctgcagctactcaaagtagtttcccaccaaacatcagcaatcctccttcaggcctgcttattggggttcagcctcctccggatccccaacttttggtttcagaatccagccagaggacagacctcagtaccacagtagccactccatcctctggactcaagaaaagacccatatctcgtctacaga

SEQ ID NO: 354609 - DNA, 529 bp, Homo Sapiens
  misc_feature (50)..(50): n is a, c, g, or t
  misc_feature (108)..(149): n is a, c, g, or t
  misc_feature (184)..(184): n is a, c, g, or t
  misc_feature (423)..(423): n is a, c, g, or t
  misc_feature (463)..(463): n is a, c, g, or t
  misc_feature (510)..(510): n is a, c, g, or t
ggaagagtcgtagaagaagtgtttctcaggacttaatcaagaaagaggangaaaggaaaaaaatggagaagttactggctggagaagatgggacaagtgaacgaaggnnnnnnnnnnnnnnnnnnnnnnnnnnnnnnnnnnnnnnnnnncggagagagagagagctgcatgaagcatataagancgctcggtcccaggaggaggcagaggggatccttcaacagtacattgagaggttcaccatcagtgaggctgttctcgaacgcttggagatgccaaaaattctggaaagaagccattcaacagagccaaatttatcctccttcctgaatgaccccaatcccatgaaatacctgcggcaacagtcactgcctccacccaaattcactgccactgttgaaaccaccattgctcgtgccagtnttctgggataccagcatgtcaagcaggcaagtggggtctncaagcaaaacttgtcacttcccaaaagcaagtgcctatgcttgacancccaggccttacttcccag

SEQ ID NO: 354610 - DNA, 422 bp, Homo Sapiens
atcttggctgtcttttttccccttgtctcacttttcctacttccccttttggtgtttccccaaataaacctttgggaaacacttcctaaataaactctttgcattcaaatttcatctcattgcccacttttcgggagaacccaacctaagtcacctgaatataccctacatcaatactttccaaacctggctaatgatcagacagattgagaaagtctttgaaaaatataagtatgaatgcgttacccagatctactaaactaagatctctggaggttgggttcatgcctctgtcttttctgttaatctcccttcttctgaagatttagtgattagtcaggataccaacactgacccataaagcatcctgcactagaaattttttctggaacattgcacttggcaaaactttgctgtccatt

SEQ ID NO: 354611 - DNA, 834 bp, Homo Sapiens
  misc_feature (170)..(184): n is a, c, g, or t
actccactacctggcaccagactggagacataaggaagggaaactcagcaaatggacattcctttggcctcttcaaggccacccttgctcctcagtcccctatgactacatttaatatatcttctcattaattcagtcttgcactttagctactggccaaagccaatttnnnnnnnnnnnnnnngctggtatctacgactgttacctaaggaaggtaaagggtgagggtagtaacctgtatccgcatttatatggctatagttaattaccaagtgaccctgtagcagatggtgtgtccaggccccatctatcatacggaattatgatacttgcactctaaagcaaaacccaatctcaagattggagggagcaaagaggaaaaacctcttagggccagagagacttaaatctcagttgcttgctaaactgggtatttagatgtatgggatgaaagaggctactttgcaagagggcttcgtatttggtttacactccaacaatgaggattaacactgggacggctaaatccaagaagttgagtttccatgcagaaataacctctacagaacacacatcatatgtgattctgacagaaaaatgcagcattatctttatggccaagtctcgggttccagaaagtgtttatcttgccagcctatttaggtaatgtttgcagatcttccagataaggtgagagcacctaaagcagcagtaacccagctttatcactgatgtgttcgataacagacgatcgtatctacagccgactttctatatttgctttacagttgtatattggctgggcatggtacagacacgatcggggatcctctt

SEQ ID NO: 354612 - DNA, 1887 bp, Homo Sapiens
  misc_feature (1716)..(1733): n is a, c, g, or t
  misc_feature (1816)..(1824): n is a, c, g, or t
gctggtacggtctgggattttgggattcctaacatgaccctttagcctcccaccccacccccatatcctgtttgggaaactgtcaccagtttccagcagtgtaagggagttggagtcctatcagaagttgcatagatcttctaggggttggggagagaagcatgtcaatcgtttctgtggctgaaaggctcagaagccatctgtccccacaaaagctgggctagaggaatctggagaggagtcctcctctctgcccctgtcccccgcagtgtttcccttcactctctccgcctatcttcccttcctttgggatcttccctttcctcaactctttcctttccctccagctctttgctttgctttcttttggtggctgtcactcccagctctgtcttgttccttgtctttgtctttcttcccttccccctgcccctgcccctaccagcccagctttggggacaccatccttctggggagaagtagggggaggaatatttggatggtccctccattcctcttcaggcatctggaggccctctcccccactcctccaaagaaacatctcaaattattgatggaatgtatccccattctcagtgaaaatgtgaggaggggactaatactggggtaaagggtcaaacccccaccttcatcactatgggcattatatttagggagtagttcttgggctggattttctggttgtggaagtgggggcgccagagtagtgtgtctgctatttaaaggagcaggaaagggcgtgaggcaggaggagagactggtggagggaagagctgctcctcccatgcagtgcccgactccctgcacccctctcaacctgacctgaacctttattgaatccttattagcttgaatccttattagcttgaattcctccatgcaaatcatggagtctgtgtcccacctgatgtggttgaggagaagccaggtcttcaaagaggggtcagcctggggcaaagcaggactggggggaggtgggcagcagggcctattctgagaatcacatattgttacaggccttgcaccccctttgctgcttccctcctgctcatttggggctgccaccagctctccaccctcctggttccgctggccgggccaagagaggatggagggatgggagtcccaggagatccttgtaaatagtggggtgggactgttctgagtgatcacccgagcacttaaagctccagagtcccattcttcctggatggagcaggtggaggtgcagaggggatttcctcctctccttcctcctgtcgagaattaacacctctccacagccttcccctccagaacaccagccagggaggggtggggaaggaggtcacagccaagaaaactgccctgtgacgacttccctccttcccgcctatgtgagccatcctgagatgtctgtacaatagaaaccaaaccaaatgggcaccctcggttgccggggggcaggtggggaggggggtgggaagaagggatgtctgtctgtcgtccccctccccctctccactctttacccacaaaggcagaagactgttacactagggggctcagcaaattcaatcccacccttaccaattgagccaaacctagaaacaaacacaaaacacgaatagtgagagacaaaatagaggagagaaagagagcatgagagggagcgagacaggcgaccaacacagaggagagaaaacaaaaatagcnnnnnnnnnnnnnnnnnngcagttctttataatttaatattctattttaataaaggcgtttattaccatataaatgtagcaaagaacctgggctaatatgnnnnnnnnngactttttattaggtaatttattatatgaaaaggatattttattttatgataaagtgatcctt

SEQ ID NO: 354613 - DNA, 332 bp, Homo Sapiens
  misc_feature (26)..(26): n is a, c, g, or t
  misc_feature (315)..(315): n is a, c, g, or t
aaaagagctttaacttcgataaatcnaattatttttgagttttaggctcatattttgtaccaattgtgttaatacaagttagaacttaaaaccaaacatttcaagtaaacatttctaaaatattagaaatatttctaataaaacatttatgtggttttgtcctcaattttccacaataagagtcaccaaaaaactttcaaataatattcacaaaattataaatgcaatcattttagacccctactgaaataccagtttatgagtgcctgtgtgtggattacgtacatgcacacacacggacacacataaactagnacatacacagaaacaca

SEQ ID NO: 354614 - DNA, 348 bp, Homo Sapiens
  misc_feature (28)..(28): n is a, c, g, or t
ctacagaacttgcaggtaagctagagantatttacagaagggaatgggaaaaccatatagagtcatgctttctacatatggggcaactcattatcatgagtttaaaatacacagacacagactatactccattcctacttctttaagaggataaaagctctttattttagggagaggaccaaattactccctgatctgtaattctgggtggtcatcttccaacttgtagtcaatgaaacttagacataaaactgatgagaaaataaataatatttttcaagcccaactggacaatcacagcaatacagtaaaaagatgtgtgaacatgggagaattctgagtagttaa

SEQ ID NO: 354615 - DNA, 203 bp, Homo Sapiens
atagacattggtacctggtttcaattacaaagaaaatcaagcccaaaagaaaaactctaaggctctgcaaatcttgaatgtgcgagatcatcacagtgaggaatcagcctggaaagcctgccaatccccactcaagatagacattctgtgattcccatattttcataatgaggctccccaagttatcaagacattgtaaaata

SEQ ID NO: 354616 - DNA, 565 bp, Homo Sapiens
  misc_feature (398)..(398): n is a, c, g, or t
  misc_feature (480)..(480): n is a, c, g, or t
  misc_feature (486)..(486): n is a, c, g, or t
  misc_feature (526)..(526): n is a, c, g, or t
  misc_feature (546)..(546): n is a, c, g, or t
agttccatgcttgataattaaaattttctgagataggaatgtcatatttacctatttaagccaagtttttttagataaaaggtatggaacctgctttccccttggctagttcagcgtttgggctccggagtgctgaagatgaggactggacttcgagctggtgtgatcccagtattcagtgtcagtactcagtgacaaaataaatgagagaaacgggaataagaattgtcgcctacacaaaaataccagcaactgttaactcttcccagaagattttcattctgaatgctcctgtagctagggaaccctaaaaagtctttgaaggcaacttcaagttttaaaaaaggggagggaactcctggggaaatcttcagggtgggggcccaaggtgtgggctnggaggagtgtgtggggtgatgggaggggcgtgttcttttttgcccgaggcacacttcagggggccccacgggggaagccccntaggantttccaagggacattcaagccccccaaggttggttggggnttttttcccccacccattanttttgggccagccttaggg

SEQ ID NO: 354617 - DNA, 1264 bp, Homo Sapiens
  misc_feature (342)..(396): n is a, c, g, or t
caagagtgtcgctctagtagtatatgcaacagtttaaactataggcatgttcatgtaaatatggtttctgtccaacccgttttctcttgggatttttggctagccccttgacgccactttttcttcattcgcagacccactttctagatgggtcatgaacactgtccacccaactgcagtttcccgtcagagtatctgaggagcctgtgaggcgttctggagctttaaggtcaggcgccttccgggagccgtagccccggccccgcccttctgcccgcgcgttcctcactgcgcatgtcgcgtttttgttcccctccccccttcagcaacgggccgtgaggnnnnnnnnnnnnnnnnnnnnnnnnnnnnnnnnnnnnnnnnnnnnnnnnnnnnnnnaagggggcggagaggaaggagcgcggcgggaccgggccgggacagcgcgtactttgggctccgggagtcgctccgcgcccgcggttgtagcagctgccgctgcagccatagcagcaggacttcctcaagcgcagggactatgtcttaaggcgctttgcagagccaagctcatttctggcacataagaggtcagtcattggcaccatgaactggaataaaggtggtcctggcactaagcgaggatttggctttggaggttttgccatcagtgctgggaaaaaggaggaacccaaactcccacagcagtcccacagtgcctttgggggcaaccagctcttcttctggatttggaaagtcagctccaccacagcttccttctttctacaaaattggatctaagcgggccaactttgatgaagaaaatgcctattttgaagatgaggaagaagattctagcaacgttgatttaccttacattcctgctgaaaactcaccaactcgccagcaattccattccaagccagtagattctgacagcgatgatgatcccttggaggcattcatggctgaagtggaggatcaggcagctagagacatgaagaggcttgaagaaaaggacaaggaaagaaaaaacgtaaagggtattcgagatgacattgaagaggaagatgaccaagaagcttattttcgatacatggcagaaaacccaactgctggtgtggttcaggaaggaaggaggaagacaatctagaatatgatagtgacgggaaatccaattgcaccctaccaaaaaaatcattgatcctcttccccccattgatcattcagaggttgactatccaccattttgaaaaaaacttttacaatg

SEQ ID NO: 354618 - DNA, 766 bp, Homo Sapiens
  misc_feature (12)..(12): n is a, c, g, or t
  misc_feature (563)..(563): n is a, c, g, or t
gcagccctgcgnggagcgtccgagtacctgcacagatcccatgctgtgaaagaggtgtttccggcctggtcacaccggggattcccttccagtatttgcccttcccctccgctagttttcagtgaactcgcttacgatccaaatcttgaacacacctttgtctgcgtagtacaacgttaatcttgcaattcgataaggaagaagagtgtctctgatttttcaaaccatccattgtatctctcgcttttactgttctgcctacagttgtcacaaatcacctgcagatgattcctgtgtactgtacgttcctggtgctattgtgaacaggcttgttgttttcagcgctttgcctctggtgtgtaggacggcaacacacaaccagtttgtaaacatgtgctaggacgtcttccattgattatggtgtgcgtgggctcccgcacctgtgagtttcaggtagacgttcatattttcactgcttagattcgagttatgctatttactggtttttaaatgatatatttcaagatttggtccgtgttacatacctcattactctttatttncctgtaacagcgaaagctgttactatttcgcttgttgtttgggaagtgtctctgggtaaggagatggggatacaggaatgagaaagacatctgtgcacacaggaatgagaaagacatctgcgcactgtctgccctctttaatcttttgaaatacctgtcttgtacatgtgttaagtatatagaaatcagtaaatacctctagg

SEQ ID NO: 354619 - DNA, 1212 bp, Homo Sapiens
  misc_feature (112)..(150): n is a, c, g, or t
ggcagcagagagtggcctcggagggaagccactgccacctgagacagcccaagcagcaagataaacccgctccacccgacccgccgaccttcagctttgtgggactatcagnnnnnnnnnnnnnnnnnnnnnnnnnnnnnnnnnnnnnnngctcttttctgtcctgtcagtctcctgtctccttttgctctgtctgtgcgctggtaaagtccaggtcctcatccgtccgctgtcctcattctgcggcctcagcaaaaagccacaaggtctgagcggcccgggtcctgccgggctgaccatctccggatcctgggacactctgcctgaccatctgtgtagctggtgtgggaatctgggggcattggagggagggggttttatttattgagaaatggacttcgcctgaggctgtttgccaattcagggttctgctgggcgcaaggaacgcactgttcaaacgcactgtttactttaagcgcacggggagaaacgaataaggaggacgtggtgatttttaatttatacagtaacttttgtacttctctggtatggagagtttggagccgaatgatttgcattttttacatgtccgacattatttaataaataatttttaaaagaaaagaacgataaatgaagccaacatgattttctcatttcgggaggaactctgttgcttcgcctggacaagaaggaaaatgctgatttcctccttgggtagaaagagggagcgagggcaaatggggagtagagagaaaacaggcgagaacaagcactctaattccagtgggctttaaaataagacaaaatcagctttacaacaatccctagaggctcgaccacagaataatgccagtcaccaccctgaacgcacaatctccagtgcaggatctaatgactgtacatattaatcgttagtattattattgttattatgttgttctgtaaacatgttgcacaagcttagcctttttgcgttctgttgtgtgtggctgtaaaaccccatgctttgtgaaatgagaatcttgacatttttcttgtgaaatttggaaaatgtgatcaattgaaatcaactgtgttttgtgttctctatgtcaaagtttagttttatattgagaatgttaacttattgctttgtatcttgggaaaaaaactttgtaaataagttataaagtttctttgagacagtaaaattatgatttcttgaaaaaa

SEQ ID NO: 354620 - DNA, 570 bp, Homo Sapiens
  misc_feature (324)..(378): n is a, c, g, or t
  misc_feature (412)..(455): n is a, c, g, or t
tttaattgtaatgatagagaaaaaaacaaggaaaactatttaatgaaagcacgatatttatctttggtaaatgactttagagcagttaaagacattgcttaaaaaactcagaatcagaaaaaacactgaattatttaagaacacatatattttaaagtataacatatttattataatttatttgcacccttgggaagattgctttggcattctgccttgattccttctcattgatgtccaggtcatctggaggccgggggttctcagacctaccagtttccctttagaagaacaaatttccagttcctctagggcctcctgccnnnnnnnnnnnnnnnnnnnnnnnnnnnnnnnnnnnnnnnnnnnnnnnnnnnnnnnctcttgactcctccttttaggatgtccagatgtnnnnnnnnnnnnnnnnnnnnnnnnnnnnnnnnnnnnnnnnnnnncagctgcagttcagtacaactgctcttttcacactcaactccctaaaactccttgtaaccttctgtaactattggatgacgctttctccagcttagccctaaataaagcacagtt

SEQ ID NO: 354621 - DNA, 521 bp, Homo Sapiens
  misc_feature (340)..(340): n is a, c, g, or t
  misc_feature (364)..(364): n is a, c, g, or t
  misc_feature (379)..(379): n is a, c, g, or t
  misc_feature (480)..(480): n is a, c, g, or t
  misc_feature (504)..(504): n is a, c, g, or t
actacatacttccgaggataaccgaaggaaagtaaacataatgcttctgaacgggcaaagactggaactgacctgtgataccaaaactatatgtaaagatgtgtttgatatggttgtggcacatattggcttagtagagcatcatttgtttgctttagctaccctcaaagataatgaatatttctttgttgatcctgacttaaaattaaccaaagtggccccagagggatggaaagaagaaccaaagaaaaagaccaaagccactgttaattttactttgtttttcagaattaaattttttatggatgatgttagtctaatacagtgagtacacaagagnttctcttttgctctttttggacantggtcttttgacccnttagcttactgatactgaattacttgattccaatcaatgataatgtctgctttatcataaaagtaatatttctttcaacacagtttatctaatccttatgncttaaaagcttaataataagcttnggtaataaactcatggg

SEQ ID NO: 354622 - DNA, 1114 bp, Homo Sapiens
ggggaacacagaaaatattattgatgttctagcagcagccagctatatgcaaatgttcagtgttgccagcacctgctcagagttcatgaaatcaagcattttatggaatacacccaacagccaacctgaaaagggtctagatgctggacaagaaaataattctaactgcgaattttacttctcgagatgggagcatttctcccgtgtcctcagagtgcagtgtggtagaaagaaccattcctgtctgccgagaaacccggagaaagcgcaaaagctacattgttatgtctcctgaaaagtcctgtaaagtgtggcacacaaacaagctcaccccagggtattgaattctctcagcttcctactcagaaaatagaaaacaagccagtttgactcctcccttagcttttccttggacttttccttgttggaatggatcgaaggattcagcctgagaaagttaagcaagcagaaaatacccggactttagaattacctggcccatctgagaccggtagaagaatggctgattatgtgacttgtgagagcacaaaaactaccttgcctttaggtaccgaagaagatgtccgggtcaaagtagaaagattaagtgatgaggaggtccatgaggaagtgtcccagcctgtcagtgcatctcagagttcgctgagtgatcagcagacagttccaggaagtgaacaagtccaagaggaccttctgattagtccacagtcttcctctataggctcagtagatgaaggcgtttctgagggcttgcctacacttcaaagcacgtctagcactaatgctcctccggatgatgatgatcgattggaaaatgttcagtatccctaccaactctacattgctccttccaccagcagtacagagcgaccaagtccaaatggtcccgacagaccttttcagtgtccaacctgcggggtgcgattcacccgtattcagaacctaaagcagcacatgctcatccactcaggaattaaaccatttcagtgtgaccgctgtgggaaaaagttcaccagggcttactcgctaaagatgcatcgcctaaagcatgaagtgatttcctagtaccggactacttaaaccaggaacaaga

SEQ ID NO: 354623 - DNA, 340 bp, Homo Sapiens
  misc_feature (328)..(328): n is a, c, g, or t
accagtccagtgtggtattgaggtccataagcaccctcatctcagagaatttggattctataaaccatgactgtctcagcatccctccgctggtttcatataatacagcctattctcacctataaacaaggttctacatacttcttagagtcaaatgtgctttatttctcaatgattcaagtcccaagcttactcccaaacccagcaaccttaggaaaatactgtgcgttattcaataaaaaaggatagtagagacattaaaaattttagcttgcattaccaatcattaaggatttgttggctgcctactgcatgcaaggcagccaanccgtggactagt

SEQ ID NO: 354624 - DNA, 1817 bp, Homo Sapiens
  misc_feature (1731)..(1767): n is a, c, g, or t
atccttcagctccctaagccggcaccacagcatctggttaagagtggccccagccatgacctgctccaggcggacctggtccgcaatacgccgagggatggcgcgtttctccaccgctctccggagcagggtttctagccgtaacacataggctgagaccttctctccttcctcctgataggtcttcagatacctcacctgggctgtcctgcggctctctaggctcccaaacacttgcttaaaggcctccaaacactcttctacactgatggacgggttgtctgcctgcactatgtgcatgaggtccagggcagggccccgcaggctttccgccagccaccttttcttttctgcctctgttactggccactctttgactatctccgtggcctgttccaaccagacctcaaaggactcttcctctggggctgggacagcactccctgagaatactcgcagtttccggtatctcatgggtagcaggggctgaggcgcatgtgccattgcctgtcccaacaaatgggccagtaattctggtgagatgcagggcactgtggctggagacacgccctcctgccccagggctcgaaacatacccgagaccgtctgcccctctttttctagaaacaggttcaatctttcaagaaactcagtgtcctgattaggggtcttaaagatcaccttccagacacccccctttccctggacctcactgggaatggccgagacatcagtatcttccagaagctctagtaagacagcattggcattctcctgcttccggaatatcttgccaagcagtctatacctgcccagagactttaaagtctcctgaaggacctcctgaatctcagcctctctcaaagtccgccggtatccccgtaaccatcagtgacttctgctcatccacactcattatcctgcaccagtcctctaacagtgccagcgccattgtcctaagaattgacccactctgactctacaggcaccaatttgttagtggtgcagctatgcactgacttaatattgaaaatatcctggatgagcttctaaccttagaacccaccaatgaatgggtcccagactaggtcactcaaagacagtcacaaagttttctggacaaatgaccctggcctactcagtggcaagaactcaggacttcttgtctttaggcctgacccaggtgggcaggtcgtatctcagttctaaccacacctgtgcccgcagctctgaagtccgattgccagtgattttctcaaagatgctggcagccacgtgacgctgacccttctctgatagttgaggcacctgggacagctgctttctccacagcctcctggtctctgatgtttcgtctctctccagttgatgggaaaatgccttccactctgggacccagaactcttgaagagaagcctcccagcagggcggcttggacccctgttgatgtgttcccgagtgttccgcgagaggtgaggagcttatttattcaccttttagcacaggaagacatcacccacctccacacagtggtgtgtctggctcttagctccagccaagccaagctgctccaggcgcggagagcggtcagcgggccctccgctccgcatccattagctggtggtctggccgcttcacttccggagcgcggggctaggggcggtgccgccctcccctctctctctcctccccgctctcgacgaattcgagctcggccgatttggcctgatnnnnnnnnnnnnnnnnnnnnnnnnnnnnnnnnnnnnncgccgccaccgcgaaaagccgcattcgcccagtaaggtagcggtcaatga

SEQ ID NO: 354625 - DNA, 374 bp, Homo Sapiens
  misc_feature (18)..(18): n is a, c, g, or t
  misc_feature (32)..(32): n is a, c, g, or t
  misc_feature (35)..(35): n is a, c, g, or t
  misc_feature (53)..(63): n is a, c, g, or t
  misc_feature (87)..(87): n is a, c, g, or t
cccaaaatctatctgagntccattagtagcanatnagatataaacactggttnnnnnnnnnnngtcagtgaacccccaaacacaatncccacaaagtcacatacacataacattacgtgagatggaaaaacatggatttcctcaatgtaccttgtgtaccaggaaaccttcattagtgaatacatattgaactttccctgccatcacagctctgtatcacattctcatgtatttcaatttaatatttagaagcctttaaagggagggaaagactaaggagaaaggaaaaaataagaagcagtcctctccccctgctgtctgcagcccctccccggctgggattacaaccacacccagcctgcattttcatttta

SEQ ID NO: 354626 - DNA, 795 bp, Homo Sapiens
ggtatttgataattaagattaggaatctaataacacagaattccatattgctatagtacttctgtaaagagaatatcaatataaataaggaaaataaatcaatgaaatgtttcaatgatatatgcaactattcagttttgctcttataaggacagctcaagccatgaattagtgagcattctgacctcatttttactttacaccaaagttgattagatctgagacaaaatttaatgcacaacagtgagttggatctagcaataaagtctccttggtactgaaatcattatctaaaataaaggaaatgttatcaaaagatgttctgataacattgtgattgtaactcaaaaaaatttatagtagaaacgtaattgcaatgatgataataactaactctgcttagaggttcaaatatcaccagcaatcagtaaaaaattcagcaataatcttaaggccagagagaacaggttcaccattgcatagacaagaaaacagatatgggttaagagttggggactgaggagtcaagagcaacggccacgtgaagctgcctgactccacctagctatttggaataaccgattcccacagttttggtaagaaaccaggcccagtaatcagtaagtcaggctgaactgcagtgactttattttaagcctactcctgactaacttggcatttgcaggtcaagcaggaagcagtgacaagacacatcctcagtgaatcatgcccatttgtaactcaatggtaacaaagtaatcatacaaaataaaacctgttcagagtctaatgacc

SEQ ID NO: 354627 - DNA, 827 bp, Homo Sapiens
  misc_feature (259)..(259): n is a, c, g, or t
  misc_feature (265)..(265): n is a, c, g, or t
  misc_feature (343)..(343): n is a, c, g, or t
ggttgtttttagggtccatttccattgaaaaattggcaatagcaacaaatattagatgaagggctttgtgtttacagataaaatcttttgtgttgcagtatactgtagtgtttgcaaaattggaaaagatttaatcaaaataaggtgatacacatgcatcaaaatattagtattctgaagaaaaaaatttttcacagaactacagaattcctcattttgggaattatttaaatttgcagcagattttaaagatttgttntgtttntaaatcaagctagcagttttgcatatacaaacattataattgctaatatacaagaatcagtgaagagtcaccccccancccagaatccctccctcctcttctagggtgaagtcacttgagacccctatttgttaaatgcatttgcaatattctgtttgtgttctaagaggcagtgccttatcaacattttattctatttttctgttagaatttatacagtgttattatttacagcaaaactatcgatgttttaaaaaagaaacaaatagtgtttataccctgacagtttgggtccaagaaaaataaggcgagctgttgtagatttagtaattttagtgtttctctgtgatttgatcattccatctccttctgtcccttctgatggcaggaatttcttccttttgtaaatgacaccaaattacttgagataaactgttaacagcatggcttcttgtatatacactgcattgctaattgcacacgcgccaatccggaaatgaaagtgatttccatgctctgtaaattggctcatgctaaattaaaatgtgggtggttatctttt

SEQ ID NO: 354628 - DNA, 1809 bp, Homo Sapiens
  misc_feature (334)..(334): n is a, c, g, or t
  misc_feature (411)..(411): n is a, c, g, or t
  misc_feature (1426)..(1426): n is a, c, g, or t
ggaccggtccggaattcccgggaaagactgtgagctagcttaaaaaagagagaatgaaggggaagaaacaaaacccctgtgtggcagagtgtcgagatgagatgagcatttatttgtctccgtcgaattccttacggagataaggtgcagctgcaggggatgacaccgaagatacaagcactgagttcactgacagtattgaggaggaggctgcacaccatagtcaccagcaactatagcttcagaagcatttttacttgcaagacgatggacacattccccttgggctttttgtaactgaaatgcaccacagaagaccagggagtcatcgaangggctgctcggggaggtggcagggcggaggaaactgcttgggaagaaacctccaaggaagattgggaatgccttccnaaagcaagaatctttctcagtgaaatctcattatacaaagagaaccttatgcaacctgacaaaccactgaggtcatggtgactcagtgatcagcagatggtacttcaacagcaatcccctgtcaaacctcagaacttgaggctgaaacattgcttccacccaccatcagtgaagatgtaactagcatgttacaagagtgaataatctggacttcagagattaagtcaccaatagtgatctcacaagtactcaccggaactcctataatgtctccactttgtccatgccatttagcaatctcatctcctaaatggactgtgcctatgattcttaaggagaaagtgaatcattggtagatatcctgcacaagcagctggactttccagtaatagctttcttggggctattagggaaaattaaacaagaaatgagggctttctgggtctgcctgtatgtcttctgcataagaaaaagaagagacatcgaatcaaccaataagaagagcccaaataagcatcctcaaatcttttggggatttggcacttgggggacatgagtagttgtctgggatacgtcatattctcaacagtttctttgtagtagtaggatcaccttcttataataggatcaccttcttgttgctatagctgtacccgaccttcccttctcccttgagtgcttgcatgagctccacttttccttttgcttgaacagcttctcctgagtcctccttaccgatggttgtgactttaattatatacaatctctgttccctcccagacagaatcccctctgtccttcacctctcttgattttcatctgatggatccttggggtgaagaagacaaagggaccctgaccaggaatggaaaccaaattgttcttaaccttctataggaaccagactaaaaattttgagggaaacggttttggacttgagttaaacctggaagggagcttccacacaactgagaccttgttgtgcggtaacatgtggtcatttatcaacactttntccctataaatatatgtactattgatataccagtgggaaggaaccaagtcacacaatgtctgcgaaaacgaaaaaagtctattatctggaactctggaattacctcgggttcttgtaaaattataatcttccctaggcatcattttgtccactgttgctatttttggctacattaagtattcttcctaatatcggttagagctcaaacacttgacctttctatcacaatctatggcccttaactcctccacccacttccttttaccttgcaagcccttaacgattgggaatacatactctatacccccaacccccacactctttcaacaaagcgtgaagccctctacccatacccaccgaatctctctacacttcatggctag

SEQ ID NO: 354629 - DNA, 698 bp, Homo Sapiens
tgttcatcaggatgcagggcagtttctcctttgtgcaataggctgggaagtcctttgacaagatgtctgcatactgcatcagcaccttcccgatggtcttagcaaacctcctcatgtagtgggcaaggatgctggggtctgggcattccagcttccggatgatctcaaagctctgattgagttgtgtgaagacatccaccacagagcaggaaaagagtgcatgctctgatgtctgctggaatccatccttcttatctcgttccagggccccacgcaggaattccagggatacatcctcattctcatccagccattgtagcacgaactgctcaaaccacgctgggtactcaggcacctgcccctggaggacaggcagatcccgcacgtattcattgtggagccacttcaccttgaagtgcaggttcatgtagtcagcacttttacacaggtggtctttctcatgctcctccaatgcatatttcatgtcttgggcaaacaaatgccacatcacttctgcgctgacttttcccacattcaactcctgaggaaactggttcagaacaggtgtgtaggaattcttatcttcctctatgattgacacgatgagtgtgatgagcttgggccagaaatccaggttccgaatgctgggcccttgttcctctggaggtagctccaatgagcttgcagacgtgggatcc

SEQ ID NO: 354630 - DNA, 1887 bp, Homo Sapiens
  misc_feature (306)..(306): n is a, c, g, or t
tcttctcccctgacacctcccaggtggttcaacaattccacttccaaacagcatttcccatcagtttttaaaagctatttacaaagtgttattctactaccacttttaaatacatcaagcacttccaaatatctagaaagactagatatttcatataacttgtccaccacatacacagcactagttaaataaaattgcacacacataacaatggttatcatctgaggtatcttctaaatgtggccattttggccttgaatcattccctcctcccttccttctctgccttcaatccagtggacaagnacaggcacgtgtaatgcttagagatggtcaaacaaattcctatgcaaaagacttgacagaagacagagttttcctacgaatttcaacacaacagggtacaaaatatgctaattttactaccttgtacatacactggcaacctctttaacatctagagactagatgttgaaaaattaggactatttgtccattatatatactatatacagagcaaaacaaaatgcacaaaacatatagaaaaatggtgtctgaaaatgtccaaagtatgaacacactagtaatattaccttaagcaatttcatccctcctacctcctctaaactattgaacaagtatagacattactatactgttcacaaaggtggcttcacaattcaatttccaaaagcatttcctatgaattttagcaaaaagatatttacaaagtggtattttactacctatacatttaacatacatcgggcacttctaaacatctagatagactagatgtttcaagtaaggagttaatttgtctactatgtatacagcagtcttgaataaactgcaaacatgtaacaacagttataatttgaaagagtcttccaaatgtgaacattctggcctagaacccttcccatctccatcaacccagaagacatcaaattttcagaagacaatctttcctaggacttgtaaaacaaaatgtacaaaatatattagtttactaactctacttttgtcatacactggcaacctctttaacatccagaaagactagatgttgtcaattaggactcgtctgtcctttatgtacactatatacacagataagtaaaacaaaatgcacagacataatgattcatcttgcctcgctgtaaacaggatggcatagagctctctgcacctccccctcctctctcctcccctgaaccactgcacaaacacaatgagtattactcaacaggtgatttggccattcccccccaaaaatatttcctatgaattgtaacaaaaaggtatttacaaaatgtgattttgctacctctaattttaacatatcaggcacttcagaacatctaaaaagaagagacatttcaaaaaagcttagcattgtcaaccatatacacagtagtgaggaataaaatgcacacaaaacaatggagagaatatgaaaatgtcttctaaatatgaccagtctagcacagaaccttcttctcttccttctcaggtcttccagctccatgtcatctaacccacttaacaaacgtggacgtatcgcttccagaggccgtcttaacaactccatttccaaaagtcatctccagaagacatgtattttctatgatttcttttaaacaaatgagaatttacaagatgtgtaactttctaactttatcatacatcagcaacctctttccatctagctcatagaagggctagatgtggcaaatgttttctattaaaaggtttgggtagtgttgagagcagctgtttcatattaaatacacaggccttccataaacggccagtaaatcttccccaagggtggtgggcatttccaagaggccagacgtggcttgtcattccaccatttctctc

SEQ ID NO: 354631 - DNA, 857 bp, Homo Sapiens
tctctcttcatcacacacataagtccgttctggtaagataaagtttgtgccaacagttgaaatgcaattgttcacatcacgaggtacatagtagaattggtttacccattgtgtaccaagtcaactgtaggggaacgagacttcgtcacctattttcgacatacggcgttcggtctttagattccccctttgccctagtccccgacgtttggaagtgaggtacgcttaagaggtagcagcttcagaggtctgcgtttcagcacctgggtcagcgcttcccagggtcagcaccagggatagacgccattgtcgcttcgtgcccagacaactacccagattttgtaattttcttgaatgccaagtaagaactcacctgaactgtgaccgactgcgcttatcatgggggaaaaaaaaagttagaagggaattctagcctttgataattttctcaagagcttcgggacctgagggaccccagaaaagcaccaaaaactctttagaaggactgagcatcccttacgtccaaaccaatggggcaggagcaaggcttagggagggctggagaatccgggagacgtcgagggagtctccttacctgcttccccgcggcagcagccagggacttctgcagaaactgacggagtctggggtccgagggagcgccggtgacacagcccagggccaggacgatggaacagcgcagccagcgcgcactggaggcggcaggacagcatctcggcgccgcgaaagccgagctggagagtggctggtcaaactctaggcgcggatcagcaggcagcagcgatggctccgaacctcgctcctaaagcggcttgtgtgctctcaaccgtctccct

SEQ ID NO: 354632 - DNA, 624 bp, Homo Sapiens
agcggactagccgctttaggagcgaggttcggagccatcgctgctgcctgctgatccgcgcctagagtttgaccagccactctccagctcggctttcgcggcgccgagatgctgtcctgccgcctccagtgcgcgctggctgcgctgtccatcgtcctggccctgggctgtgtcaccggcgctccctcggaccccagactccgtcagtttctgcagaagtccctggctgctgccgcggggaagcaggaactggccaagtacttcttggcagagctgctgtctgaacccaaccagacggagaatgatgccctggaacctgaagatctgtcccaggctgctgagcaggatgaaatgaggcttgagctgcagagatctgctaactcaaacccggctatggcaccccgagaacgcaaagctggctgcaagaatttcttctggaagactttcacatcctgttagctttcttaactagtattgtccatatcagacctctgatccctcgcccccacaccccatctctcttccctaatcctccaagtcttcagcgagacccttgcattagaaactgaaaactgtaaatacaaaataaaattatggtgaaattatgaaaaatgtgaatttgaa

SEQ ID NO: 354633 - DNA, 618 bp, Homo Sapiens
  misc_feature (212)..(212): n is a, c, g, or t
taagtctacagggacagaaagggttgcagaaacatttgagctcttaaagcctttttgtgtaacttggtaattatagcaactatccttatttttatatccttgattgattttaaatgtgacaaaaaatgcgcagctgtaaaaactggattttgtgtgtgaccaaatctgttctttaatttaggcttttcaaatttttcccattgtcctccccnacttctctttctctctttttctatcccttctgccctatacaggaactggccaagtacttcttggcagagctgctgtctgaacccaaccagacggagaatgatgcccctggaacctgaagatctgtccccaggctgctgagcaggatgaaatgaggcttgagctgcagagatctgctaactcaaacccggctatggcaccccgagaaacgcaaagctggctgcaagaatttcttctggaagactttcacatcctgttagctttcttaactagtattgtccatatcagacctctgatccctcgcccccacaccccatctctcttccctaatcctccaagtcttcagcgagacccttgcattagaaactgaaaactgtaaatacaaaataaaattatggtgaaattatg

SEQ ID NO: 354634 - DNA, 349 bp, Homo Sapiens
  misc_feature (94)..(94): n is a, c, g, or t
  misc_feature (159)..(159): n is a, c, g, or t
catgattttgactccctttgtaatctccctcacagcatatgctgccatatcaggcaggactgggctgagggactatgagcctctactcattatnggaacagcacatacagcctacatgcagtgcaatactgagagctgtatcctgcatgagtacaaagnccaggttgctcagtaaatatcagctattcttaaacttgttcagcaagttgctgtcagtgtcatcaaatgaatgataaaggaacatgaaataataagacagggatttttcagcagcagcaggaaaatatatcatgactagacaagtaatttttaaattctttacttggtagtactttgatgtaaaaagatg

SEQ ID NO: 354635 - DNA, 601 bp, Homo Sapiens
  misc_feature (20)..(20): n is a, c, g, or t
  misc_feature (60)..(60): n is a, c, g, or t
  misc_feature (96)..(96): n is a, c, g, or t
  misc_feature (104)..(104): n is a, c, g, or t
  misc_feature (124)..(124): n is a, c, g, or t
ccccattttataaatagacncttgataagtaacctatgtaggatcaaaatctgagaatgncctaattggggattgacctggtctaatccaaagtcnagctacancaacccaacctctacccccnactccaagcttgtgagtaaaaaaacaagtgtcacttctctccttctcttttttctgtcctaaaggaagctgggagctaaccacttaggactagtactaatctttcagagaaagggatgaggggagccttgttatttctgtggggttcagctctcagaccagagtaagacaggcaacaaggttgaggagtagccatatgcagaaataacctgtgtatctagccacaggatctccaacactgtgtcactcgggaatcaaaatacagagacagttcctcaatagagtgtggatctagcccagaatgtggacaaggggagtggagaaggggagaggtacacactgagcattgtaacaaggcctgtcctcaagcttgaggaggattaggaagatggcttgagtctgggagtaggaggctgcagtgagctatgattgtaccactgtaccccagcctaggtgacagagtgagaccctgtctctt

SEQ ID NO: 354636 - DNA, 1058 bp, Homo Sapiens
cctcctcctcccccgcccagcgtgggccccctggcacagcccgtgtgtaccccgcaagcccaggctctctccgcgcccccctccaccccggccgcgcccaagcgcaggggctcctcgggctcagtggatgagaccctttttgctcttcccgctgcatctgagcctgtgatacgctcctctgcagaaaatatggacttgaaggagcagccaggtaacactatttcggctggtcaagaggatttcccatctgtcctgcttgaaactgctgcttctcttccttctctgtctcctctttcagccgcttctttcaaagaacatgaataccttggtaatttgtcaacagtattacccactgaaggaacacttcaagaaaatgtcagtgaagcttctaaaaaggtctcagaaaaggcaaaaactctactcatagatagagatttaacagagttttcagaattagaatactcagaaatgggatcatcgttcagtgtctctccaaaagcagaatctgccgtaatagtagcaaatcctagggaagaaataatcgtgaaaaataaagatgaagaagagaagttagttagtaataacatccttcataatcaacaagagttacctacagctcttactaaattggttaaagaggatgaagttgtgtcttcagaaaaagcaaaagacagttttaatgaaaagagagttgcagtggaagctcctatgagggaggaatatgcagacttcaaaccatttgagcgagtatgggaagtgaaagatagtaaggaagatagtgatatgttggctgctggaggtaaaatcgagagcaacttggaaagtaaagtggataaaaaatgttttgcagatagccttgagcaaactaatcacgaaaaagatagtgagagtagtaatgatgatacttctttccccagtacgccagaaggtataaaggatcgttcaggagcatatatcacatgtgctccctttaacccagcagcaactgagagcattgcaacaaacatttttcctttgttaggagatcctacttcagaaaataagaccgatgaaaaaaa

SEQ ID NO: 354637 - DNA, 1278 bp, Homo Sapiens
ctctgtaatggccgatgagaaacatatcaagacgggttcttcccctaattctgtttcttcttctcctactaattcagccattacccagttaagaaacaagttggagaatggaaaaccacttagtatgtctgaacagacaggcttacttaaaattaaaacagaaccactagacttcaatgactataaagttcttatggctacacacgggtttagtggcactagtccctttatgaatggtgggcttggagccaccagccctttaggagttcatccatctgctcagagtccaatgcagcacttaggtgtagggatggaagcccctttacttgggtttcccaccatgaatagtaatttaagtgaggtacaaaaggttctacagattgtggacaatactgtttccaggcaaaaaaatggactgcaaggctgaagaaatttcaaagttgaaaggttatcacatgaaggatccatgctctcaacctgaggaacaaggagttacttctcctaatattccgcctgtcggtcttccggtagtgagtcataatggtgccactaaaagtattattgactatacgttggaaaaagtcaatgaagccaaagcttgcctccagagcttgactactgactcaaggagacagatcagtaatataaagaaagagaagctacgtactttaatagatttggtcactgatgacaaaatgattgagaaccacaacatatccactccattttcatgccagttctgtaaagaaagttttcctggccccatccctttgcatcagcatgaacgttacctttgtaagatgaatgaagagatcaaggcggtcctgcagcctcatgaaaacatagtccccaacaaagccggagtttttgttgataataaagccctcctcttgtcatctgtactttctgagaaaggaatgacaagccccatcaacccatacaaggaccacatgtctgtactcaaagcatactatgctatgaacatggagcccaactccgatgaactgctgaaaatttccattgctgtgggccttcctcaggaatttgtgaaggaatggtttgaacaacgaaaagtctaccagtactcaaattccaggtccccatccctggaaagaagctccaagccgttagctcccaacagtaaccctcccacaaaagactctttattacccaggtctcctgtaaaacctatggactccataacatcaccatctatagcagaactccacaacagtgttacgaattgtgatcctcctctcaggcttcagtgccaccagg

SEQ ID NO: 354638 - DNA, 1034 bp, Homo Sapiens
  misc_feature (897)..(897): n is a, c, g, or t
tggaccggtccggaattcccgggatccaggggcatctttgactcagataagagatgcccgatcaaatcaaggagggccatccgcgtacgcagccactccatggagaccatggtgggcggccagaagaagtcgcacagtgggggcatccctggcagcctcagcgggggcatctcccacaacagcatggaggtcaccaagaccaccttctcgcctccagtggtggcggcaacggtgaagaaccagtcacggagtcccatcaagcgacgctcggggctcttcccccgcctgcacacgggctcacaaggccagggcgacagccgggcacgatgtgacagcacatccagcacacccaagaccccagatggtggacactcctctcaggagataaagtctgagacctcatccaatcccagctctccagaaatctgccccaacaaggagaagcccttcatgaagttgaaggaaaacggccgcgccatctcccgctcctcctccagcaccagcagcgtcagcagcactgcaggggagggcgaggccatggaggagggcgacagtgggggcagccagccgtccacgacctcacccttcaagcaggaggtgtttgtctacagcccgtccccgagcagcgagagccccagcctgggggcagctgccaccccgatcatcatgagccggagtcccacagatgccaaaagcagaaactccccgagatcgaacctgaaattccgctttgacaagctcagccatgccagctctggtgcgggtcactaatgtgaaagtggagtccttcgcctgtccaagggaatcccctcttctgtcctggaaaaagctcctgtaccagcagtttgggagtgcccgccacgaccctgacagtcccagccctgctgccccatggcncacgtggcccacaaatgtgctggttggaccaggtgtcccaggtctggccacaggccctggcttcgcccctcacctaaatggccttaccaggcccctcccatctctgggagaaggcctcccttccctcgggttcctcg

SEQ ID NO: 354639 - DNA, 893 bp, Homo Sapiens
gggggtgaagcggtgctgttggatgtgggtgtggggaacaggcgctgtgggagcctgcgctgcgttaggggcctgggaggccgtgggggagccctgtgggggaactgcagtggcagagggcgtgggcctggcgtgggcagctgaggggtccctggaggagctgaggagggagctggggtgaccccagtgggagcctgcaaggctggcgggctgggcctgcagcatctgctgctgggctgacgagtccgagtcactctcattgtcctgggggctggggatgctcggggacgtgctgcgattgtcctggtcgatgtctttggggtcactgctaccctcatcgttgacgctgcgactgtctgaactctctccctcaccttcagatggcgagttgggcctgctgatctcctgcgtttttgtcttcttggagctggtcctgtcagcctcctccgtatcagaggccaacttctcccgctggcgtttgttactcttaagaggggaagaggcttcctccttcaccttcttggccgacttcttcactgtctctgctttactgtcattgctggaggtactggcagcgctgggggaggttccggccgctggagcggatgtcttcattgatgggtgaggtgcgaccatcagggctggctggctggcttcttccgaccactgcgtagtgtcgacatcgaacccgactccgcgtgtctcatgctatgcttccatgagcccatcatcctcttccttgacgggtttgaacataaacggtggcgggtcacgggcttctcatgggcgggagctcaccgtattctgaagtggtgcgacagtcggtgcaaacacgatgtctcccggctcgggtgccatctttggacttgctgcaacgggggcgtacccttacg

SEQ ID NO: 354640 - DNA, 1404 bp, Homo Sapiens
  misc_feature (1348)..(1348): n is a, c, g, or t
cggtccggaattctccggatctggtccacactcccaggcctgttgcagatctccaactcctgctttgtgtgaccccccagcatgctctctgccggtggcatcacagccaccacagcatctttctgaagccgggagagggcctgtagggagtaagagggaccatctcctcatgaacgtcaaatggtactaccgtcaatctgaggttccagattctgtgtatcagcatttggttcaggatcgacataatgaaaatgactctggaagagaacttgtcattacagacccagtgatcaagaaccgagagctcttcatttctgattacgttgacacttaccatgctgctgcccttagaggcgaagtgtaacatctcccatttttctgacatatttgctgctagagagtttaaagcccgagtggattcatttttctacatattaggatataaccctgagacaaggaggctgaacagtacccagggggagattcgtgtcggtcctagtcatcaggccaaacttccagatctgcaaccatttccttctccagatggtgatacagtgacccaacatgaggaactggtctggatgcctggagttaacgactgtgacctccttatgtacttgagggcagcaaggagcatggcggcatttgcaggaatgtgtgatggaggctctacagaggacggctgtgtcgcagcctctcgggatgacaccactctgaatgcactgaacacactgcatgaaagcggttacgatgctggcaaagccctgcagcgcctggtgaagaagcctgtgcccaagctcatcgagaagtgctggaccgaggacgaagtgaaacgcttcgttaagggactcaggcagtacgggaagaacttcttcagaattagaaaggagctgcttcccaataaggaaacaggggagctgatcaccttctattactattggaagaagacccccgaagcagccagctcccgagcccatcgtaggcaccgcaggcaggccgtgttcaggaggattaagactcgcaccgcgtccacacccgtcaacacaccctccagacccccgtccagtgaattcttggacctaagttcagccagtgaagatgacttcgacagtgaggacagtgagcaggagctgaaggggtacgcctgccgccactgcttcaccaccacctccaaagattggcaccacggaggccgggagaacatcctgctttgcaccgactgtcgcatccacttcaagaaatacggtgagctcccgcccattgagaagcccgtgggacccgccaccgtttatgttcaaacccgtcaaggaagaggatgatgggctcagtggggagcatagcatgaggnacacggcggagtcgggggctcgatgtccacacctacccagtggccggaagaaccaa

SEQ ID NO: 354641 - DNA, 883 bp, Homo Sapiens
  misc_feature (205)..(320): n is a, c, g, or t
  misc_feature (327)..(381): n is a, c, g, or t
  misc_feature (439)..(834): n is a, c, g, or t
ggatgaaaaagccagttagtcccagaaaaaggaaaaactgtaccaaagccagaaggacccatcacaacagtggcctcacacaatatcccaagatgaaaaggggattcactgcagttagtagacacacacaaaaccaagcagaaatgggatacaataaaataacaaattagctgaatgttccaaatgagagcttattgcatactcnnnnnnnnnnnnnnnnnnnnnnnnnnnnnnnnnnnnnnnnnnnnnnnnnnnnnnnnnnnnnnnnnnnnnnnnnnnnnnnnnnnnnnnnnnnnnnnnnnnnnnnnnnnnnnnnnnnntataaannnnnnnnnnnnnnnnnnnnnnnnnnnnnnnnnnnnnnnnnnnnnnnnnnnnnnncaattataacctaaaaaaacccaagccatacagagatagaaactaaaggaacacagtnnnnnnnnnnnnnnnnnnnnnnnnnnnnnnnnnnnnnnnnnnnnnnnnnnnnnnnnnnnnnnnnnnnnnnnnnnnnnnnnnnnnnnnnnnnnnnnnnnnnnnnnnnnnnnnnnnnnnnnnnnnnnnnnnnnnnnnnnnnnnnnnnnnnnnnnnnnnnnnnnnnnnnnnnnnnnnnnnnnnnnnnnnnnnnnnnnnnnnnnnnnnnnnnnnnnnnnnnnnnnnnnnnnnnnnnnnnnnnnnnnnnnnnnnnnnnnnnnnnnnnnnnnnnnnnnnnnnnnnnnnnnnnnnnnnnnnnnnnnnnnnnnnnnnnnnnnnnnnnnnnnnnnnnnnnnnnnnnnnnnnnnnnnnnnnnnnnnnnnnnnnnnnnnnnnnnnnnnnnnnnnnnnnnnnnnnnnnctaaataacaggtaaacaaaaatttagtttaacaaaatttttggttttg

SEQ ID NO: 354642 - DNA, 1008 bp, Homo Sapiens
  misc_feature (321)..(321): n is a, c, g, or t
ggctccccgggtttaggagggacaagtaagtgggggcttgaagtcagattagagcaaaagtgaatggcagagagtactataatgtccatgaagggctgctagagtcaccgtgatcatagcccaagcagagatagggaaaggaagatgtgagcagagtttggggtctcgaacaatggaggttattcgtgcagcccaggaaaggctccccaaagccaggatcaacctcccttggaggcggtccctcatggaggcatggtcaggcaccttagatttgagaccagctatgtttctgctgaccagctgtgtgaccctgggctgttntccttccacacaatgggagtgccaatggctgcatgcatgcaaagaccgtctgaggataggaggaagcaatctgttgagcacccgtgtacctgagtgtcatcacctcccaagggcatccttcgttccagagctggcaccttggaaggcccttggtcactgaaggcagtgatgatggtaacagcagtaaatcatcatttacggctgatgagggaaggccacggggtagggctcctaggtcctggataagcaatgagggtctgggcactcctggggacagctgagtggtaggactcctgggtccccagggggcaggtccatcttcagtggcattgggcctaggctgggatgctgagttatccactggagcatcagcagtacaggcaggcacagaggcagtggatccatcggaggtggcaggtgtaggatcgtctggtgagcaagtagagtcaccaaatctggctgaccactacccccactacccccactatccccacagacgatgccctgtcccctgcctcatgctccggcagggtacaggctcgcacctggggcctcaaggagcatctctctaagacctctgtgtcctggtcattgaatgggcacttgagtcacccagggccattggaacaaagaggaagaatcaggccccacgatgttttgggagagtgtttagcacaatacatgcat

SEQ ID NO: 354643 - DNA, 335 bp, Homo Sapiens
  misc_feature (325)..(325): n is a, c, g, or t
ctcccaaagtgctgggattacaggcatgagccaccgcgcccagcctaatactaagcttctaatcttaatttcaaatatatccacattttttgttattctcatttattttcaggacatttttaatgaaaaatgtcataaacaaaaaaaggagcattataacactcagtactgaccactcagaattaacagttgctaaccttttttatattggctggagatctttttttaaaataaaataatacagatgtgatttgaagtcccttctccgtcttacccaatccctttcatttccctctccagaggtaattactaacatgaaataggnatatactctt

SEQ ID NO: 354644 - DNA, 716 bp, Homo Sapiens
ggatacaatattaagtccaaatccaacctcctgtcagtggagcagttatgttttatactctacagattttacaaataatgaggctgttccttgaaaatgtgttgttgctgtgtcctggaggagacatgagttccgagatgacccaatctgcctttgaatctggaggaaataggcagaaacaaaatgactgtagaacttattctctgtaggccaaatttcatttcagccacttctgcaggatccctactgccaacctggaatggagacttttatctacttctctctctctgaagatgtcaaatcgtggtttagatcaaatatatttcaagctataaaagcaggaggttatctgtgcagggggctggcatcatgtatttaggggcaagtaataatggaatgctactaagatactccatattcttccccgaatcacacagacagtttctgacaggcgcaactcctccattttcctcccgcaggtgagaaccctgtggagatgagtcagtgccatgactgagaaggaaccgacccctagttgagagcaccttgcagttccccgagaactttctgattcacagtctcattttgacagcatgaaatgtcctcttgaagcatagctttttaaatatctttttccttctactcctccctctgactctaagaattctctcttctggaatcgcgtgaacccaggaaacggacggtggcagtaagca

SEQ ID NO: 354645 - DNA, 1029 bp, Homo Sapiens
  misc_feature (35)..(35): n is a, c, g, or t
  misc_feature (188)..(188): n is a, c, g, or t
  misc_feature (203)..(203): n is a, c, g, or t
cggagcccgcggagcagaaagtagctctcgcagcngcaggcggaggacgggtcgacggctaacggacgaagaatggggcccggaccagctatagcactcggcctgacgaaggtcagcaggttgcacaacagctggcttagccgtcagaatcaaacgatgtccattccggacggggtctgtacagcggngttcttaccccaccnacatacgcccttaaagccacaatgctagattacctctcaatgagtgtagaaaatggatgtgatgaaagacagaaaagagcatgaggcctaaatgtgtgaatggcttgaggaatgaatgctctgactgaagaaagaatggcctgagatccgcacactccttccaccggcctgtagaggcagcagccgttgcccaaatgaggcagacgaacctagctttgaatctcagctctagctgattcactgggtggcactggacaaatcactcctgccacctgagcttgagcgtcttcatctgagataggaatagcagtccctacactgaggaggtattaaagctaggaggagccaggctaggccttctgtcaacattgatgcccggtgtctctggccacagaaacaggcctcagtggctgcagagaacagcgtcatctgcagcttcctgcactacatggagaagggtggcaaaggatggcacaaggcatggttcgtggtccctgaaaatgaacccttggtgctgtatatctacggagcccctcaggtatgcatcctactccttcgggtcctttcagccacctggcaaagccagatccagtccttgacctctccttggccttggaagataaggtgagccttggaagataaggtgagcctatctctaagaggaaatcagaaccccaacccttgagagacaaagactggctagagacaaggagtggttgtggtatgtagggaaaaccaggatgagttgtgggcctggcttcctggaaggagtagagatggggaactgctaggtccaatttggagtgggtaagagtatgcagatggg

SEQ ID NO: 354646 - DNA, 467 bp, Homo Sapiens
  misc_feature (212)..(277): n is a, c, g, or t
agacgctcaagctcaggtggcaggagtgatttgtccagtgccacccagtgaatcagctagagctgagattcaaagctaggttcgtctgcctcatttgggcaacggctgctgcctctacaggccagtggaaggagtgtgcggatctcaggcattctttcttcagtcagagcattcattcctcaagccattcacacatttaggcctcatgcttnnnnnnnnnnnnnnnnnnnnnnnnnnnnnnnnnnnnnnnnnnnnnnnnnnnnnnnnnnnnnnnnnngggggtatgtgggtggttaatgaagtctggcttagaatcccagctctagatgaaaatgtattgacttggagagcaaagagagctgatgtgagaattaaatgaattaatatatgcaaagtgcttagaatagttcctggcacagagtaagtactcttttaagtgttaaataaatacctagatttgtttttaa

SEQ ID NO: 354647 - DNA, 383 bp, Homo Sapiens
ctttcaaactgttgaactcaacaaacagggaagatgaagacaccccacccaactctccaaacgtggatcttgggaagcgggcacctacgcccatccgggaaaaggaagtcaccatgtgcatgcgctgccaggagcccttcaattctatcaccaaacgcaggcaccactgcaaggcctgcgggcatgtggtttgtgggaagtgctccgagttccgggcccgcctcgtctatgacaacaaccgctccaaccgtgtgtgcactgattgctatgtggccttgcacggggtgcctgggagcagtccagcctgcagccagcatacaccccagcgccggaggtccatcctggagaaacaggcctcagtggctgcagagaacagcgtcatc

SEQ ID NO: 354648 - DNA, 811 bp, Homo Sapiens
gtgggctcgttgtgggcgccatttctcggcgtctcccgaggagccgcccctttctcagccttgctcggctcttccccgctctggtcgccggggctgcgccgtccccagctcagtgacaaaaatgctgagtttcttccgtagaacactagggcgtcggtctatgcgtaaacatgcagagaaggaacgactccgagaagcacaacgcgccgccacacatattcctgcagctggagattctaagtccatcatcacgtgtcgggtgtcccttctggatggtactgatgttagtgtggacttgccaaaaaaagccaaaggacaagagttgtttgatcagattatgtaccacctggacctgattgaaagcgactattttggtctgagatttatggattcagcaccaagtagcacattggttggatggtacaaaaagcatcaaaaagcaagtaaaaattggttcaccctattgtctgcatcttcgagttaagttttattcctcagaaccaaataaccttcgtgaggagctaacccggtatttatttgttcttcagttaaaacaagatattctcagtggaaaattagactgtccctttgatacagcagtgcaattggcagcttataatctgcaagctgaacttggtgactatgatcttgctgagcatagtcctgaacttgtctcagagttcagattcgtgcctattcagactgaagagatggaaccggctatttttgagaaatggaaggaatacagaggtcaaacaccagcacaggctgaaccaattatctgaataagccaatgggtagaaatgtatgg

SEQ ID NO: 354649 - DNA, 1899 bp, Homo Sapiens
  misc_feature (1663)..(1663): n is a, c, g, or t
  misc_feature (1732)..(1732): n is a, c, g, or t
aattacctgctcagagacccccaccgtcagccagttggtgtccaagccacatactccaagtctggatgaggatgggatcaacttagaagagatccgggagtttgccaagaactttaagatccggcggctctcgctgggccttacacagacccaggtgggtcaggctctgactgcaacggaaggtccagcctacagccagtcagccatctgccggttcgagaagctagacatcacacccaagagtgcccagaagctaaagccggtgctgggaaaagtggctaaacgaagcttgaactgcggaaccagggaaggccagcagaacctgatggagtttgtgggaggcgagccctccaagaaacgcaaacgccgcacctccttcaccccccaggccatagaggctctcaatgcctattttgagaagaacccactgcccacaggccaggagatcactgaaattgctaaggagctcaactacgaccgtgaggtagtgcgggtctggttctgcaatcggcgccagacgctcaagaacaccagcaagctgaacgtctttcagatcccttagggctcagcccctggccctgtgttctagcactttgtccatttcccgtggcatccggctgcagccactgccatgacagcacctgtcattttgccacgtgcagctgtgctcaccccaggtcatcagactccaccgtgtgcatgtgcatcaatgtccctcttttctcccacacatctcacatcatggggaggccagagggggccacacgagagctccaggctctgggctggtcactccgaagaagaggatttgtgacgtcacttagagaagcaccttgctagcatggtttctgaagggtgaattctggtggggaaccagaaactccctgtctttggcgcagggctaaagcagctcctaaggaccactggccattagctcttgcttttgatggcattctctttccaccttgtcttctcctttgctcctctgtgttagtgtggcaggtatgacaactcatccagtggaaacacagcctcacactgcccttccgccccccacactttgcctgcaggtgcaccgaaaggacctgggagataaaattcaaaaaagtgtgatgtgctgctcagaaggtcagactccatgtctgccttgacctcaaggtcagaaggttcccaaacccctggggctggaacatgggatctcctcttccacctcttcctggttcctttgcggggaaaattgcactaaaacagaaccttttcttaatccatgttggaaggaagcaacagtgaactctacctgttctggagttctcctgggtctgcagaaggttgggaatttagaaaataaggctgttctttcatattttaatttaatctctgtcaatggccatccctcccacaaaaaaacgtgggttaagagaacttgcagactggatatgcaagcaaacgggcaactctggagaaaaataaggaaaggaatgctgactttctctttctttctcttgtccccacacccattcccaacccaatactggggccttctcaaaaggagcaaattaaacaataaaccagacagcaaggccctgggggaaaggacaacatcctgaaataaatgatggagcccaggaaggtctcttgtggaagttgacttaactctaatttnctttgtaactttaagccttggatacgggaggagaaatctcattttgtcgagtctcagaccatgtctgtntgtaagcaatccccacagtgtcctctgagccaaggacacccccagatcagattgagttttgcttctagacggggtagctatggtaccttgggggttagctctcatccaagctgttaagtgagtttccagcctcactgtggctggaaagcccctaaaattcagtatgt

SEQ ID NO: 354650 - DNA, 303 bp, Homo Sapiens
  misc_feature (50)..(50): n is a, c, g, or t
  misc_feature (179)..(179): n is a, c, g, or t
  misc_feature (184)..(184): n is a, c, g, or t
taaaattgagggcaaagaaacaactgtttcttacagaagaatttcaaatnacatatgtagatactccccagtacaagaagtgaagtttaattccttctacctgctagggcattctaggctttgtagcttatttccaaagaatagagaaaaaagcaggaaaagtgataggtttactaagnagaancctggcgaaagcccccttaccaaactgataaaggttaatgtcactgtaatgtcatctagatgtcacatacaccctgatataatgggatgcacctttgttgcatgatttcaaaaattcat

SEQ ID NO: 354651 - DNA, 835 bp, Homo Sapiens
ttatgggggctcacagatgcgctggacaaacgttgaccggttttctccagtaaagtatgacaaagtaaaccctggggatctcgagaagcgatctggcgcctttaaactgcacattccaaccgataactacgaagcaagcagtttcttacctggttcttattattaccgtctataatagcataagcattatgaatagagtacaaatccgattacaaacagcttcgtcatcgtgtggaggcggaagaagggtacaaacgcgattttcttattattcccaagcagccgaatcccaaactcggaaaacaaaagatcaccctcagaataagccgacacccaagtccccgcctccgcaggctgcgggtggagaggcaggcgccgccccaggatcggcgggagctgtgcttgagttctaggaactgatggagagacggacagacggtgacagactaccgctcggagaggcagtcatgcggccccggggctacacgagacctcacacacctccgggggaatttcagggaacaggggagatagatcagacgcgacctcagcacggcaccgaggacccacacacagacggaaaatagatccggactaccagacgagcaggacaccgagggggacaatggaggggcccaggaccagaggaatcacaccagggaggggggccagggatgcagccagaagggacaggacgagagagcaagagcgagaggataccggcagccaaagaagccccaatatgtgcagagacagagaaggggacacgaaggacaccgtggaaagattcagggactacccaagagaagggacaagaagcagcgcccggccaaag

SEQ ID NO: 354652 - DNA, 1369 bp, Homo Sapiens
gggaatggatggtgcagagcaaggaaatccatccactgccaatgaaaaagtagaaattacacaatcttagcagggaaaaaatagactcggggagaaagtgaatagaacctcaggcacctgtgaaactacctcaaaaggtctcactttcatgttgtcatctatgtctggaaggggaagaggaagaggacaagcctgaaaacataaagaagtaaacggctaaaagctacccagagttggcaaaagacataaacctacaggctcaagaagctgtgagaaccccaaataggaaaaaacccaaagaggtctatggcaagacacgtgaaaaaataaaatgttggaaactaaagacaaagaaaatatattgaaagcaacagagaaaggtgacaccttacctagaaaggaaaaacaattccgacgatgatggctttctcatcagaaaccacggaggcagaaagaagttgtgcagtgcttttcaagccgccagaaaaaaattgtcagcccagactcctctctccagcagaaacatctttcagggattaaggagaagatcaaaacagtttcagattaagaaaagctaaggacatctctgaccagcagttctaccctaaaagaagggctaaggggagttctctagacggaaaggaaatgattaaagaaggaaccttgggacatcggaaagaaagaaaacagcaaaataggccttccttctcctcatgagttttctaaactatgcttgacggtttcagaaaaaaatcatagcaccattcaatgtggttctaactctccataaagaaaatgtttgaaatggttataaactgggagggtaaagagacctacaagggaggtaactcgtctatcattcactcaaattggtaaaacaatgacaccagtataccgtgtggttaagatatagatgcacagatatacgaatgtctggaaaaaccaagagggctatacaaacagacatactcaaaagcactatggataaggcaaaacaccattctcaaagatgttcaagtcatgacaggaaggtaagaaaaagaaagcatatccagaaaacgaaaccagggagaacaaacagaaaaggaaaaataaaatggcagatttaagccctaccatgtcaatatcattaaatatcaatggcctaagtataccagttgcaagacacaggctggcagagtaggttaatggacacgaaccaactacatactggctacaaagagactaacttcaaatatgatgatacaggcaagttgaaatgaaaagggtgggaaaagatatatcatgcaaaccttagccaaaggaaagcaagactggctatattaatgccagatatagtatatttcagaacaaataaactaatcagaga

SEQ ID NO: 354653 - DNA, 737 bp, Homo Sapiens
  misc_feature (29)..(29): n is a, c, g, or t
aaattatggcaagactttgaagatagagnatgtctcctaccaggacaaaggaaattatcgctgcacagccagcaatttcttgggaacagccactcacgattttcacgttatagtagaagagcctcctcgctggacaaagaagcctcagagtgctgtgtatagcaccggaagcaatggcatcttgttatgtgaggctgaaggagaacctcaacccacaatcaagtggagagtcaatggctccccagttgacaatcatccatttgctggtgatgttgtcttccccagggaaatcaggtttaaccaaccttcaaccaaatcatactgctgtgtaccagtgtgaagcctcaaatgtccatgggaacttattcccttaccaatgccaatattgatgttgtggatgtccgtccagtgatacaaaccaaagatggagaaaattacgctacagtggttgggtacagtgctttcttacattgcgagttctttgcttcacctgaggcagtcgtgtcctggcagaaggtggaagaagtgaaacccctggagggcaggcggtatcatatctatgaaaatggcacattgcagatcaacagaaccaccgaagaagatgctgggtcttactcatgttgggtagaaaatgctataggaaaaactgcagtcacagccaacttggatattagaaatgctacaaaacttagagtttctcctaagaattctcgtgttccccaaattggtttgcttcc

SEQ ID NO: 354654 - DNA, 450 bp, Homo Sapiens
ccttgccaatgcccaatattgatgttgtggatgtcccgtcccattgatacaaaccaaagatggagaaaattacgcctaacagtggttgggtacagtgcctttccttaacattgccgaagttcctttgccttccaccctgaggccagtcgtgtccccggcagaaggtggaaagaagtgaaaacccccggagggcaggcggtatccatatcctatgaaaatggcacattgcagatcaacagaaccaccgaagaagatgcctgggtcttactcatgttgggtagaaaatgctataggaaaaactgcagtcacagccaatttggatattagaagtatttttatttcactgttactttgcatgaattgtcacatgggttcagtctgtcttcatttgcccaaatggaataataccatttaagttggagtaccagataaagttctttgaaccgttaa

SEQ ID NO: 354655 - DNA, 447 bp, Homo Sapiens
  misc_feature (21)..(21): n is a, c, g, or t
  misc_feature (26)..(26): n is a, c, g, or t
  misc_feature (49)..(49): n is a, c, g, or t
ccccttatccacaaatttggnttganctacaggcagaggattgaaaatntgtccttcctccttccctatactcatgcgcagccctctgcgccagcttctcttggacccactagtcaccaatggccaggggcaggagcagaagccagagctggtcagggaggtaggatgaggtcttgtctcactgccctttcatagcattcccctttggaacctgatcctctcctggcttcctagggtctagccaggtggttctgttttccatggcctgcccctccactgttcctctcctgtacagcctgcctttgtagaagacagaatctcagtgtgactttgatctccatggtatagtcctctgctttttctgtccttcatgactaggctcattggaggttccatctctagagcttctatcagtgggggcctggcctttgggtggtttagtcctcc

SEQ ID NO: 354656 - DNA, 417 bp, Homo Sapiens
  misc_feature (327)..(327): n is a, c, g, or t
  misc_feature (349)..(349): n is a, c, g, or t
  misc_feature (403)..(403): n is a, c, g, or t
atgaaaactagaccataaaaagtactcttcttcacagataagggaggcataggagaagaggctttaagaacaagggatactcctcacttgctgggatacatggtcttccctgggggaaggtggaaaggctcaatttagattcaagaaaaatttgagtatcttgtacatgttgtgcactgtgccggtgagttcacatatattattttatctgccataatgaggtagtattcaaggctcagtaagttaagcagtttctcccagatcacccagctagtcagtggcaaaactggggtttcagcctcagttcgtctagcaacagttctaccntaataaaggcaggttttaacgncctcccttccaaaggggcattcgggtcttcctcttcagcttcaggcacagaggnggaaaaagggttgg

SEQ ID NO: 354657 - DNA, 671 bp, Homo Sapiens
  misc_feature (39)..(39): n is a, c, g, or t
  misc_feature (65)..(66): n is a, c, g, or t
  misc_feature (210)..(234): n is a, c, g, or t
gtatcgtcagctggagccgtacgagctggaaaacccaantggaaacagtagcggggaattctgtnngtctggtctttgaataaccaacccagtgatttacatgctgatagctaagtgagtttttaatggccattgtgtatgattttgatgcacaactagttaaaagcctttcataccagtcagtattcccagccttgagcgcacgcgcgnnnnnnnnnnnnnnnnnnnnnnnnngcattaatttttgtactttgcctcttttatgtttgtaatctgtaaatgaacacatggcagaaaataacccctgattggtaggatcatagttcctaaatggaaatgtttgtaattcttcgatgtgcctacaaacctgaaactggtaagacaagcacaaagcaacgtgcaataaaaaaatcgtatctcaagggaaaatactcaaagaaagaaaagtggcagcacttatattagttttataacaggataaagtcttgtgtatagcaaagtagttgcatctgtttattttctatttattattgttacaataggtaatagttatagcaattatttattgatttgtaacaacttgtttttaaccaaactttgtagcatggaaaaaattttccatccacaaatacaaacatgaataaatacattcagaatgttggcaaaaaaaa

SEQ ID NO: 354658 - DNA, 578 bp, Homo Sapiens
attctgtgaacgtgtgctacttttgaaaaatagaggaaggggtgttggaagcctagactggttctcttgccactcctcaaaaagcaaaattttgcagcccaaatattaaaaattgactccgcgtattccttctcccccacagtggcacacaactgggcaggctccatctcgtctgctgctggaacccactagaaaccaaatgagccctccagcaggcctaatcactctgatctgtcatggaccttctagctggaagagttatggccatcatattatcccaaacactcatcagtgtgtggaggacccccttttactgaatgatttattgctctttgcagaattcctttggctgcagattttatttctgagtcactctgttcagctcaattggtcgccttcagttaccgtggcaaccagcagatggggttctttgacaagggtcagcggggaggctgccttggtttggacagaagaggagctaaataaaaagctttcagcattgacggttccgtagcggacggccaggagttgttatcaaattacttgcattaaaacctaattaagatgtgtgccaataa

SEQ ID NO: 354659 - DNA, 1193 bp, Homo Sapiens
tccaaagaaatatgactagggccgtcactggatgttaatttagtacgagggccatcgcactactgtgatatagcatgcacgtggttctacacggagacgagattgggggcctgtcgctgtcgccatcgcccgagcgcaggaaaccgccgccacctgaccccgccaccaagcctaaggtgtcctggatccacggcaagcacagcgccgctgcaagctggcctgtgctgccctcacccaccgccgccagggtctccgaggcctgcgcccaagccccagcaagaggaaacggacgcccagcgacaaatctggcgcatacggtcgaacacggcagcccccggacccgcgacccaacgccgcggccccccgggctgcccgaggaggcgacagccctcgctgcgccctcgccgcccagggcccgagcgcggggccgctggccccggcctcttggagcccacggacgccggcggtcccccgcgaagcgcgcccgaggctgcctccatgttggccgctgagctgcgcggcaagactcgcagcctgggccgcgccgaggtggccctgggcgcgcagggccccagggaaaagccggcgcccccacagaaagccaagcgctcccgtgccgccagcctcgcccgaccgagcgcccccagcgaccgaaaccccgggccctgagaaggcggagaccgacttgcccgcgcctgagaccccccggaagaagaaccccatccagaagccgccgcgcaagaagagccgggaggcggcgggcgagctgggcagggcgggcgcacccaccctgtagcaggctgtggctcgtccgcgcgcagctccctcagcttcgcagcgccgcccgccacccccacccctcccacgctaccggggcaggggcgggcctcctattgggcggggaaccgccgcgggctaacggaagggtggcgtctcatttggctcagggtccatgcacccgcctcctggaattgggaacaagtgtgccttctggcggggaaggggacctttcccgattggttcaaggccctgaacggggctcttatagtgggatactttccttcccccctttgggccgaatttatgggaaacggttccgggatcggaatagatgtcttcatttaggcaaaaataaagggtgaggggccctcaactttaaaaagaaacagcctctctttacggggctgaaaagc

SEQ ID NO: 354660 - DNA, 962 bp, Homo Sapiens
  misc_feature (842)..(842): n is a, c, g, or t
  misc_feature (857)..(857): n is a, c, g, or t
  misc_feature (886)..(886): n is a, c, g, or t
tcactctgaagataacacacatggctagtgggctgcaggactgcctccattccattgttcaggctgcaacccacagggaagttagggctgctgtcaccaggatgagtttttatcttctgaatgacagattgtctttaaagggttgccctggtccatgtggggttaccttgaagtccttggcttggcacaccgcactaaacaggtttttacaggtgcttcctgcttgcactgaagatgagaaactgctaatagatatcatacattttttaaataaattaataaaggaacaaagaaaaaattcttcactagaacttctaaactggattctcgaattacttcttagacatagtgcaaacccactgttagacctcttggttctgacagagtcacaggcacgagaagaaacagatgatatccggactgctgtcaggcaacaacttcagaaagaactgattgctctttttgataccttgctgctcaatttcatggaagttactgacaggaaatgctcggaacttctttacgtttttcaaacgcagctggctctgaaactgctccagtgtctgaaagtgacggatgcgcctcatttctatggcctgccgtcccttgagcggaccttacgagggatggctaacctcactgcgtttccgggatggagctcacactctcctctcacaaagcctctagatatctgtgtgaagtacttgtaaggtctccttgaggtcattacttctttttatgtggagcgtggaggaaatgctatgtccttcatgggaaaaggtgttacaaagagcacaattcttttgcttgctttcacttatcccatgagatgatggccccangctgggaagcttggnaatgggatgtcacttttggtttcttgccntttggggtagtcatagtggaaggaacataattccctacctcaacaagggatttggcctggggtttgaattccaatc

SEQ ID NO: 354661 - DNA, 433 bp, Homo Sapiens
tttctttctctcctccccccaccttgcatagtttacaagacaggaggaaagagagaaagcaaaaagttagaaaacaaaacaaaacagaagtaagataaatagccagaagaccttggcgacaccacccggccctggtagttaaaaaaaagtaacaataataataatatcaacccctgacctaaactacttgtgttatctgtaaattccagacattgtatgaaaaagcattgcaaaactttctgctctgttagctgatgcgtgtagcccccagtcacgttccccgcttgcttgagatatcatgaccctttcacgtggaccccttagagttgtaagcctttaaaaaggccaagaatttctttttcagggatctcagctattaagatgcaagtctgccaatgctcctggccaaataaacctcttccttctttaaaaa

SEQ ID NO: 354662 - DNA, 752 bp, Homo Sapiens
  misc_feature (30)..(30): n is a, c, g, or t
  misc_feature (37)..(37): n is a, c, g, or t
  misc_feature (58)..(58): n is a, c, g, or t
atctcgtcataaatggcagctgtgatgttnatgttgnccgccgtccaccttaataggnaggtctgttgtcggtgtcgaggttttggcctgaggggttcgggaggagctgggactgctggaggccgaggagaccatgctcacattgggattcatctccgctccctctcatcctggtagatgcgatctcgctccacttctggcagattgaggaaattctgcatggccctcaggtttactagaagagactgagaggctgtccgagggtcttcttccttacgcagaatctcagacaacaatccctgattaaatgggggaaaaaaacagaccaagtcacatttgcaggtatatgtgtgtggtttctgtcttccacccctctcctcctttgtttggtttaaccagctcgctgtgatgtcaagaacctcacactaattccttagggttctccgatatgaagtcaatgtgcttgccttccgggggatatgcattattttaggactgttctattctgacactttatcatcactgtaataatcatcagtgtacagacatgccagctagcaaggtaggcacttgggaagaattgtgaaactgcaattaccaccaggtgcctcctacaagtatttcaggaactgttagaactctctctgcttgaaactgggaacacttggcagtcctgcttagctttacaaatctgccaagtttggtaaatttagtttcgacatttaaacagcatggtagatttacatcaattt

SEQ ID NO: 354663 - DNA, 773 bp, Homo Sapiens
ctgagtctgcagtgtgacactgctttaggtacggagctgcggagtcggagcggggacgcgccgggacatgcagcatctgggatgacaatcctgactgcctcgcaatgctgctcgccgctgcgctggcagcgctgtactgctgagctcggaggatcccattaggacttgccctggggatgtgctacctgccgtgctgctccgaggtcagtggcaggtctgcaggcagccgagggagcggtgaagccggaagacctgtctctgcccatgtgcaaggcagtgatttcgggtgagagagcgggtgggtgagtctctttagagttgtgaaatgaagtgcaaaatcttgggtttctcctcggcggagtggacatgtggactcccccagttgggtctttgcacttcccttacctctcccaccccgacgtgcagccccggcccagtgccgaagccccacattcaaagatgctctgggagaccggggatcctggcttgctcacgcgggaagtgcacgcaggccaagtggtctaacagttggcggcggtggcgcgtggcggcggccggcggcaccgacagtcaaagcggggagccaagagaatttgacaacgaggacgtccggctcccctctcacacggcttgaggggggagggaatacgcggttagtcgcccaacttgagacagaaccgcgcaggaaatccatgaagttaaaacactttgtggaaaggctggcacctggggatggtgcacagaaacgtggaagtcttttacgagtctctcca

SEQ ID NO: 354664 - DNA, 424 bp, Homo Sapiens
  misc_feature (28)..(28): n is a, c, g, or t
  misc_feature (297)..(297): n is a, c, g, or t
  misc_feature (330)..(330): n is a, c, g, or t
  misc_feature (365)..(365): n is a, c, g, or t
caaaaaggacttaataactctgtctggnctgccccctggcggacaaaagcattcgaagtatgctggccaccagctcccaagaactcaagatccctgtccaaggccctaggccttagatcacctgcttatgttcagtgacttcctgaactagctctttcgccacaagacccttggaactttcttcatggaatgtaaacgcctgggagggcttcctcttacctaacggctgtaaagtctgtagcctcatccaaaacagtgcctcatgggaaaagtaggatttaggatcttcaaaacggnacagcattaggcaaggaggcagtttcaacccanttttgtttcagggcgtcttttgttatgggcttcgnaaaccacattttccctcatggggtccaaaacatggacttaacttccacttggggaactt

SEQ ID NO: 354665 - DNA, 1244 bp, Homo Sapiens
  misc_feature (45)..(98): n is a, c, g, or t
  misc_feature (1079)..(1079): n is a, c, g, or t
  misc_feature (1126)..(1126): n is a, c, g, or t
acctttgatggctcggacctcagccggccaccgccagccctgctnnnnnnnnnnnnnnnnnnnnnnnnnnnnnnnnnnnnnnnnnnnnnnnnnnnnnnctcggccgccgggggcttgggagccgccgatcccggagcccgagccgggagagggagccgccgcagccgccggcgctgtggagatattctctaagccgctttcatcatgggagaaatagagcagaggccgaccccaggatcacgactgggggccccggaaaattcggggatcagtaccttggaacgtggacagaagccgcccccaacaccttcaggaaaactcgtgtccatcaaaatccagatgctggatgacacccaggaggcatttgaagttccacaaagagctcctgggaaggtgctgctggatgcagtttgcaaccacctcaacctcgtggaaggtgactattttggcctcgagtttcctgatcacaaaaagatcacggtgtggctggatctcctaaaacccattgtgaaacagattagaaggccaaagcacgttgttgttaagtttgtggtgaaattctttccgcctgaccacacacaactccaagaagaactcacaaggtacctgttcgcgctgcaggtgaagcaggacttggctcaaggcaggttgacgtgtaatgacaccagcgcagctctcttgatttcacacattgtgcaatctgagattggggattttgatgaagccttggacagagagcacttagcaaaaaataaatacatacctcagcaagacgcactagaggacaaaatcgtggaatttcaccataaccacattggacaaacaccagcagaatcagatttccagctcctagagattgcccgtcggctagagatgtatggaatccggttgcacccggccaaggacagggaaggcacgaagatcaatctggccgttgccaacacgggaattctagtgtttcagggtttcactaagatcaatgccttcaactgggccaaggtgcggaagctgagcttcaagaggaagcgctttctcatcaagctccggccagatgccaatagtgcgtaccaggatacctnggaattcctgatggccagtcgggatttctgcaagtccttctggaagnccaagcccgtcctctttagcccggggtcatcatttcggttcagtggtcggactcagaaacaagttctcgactatgttaaagaaggaggccataagaaggtcaatttgaaaggaacacc

SEQ ID NO: 354666 - DNA, 1066 bp, Homo Sapiens
tgagtggaattccccgggaacctcgcgtgtagatcgactaccgggaatttctccgcggcctaatctagcgcctcggggccagccggccaatcaacaacggctgaccagggaggcctcctggttcgggcccaggttgggaaacaggttacgtggccgagggccaactccccctgcgagtcacaagacagctcggaaaggtgaggactgcccagtcagggagcctgtgcttgctgcgggggctgaggttaactctgctggtcctatccttacgacctcctcctcttcctccgtgggcgccgaggcggctccgtccgcctgcttgtaacccgcggggcttctcctcggcgcagggctcgggtgcgaccccggctccccggcggaaaccttcggttcctttcctcgccggcagctctggcccccgggagattcggcaccttctccaaatgtaaggctggtgctcttgctgagactgcttccagcacgtccgaattcagtgtctgtaggctgtgaagcaaggctccggtatagaatgaatcttgctgggcttcctgttcaaactgcaccttcttatgtcctccttcctttaacatagtcgagaacctgcttctgagtccgaccactgaaccgaaatgatgacccccggctaaagaggacgggcttgggctttggtttgggctcttcaaaaagtctaaagaaggcatgatgttcaacacagattttccagaaggacttgcagaaatcccgactggccatcaggaattccaaggtatcctggtacgcactattggcatctggccggagcttgatgagaaagcgcttcctcttgaagctcagcttccgcaccttggcccagttgaaggcattgatcttagtgaaaccctgaaacactagaattcccgtgttggcaacggccagattgatcttcgtgccttccctgtccttggccgggtgcaaccgggattccatacatctctagccgacgggcaatcctcgtgccgattaaccacccagcctcgctaccttatgaccgttagatgctgcctctgaaaacgggggttggccactt

SEQ ID NO: 354667 - DNA, 949 bp, Homo Sapiens
gagcgaggcctgggtggcgaattcggcacgaggcaaaaaataaatacatacctcagcaagacgcactagaggacaaaatcgtggaatttcaccataaccacattggacaaacaccagcagaatcagatttccagctcctagagattgcccgtcggctagagatgtatggaatccggttgcacccggccaaggacagggaaggcacgaagatcaatctggccgttgccaacacgggaattctagtgtttcagggtttcactaagatcaatgccttcaactgggccaaggtgcggaagctgagcttcaagaggaagcgctttctcatcaagctccggccagatgccaatagtgcgtaccaggataccttggaattcctgatggccagtcgggatttctgcaagtccttctggaaaatctgtgttgaacatcatgccttctttagactttttgaagagcccaaaccaaagcccaagcccggccctctttagcccgggggtcatcatttcggttcagtggtcggactcagaagcaggttctcgactatgttaaagaaggaggacataagaaggtgcagtttgaaaggaagcacagcaagattcattctatccggagccttgcttcacagcctacagaactgaattcggaagtgctggagcagtctcagcagagcaccagccttacatttggagaaggtgccgaatctccagggggccagagctgccggcgaggaaaggaaccaaaggtttccgccggggagccagggtcgcacccgagccctgcgccgaggagaagccccgcgggtaacaagcaggcggacggagccgccttcggcgccacggaggaaaaaggagaggtcgttaaggataggacccagcagagtaaacctcaggccccgcagccaagcacaggctccctgactggcagtctcaccttttcgagctgtctgtga

SEQ ID NO: 354668 - DNA, 1218 bp, Homo Sapiens
  misc_feature (529)..(555): n is a, c, g, or t
  misc_feature (574)..(817): n is a, c, g, or t
  misc_feature (861)..(880): n is a, c, g, or t
  misc_feature (1124)..(1124): n is a, c, g, or t
tttagtaccagccccccccttaataggtgtggacgtcttcctgaacagcctgaagcagacggtggtgaccctggcaagcagcgcagacgtgctgagcaccgagcagtcggcctcccaggccatactgcagagcggctggtccatgctgttgcccaccgctgagaagcaggcccgggcactctgctctcctgccctgcggagtttcaggcaatgaagtgagcataagtccaggtcatcgattggtgattgatcttctggtgggcagcttgatggctgctggagggttggagtcagccttacacgcagccattactgcagagatccaggatacaaaaaaagaagcacggaaggaaaaagaaatttatgaacaggaagcaaatgcctcaacatttcatagaaggaggactccattggataaaggccttattaatacggggatctgtgagtcttctggcaaacagtgtttgcctctggttcagctcatacaacagcttcttaggtaaatcatattagctgtattgtattgtgnnnnnnnnnnnnnnnnnnnnnnnnnnngagacagagtttcgctctnnnnnnnnnnnnnnnnnnnnnnnnnnnnnnnnnnnnnnnnnnnnnnnnnnnnnnnnnnnnnnnnnnnnnnnnnnnnnnnnnnnnnnnnnnnnnnnnnnnnnnnnnnnnnnnnnnnnnnnnnnnnnnnnnnnnnnnnnnnnnnnnnnnnnnnnnnnnnnnnnnnnnnnnnnnnnnnnnnnnnnnnnnnnnnnnnnnnnnnnnnnnnnnnnnnnnnnnnnnnnnnnnnnnnnnnnnnnnnnnnnnnattagccaccacgcctggcctatttatttacttattaatggtgnnnnnnnnnnnnnnnnnnnngaaatggagtcttgctctatcccccaggctgggatgcagtgtccccaactttggctcactgcaacccccggcctcctggggtcaaagctattctccctgccccaaccctcccaaagaaacctgggaccaacagggggccccgcaaaccacacccccggcctggaattttttggaattttttacaaagaaaaccgggggctcttaaccacaatctgcgccaccgcctgtgaccctcaaaaacacnccggaacgcccacggtggcaaacccacgctgcgccgtttgggcccgtccccccacaagcgcgctcggggggaactcccccggagtgctctagcc

SEQ ID NO: 354669 - DNA, 992 bp, Homo Sapiens
  misc_feature (786)..(899): n is a, c, g, or t
gtaaataaataaaacacaatacaatacagctaatatgatttacctaagaagctgttgtatgagctgaaccagaggcaaacactgtttgccagaagactcacagatccccgtattaataaggtctttatccaatggagtcctccttctatgaaatgttgaggcatttgcttcctgttcataaatttctttttccttccgtccttcttttttggcctcaatatcctgtaattcataaacagaaattgtttacaagtgatctcattaccaggtgtgaagacacacaagcctggctgagccctgaccccagtgccaagctatcccagcctctgtggctgccacacccatccacccacaggcccccacctgccctgttggaaaccccaactcatttgtgcagtttcaaacagtgtcttctttttacagatccaaggtctaggctgcctctgctgatgctctccagcctccttctgtgaagtccctaaaatccttaaccctgctaatggctcacacaaaacccaatgtgatcggctccacacacgcagcatccagctgctctgtaaggacaagaaggagctagaattctcacacacaaaagtcctggttcaaatgcaaatggcaaagccactttgggaaactatgaacacacactaaccccaggacctaacaaattccactccaagtgtttatccaaagggagaacatatgttcactaaagtacttgttcacagcacaattgtggcagctctacacggccaaaaaccagaaagcctgggcgcggtggctcannnnnnnnnnnnnnnnnnnnnnnnnnnnnnnnnnnnnnnnnnnnnnnnnnnnnnnnnnnnnnnnnnnnnnnnnnnnnnnnnnnnnnnnnnnnnnnnnnnnnnnnnnnnnnnnnnctagccgggcatggtgacatgtatgtggtccctgcaacacaggaggctgaggtgggaggatcatttcctcgtgccgaattcgccacccaggcc

SEQ ID NO: 354670 - DNA, 827 bp, Homo Sapiens
tgtacgataatgctgccgaggcctgtagcaccaccgaagaggtgtttaactccccccgggcaggatcaccgctctgcaactcaaacctgcaggattcagaagaagatatcgagccatcttacagcctgtttcgagaagacacatcactgccttctctgtccaaagaccattctaagctctctatggaactggagggaaatgatgggctgtctttcattatgagcaattttaagagtaaactgaacaacaaagtacctccgccagtcaaaccaaagcctcctgtccattttgaaattacaaagggggatctatcttatttagaccaaggccatagggatggacagaggaagtctgtgtcttctagcccctggctgcctcaggatgggtttgatccttctgactatgctgaacccatggatgctgtggtgaagccaaggaatgaagaagaaaacatatactccgtgccccatgacagcacccaaggcaaaatcatcaccattcggaatatcaacaaagcccagtccaacggcagcgggaatggttctgacagtgaaatggacaccagctctctagagcgatgggcgcaaggtttccatcgtgagcaagccagtgctgtacaggacgagatgcacccggctggggcggttagctagttaccggaccagcttcagcgttggggagtgatgatgagctggggcccatccggaagaaagaggaggatcaggcatcccagggttataaaggggacaatgctgtcattccatacgaaacagacgaagacccgcggaggaggaatattctttcgcagccttaaggagggaacactt

SEQ ID NO: 354671 - DNA, 1041 bp, Homo Sapiens
  misc_feature (26)..(26): n is a, c, g, or t
  misc_feature (58)..(58): n is a, c, g, or t
  misc_feature (70)..(70): n is a, c, g, or t
  misc_feature (159)..(159): n is a, c, g, or t
  misc_feature (1011)..(1011): n is a, c, g, or t
cttctcgaggaccaaaattccaagtncatcaaagaaaagaaactcatggaagatcgcnttgctgagtgtncctctcagctggctgaagaggaagaaaaggcgaaaaacttggccaaaatcaggaataagcaagaagtgatgatctcagatttagaagancgcttaaagaaggaagaaaagactcgtcaggaactggaaaaggccaaaagaaaactcgacggggagacgaccgacctgcaggaccagatcgcagagctgcaggcgcagattgatgagctcaagctgcagctggccaagaaggaggaggagctgcagggcgcactggccagaggtgatgatgaaacactccataaagaacaatgcccttaaagttgtgcgagagctacaagcccaaattgctgaacttcaggaagactttgaatccgagaaggcttcacggaacaaggccgaaaagcagaaaagggacttgagtgaggaactggaagctctgaaaacagagctggaggacacgctggacaccacggcagcccagcaggaactacgtacaaaacgtgaacaagaagtggcagagctgaagaaagctcttgaggaggaaactaagaaccatgaagctcaaatccaggacatgagacaaagacacgcaacagccctggaggagctctcagagcagctggaacaggccaagcggttcaaagcaaatctagagaagaacaagcagggcctggagacagataacaaggagctggcgtgtgaggtgaaggtcctgcagcaggtcaaggctgagtctgagcacaagaggaagaagctcgacgcgcaggtccaggagctccatgccaaggtctctgaaggcgacaggctcagggtggagctggcggagaaagcaagtaagctgcagaatgagctagataatgtctccacccttctggaagaagcagagaagaagggtattaaatttgctaaagatgcagctagtcttgagtctcaactacaggatacacagggagcttcttncagggaggagacacgccaagaaacctaaac

SEQ ID NO: 354672 - DNA, 1917 bp, Homo Sapiens
  misc_feature (511)..(511): n is a, c, g, or t
  misc_feature (1267)..(1267): n is a, c, g, or t
  misc_feature (1426)..(1426): n is a, c, g, or t
  misc_feature (1428)..(1428): n is a, c, g, or t
  misc_feature (1432)..(1432): n is a, c, g, or t
  misc_feature (1504)..(1504): n is a, c, g, or t
  misc_feature (1803)..(1803): n is a, c, g, or t
  misc_feature (1832)..(1833): n is a, c, g, or t
  misc_feature (1835)..(1835): n is a, c, g, or t
  misc_feature (1841)..(1841): n is a, c, g, or t
  misc_feature (1846)..(1846): n is a, c, g, or t
  misc_feature (1849)..(1849): n is a, c, g, or t
  misc_feature (1861)..(1861): n is a, c, g, or t
  misc_feature (1867)..(1867): n is a, c, g, or t
  misc_feature (1869)..(1869): n is a, c, g, or t
  misc_feature (1883)..(1883): n is a, c, g, or t
  misc_feature (1885)..(1886): n is a, c, g, or t
  misc_feature (1889)..(1889): n is a, c, g, or t
  misc_feature (1895)..(1895): n is a, c, g, or t
  misc_feature (1902)..(1902): n is a, c, g, or t
  misc_feature (1906)..(1906): n is a, c, g, or t
  misc_feature (1909)..(1910): n is a, c, g, or t
ctcggctctacctagttcttaggatacagtaggggagactactgtattacatttcagcctcccataaaactttactaatttggattaagaacacaagcctgatttagtaaaaagtatccataaatattcagaggtatagttttgtttcatcaagtaaaaagagcaactaattccaactgttgaagtagtaacaagtaaaggcttcaccaggctttccttgatgaatagttaagacatatttttaggtcatcagcacaagattattgaataacttgtatgctacaaacatgccgcttccactcatcgaaacaagccaataatccttactattccaacttgctgagaaccatgtcagatgctgcgttcaagaatgaaatgttcctcaaaactgttctatcaaatgtagtagctattggacataaaacaagtaatttatttcagactttagttttcactgaagtatttatcaacaagcttcaaattattccaacattaatgttatgataggacnagttattaacaattaaccactttcctgagaactgtaaactttgaaattgtaagaaatggacaattaagctcactagtcaaaatcttgattcaagtgatgatccaatagcttacaaatgtcttccaataaactgagctttgaggcagaaccaaaaaaagaacacaaaatctaaaacctctctatcccaagcaccaataatggaggctaagcaattatacctacaaatccttaacgacaggtctctcctaatgaaaaatcctgagatttaagcactgtgacttacagaaggcaggcttggcttaatgaggaaatttacttttaataaaaagacaatcagcaatattttattttgggcacttagcatttcacagatcctcaatacattttgaggtaggtcaaatattaattatgtattttacaaacaaaactcaagcagttgttttattacttgtcccaaaccacaggagcagttctatcgtggtcaggaataacatggtctctgatctttcagattaatctttcatgtgtgaatttaatggtaattacttgcaaatattcatgaaaaaaaccaagactagatatagaaattctactctgggttattttaaacttcttaaattgattctataatgagtatatacttgctctcattacaaatatatatatataactgatctttacattacaaatgaccacagcagtgactgtgttgcttttctgccttttggggtgagtagatcaggaagataatcagcnagctttcctcagagcactaggcagcctttaacttaaggtgctatgtttgaggcaccattgactatgatttggggtcataggagagcaggtatactgatggaaccaggattcagaaaagatgcctggatccaaaaacgggaggctctctgcaagtcaaananaaanagaaaaatagtaacatctcaagctactgatcctgagtatcatgctacagcattacaactacttgtgagaggngctcctacaagagcagtaaacttgtcccagtaaagtctgctaagttctaactagataagccacaagtaaaactaaattggtattttactaaagtgacatctacagaagcaaacatctaaacatttttaataggagttttacctgtcatgtaaattactctaattgtcacaagcctaattcaattagcttgtcataattcctaaaataatttaccaaaattcagctcatcttgacataggttcttgagccagtattccgaaccgtttcattataaagttccttttatttaaacaatggtngatattagtaataataaggatcaagaatnntnacttgngcctnggngtaggttgcagnggcggngntgcactatgcactngnntcngggacnggcaggncctntcnnaaaaaaa

SEQ ID NO: 354673 - DNA, 1177 bp, Homo Sapiens
  misc_feature (300)..(300): n is a, c, g, or t
  misc_feature (306)..(558): n is a, c, g, or t
  misc_feature (567)..(582): n is a, c, g, or t
ctgctccatatagttactttgagaatcggagtggttcgtgcgtgatatactcctgcctgcccctttaccccttggtctctgtctcctgctcaccttctcatcccagttgcccacttttcccttatttgaccttcgtgctgcactcctactctgtatgcttgtccccttgtgccccgatggttgtagacaggcaccttggaaggccctgctcctgagctccaagtgccattcattctgcagctgcttggtggcagtgccagtcaccacaatcaagctcacttatttcttgccgggcgcggntgttannnnnnnnnnnnnnnnnnnnnnnnnnnnnnnnnnnnnnnnnnnnnnnnnnnnnnnnnnnnnnnnnnnnnnnnnnnnnnnnnnnnnnnnnnnnnnnnnnnnnnnnnnnnnnnnnnnnnnnnnnnnnnnnnnnnnnnnnnnnnnnnnnnnnnnnnnnnnnnnnnnnnnnnnnnnnnnnnnnnnnnnnnnnnnnnnnnnnnnnnnnnnnnnnnnnnnnnnnnnnnnnnnnnnnnnnnnnnnnnnnnnnnnnnnnnntccatctcnnnnnnnnnnnnnnnnttatttaagcctcacctctttccaagacggattggaaggaaaccctttgagattaggttgagatgatctcagcacataagaactaagctctgtgtctgcaggtttcacaatagaggaaattaaaaccaggataagaatgtgcaaaccagggcactgttggtgatttgcgagatcggaagttgtggctagaatcttcctgactatggaggaaggcagacgtcttgtatagggggtggggtgtacattctggacagttcatggaaaataaggggataagaagctgaatcatcaccccctcccatctttctctctgctctatgagaccctccccttccttatttttatctcttcccactttatgctgggccttccctatcctgccctgagttatagttagtcactaacttctccgctggctcccacccttatcacatctcagctacatatataaactctctgttatctaagtaattctattagccagaagcaattccagagtttatattagtactaggaaggtgtcatgtagcccctgtctaacatttgaattgaactaaaatgtgaatctcaataaaagcaacacagttttcacagc

SEQ ID NO: 354674 - DNA, 387 bp, Homo Sapiens
  misc_feature (158)..(158): n is a, c, g, or t
agtggaggcagggccctgccccctcccttccgctcctgcccagcctgggggaaggagaaaggaggggagaaagcgggctctcaccccctcaggagtgggcacgggagcccttctccctgaccctgggctgcttcctgggggctctccagacccctctntaggaccaagtcacccgtcgtgctgggagtgtggattctagcaaaagagctggaaaaaagtcagactctccacagaccccctatgggggacccccaactcaaggccaaggactgggcgtatcggatgctcataacacccctggcctggcccctttactgagaagactccttggatatttcccaagaaccccccacatacacccctcacaagccaccccgtcgggtggag

SEQ ID NO: 354675 - DNA, 692 bp, Homo Sapiens
  misc_feature (522)..(522): n is a, c, g, or t
  misc_feature (525)..(525): n is a, c, g, or t
  misc_feature (558)..(558): n is a, c, g, or t
  misc_feature (580)..(580): n is a, c, g, or t
  misc_feature (608)..(608): n is a, c, g, or t
  misc_feature (651)..(651): n is a, c, g, or t
ccggaccattaggcgcgtctgcgtcgtggcatggtaggttggccgtggctgcaaatggtatagagtacctgcctctgaatggatttatggggtcacttaaggtatacttcgaggcagatggctgggctaatagttacttacttactcttgggaaatgaaataaaaaatgctcacacttggaagtgttttttttgtcgaattctatgcaggatatcaaacagaaatttgaaaaattcttaaatgacatatacctattcattaacacccactgctctagatgacatccattagttattactgggatcagatgcttttaggacatctttaaaatattttgttattttaactgtagttctttatagcattacgaaagaaatatcactcacataaagcactaacaactctttttagtactgtgtctctcccatgcagtatggtgcttaatgttactggaaaatattgacaggtttagcattatttcaactaattctgggcaaatctaaatagaatagtataacatgnagnaatttataaatttgaaatgtgagtaaactgggncgggaatgagttgatgagtgancccagttgaccactgggcatttgaatcncaatgttgcctacacagcattatgagtgtaataattttcattnggtaacaaaactgcttcctcacctttttatatagcttaaac

SEQ ID NO: 354676 - DNA, 1771 bp, Homo Sapiens
  misc_feature (41)..(78): n is a, c, g, or t
tgatgatagatatataggggaccgcggttatgcggtggggnnnnnnnnnnnnnnnnnnnnnnnnnnnnnnnnnnnnnnatcaggccaaatcggccgagctcgaattcgtcgagagcggatcgcgctttcctgccggcgtgacgtagtgtctgtgccccgttcttgccccctcagtactagagtctccggcttcgctcacgcgccttgggcataagagtcctctcgttggtcccggaggtggggttgcgctcacaaggggcgaccgtcgccacggtggcggccactgcatcgcgtcccacctccgcggccctgggcgccgtggtgtcgacgggccccgagcctatgacgggccagggccagtcggcgtccgggtcgtcggcgtggagcacggtattccgccacgtccggtatgagaacctgatagcgggcgtgagcggcggcgtcttatccaaccttgcgctgcatccgctcgacctcgtgaagatccgcttcgccgtgagtgatggattggaactgagaccgaaatataatggaattttacattgcttgactaccatttggaaacttgatggactacggggactttatcaaggagtaaccccaaatatatggggtgcaggtttatcctggggactctactttttcttttacaatgccatcaagtcatataaaacagaaggaaagagcctgaacggtgaaaaggcaacagaataccttgtctcacgctgctgaagctggagccatgaccctctgcattacaaacccattatgggtaacaaaaactcgccttatgttacagtatgatgctgttgttaactccccacaccgacaatataaaggaatgtttgataaacttgttgaaaatatataagtatgaacggtgtgcgtggattatataagggatttgttcctgggctgtttggaacatcgcatggtgcccttcagtttatggcatatgaattgctgaagttgaagtacaaccagcatatcaatagattaccagaagcccagttgagcacagtagaatatatatctgttgcagcactatccaaaatatttgctgtcgcagcaacatacccatatcaagtcgtaagagctcgtcttcaggatcaacacatgttttacagtggtgtaatagatgtaatcacaaagacatggaggaaagaaggcgtcggtggattttacaagggaattgctcctaatttgattagagtgactccagcctgctgtattacctttgtggtatatgaaaacgtctcacattttttacttgaccttagagaaaagagaaagtaagctcaaagaggacaattccagtatatctgcccaaggcagcaacaagctctttgtgtctaaggcataaaagaagaattctgcatagaaacatggtccatattcgaaatgctctatagtcattagaagccagagaactgctaagtctcctgcaaatgttcccttgcttcttgccttcccatatatatggaacattggctaacctctgctgtaaatgggttgccatcaacacaatggttaaaacctgaacacgaagggaatagaagtttcacagaatttcttacgatactattgcgtggacagctggatttggcacacttgcttcacgcgattagatgactggtcctcctactggaagctaacttgccctgatcgcctttaaaattacccttgcggcatccagaaaatacggcttaaacaaagtctgcaccgttccagggcaacataggagtacgaactagcggttcccaactcaaaa

SEQ ID NO: 354677 - DNA, 1450 bp, Homo Sapiens
  misc_feature (1093)..(1109): n is a, c, g, or t
  misc_feature (1393)..(1393): n is a, c, g, or t
  misc_feature (1395)..(1395): n is a, c, g, or t
  misc_feature (1410)..(1410): n is a, c, g, or t
  misc_feature (1425)..(1425): n is a, c, g, or t
ccagagttcgtatatgactccagtcctggcgctggatgctgctgctgttccggcttcctaggtgtggaaactgaaggaccaagagattaaacagtggtgcaaaagtggtaagaattcagtattctcctcgacaagtggacgagcatctactgtgctttcacagcggctatcactattgccagcagtaagactgtcagctaggcgccctagtctgtttggatgggaaactgcagttgctaagggagctgtgtttgaatctctgaggacaaatgggaattctcactgatttctaggactaccctggggcaggcaccctgcacagcaatacacactgaacaatgtcgagtttctgttgtatagacttcctacgttgctctgaaattggaagctggcctaactgtggtctccagttacagaaaacactggctctgtatcctgggctttgagttatggacgcatatctcaaatgtatggcatctacctctacctgagccacaaccaagtgggtttctactagatcgcagttccttgacagccaacaaggcagctaacactgccctcctaagttctgatcttgctcctgttcaactggaacttgatggatcccatgtggtttcccccatcctgacgctgtggctcagacactctccctaaggtggtccttccctccaaatcctgccttaaacacactcagaaggtagaaaacacttcagcagcaaagtcctcttcccaagccaacagttgtgttcttccaatcacatgatcttaccttttcaataaaaggcaaaacaaaccaatttccaacatagcattacagcctttaaaaccattcacttctcatagtgattcacagagaacaagagattaaagtgctggattttaaatgtctaaagttgccttcagggctacaaaaagccctgccgtgtgtgtttttccttcatggtgttgaggggaaggaaagatagggaagggcagtggggagaaaccctaaaattttcaatcagaaactggaaattgtaaaagtggaaggtggggagttctgtgcaaatcaatctcccaaggttctgcgtcctctagtgagcctcaaagaagnnnnnnnnnnnnnnnnnggtggggactcgcaaaaaggatgagggaaaggctccagacctacagagcacctcccttaataaataccagttagtaagaaagagatgcacctgcacaggaatgcacagcaacagtggggagggcctgaggtggagtccgccagagcaccctgtcgccccactgaggctcccttggggacaggcggtctagtgctcattccttgccctacgtgcagcaggtactgtgcaggctctggagatgcccagtcctctgtctggaccagagtccacacagagctgagctncngcaggagactggccntcactaggctttcanatgattttaataaggacctggaaga

SEQ ID NO: 354678 - DNA, 907 bp, Homo Sapiens
  misc_feature (810)..(810): n is a, c, g, or t
agagagcaagatgaggcctatcgcctttacttgaggctgacagagcaaagagggaagctcacgagagagagatgccagaacagtttcgtttggagcagattcgcaaaaaaccaagaagaggaacgtgaggccatccggctgtccttagagcaagccctgcctcctgagccaaaggaagaaaatgctgagcctgtgagcaaactgcggatccggacccccagtggcgagttcttggagcggcgtttcctggccagcaacaagctccagattgtctttgattttgtagcttccaaaggatttccatgggatgagtacaagttactgagcacctttcctaggagagacgtaactcaactggacccaaataaatcattattggaggtaaagttgttccctcaagaaacccttttccttgaagcaaaagagtaaacacggcccagcggtggaaccagccattccttgacaagccagcagcctgcgtcaggagaagggctcctcgccaacccacccacacgctcgtctcactcaattcaatgtcacacttctgcctcttgcaaaattgctggaaaaagtaataataaatatagctacttaagatttcccatccatgagtatatattcccaacccttattacagagaattacaactctgccaccctcccctaccccctgcacttcaccctccttcaatgacgaatgcattgttcaagtgtgagtgatcactaaatagaatttttacctctccagtgcccatctttttcccacagtgtctaggacagttctgtctgttctgtgacaccaggatgctgnatatttggaaatatggctttttattttacaggaccggaattcctacttcatcaccttatttttagggggcagagggaaaaaaaggtcaatgggcact

SEQ ID NO: 354679 - DNA, 926 bp, Homo Sapiens
ggtccggaattcccgggatgtcctggcgctggatgctgctgctgttccagcttcctaggtgtggaaactgaaggaccaagagattaaacagttcctctcgcaggaattgaatgggaaacctggagcaagttccacttttggacatggctatgtaatgtatcctttcgaaattcccagtcgtaagcagatgtgtcttgctgaatcagggctctcttatccctgccatcgacttacagtgggaagaagatcttcacctgcacagacccgggaacagtcggaagaacaaatcaccgatgttcatatggttagtgatagcgatggagatgactttgaagatgctacagaatttggggtggatgatggagaagtatttggcatggcgtcatctgccttgagaaaatctccaatgatgccagaaaacgcagaaaatgaaggagatgccttattacaatttacagcagagttttcttcaagatatggtgattgccatcctgtattttttattggctcattagaagctgcttttcaagaggccttctatgtgaaagcccgagatagaaagcttcttgctatctacctccaccatgatgaaagtgtgttaaccaacgggttctgctcacaaatgctttgtgctgaatccattgtttcatatctgaagcaaaattttataacctgggcttgggatctgacaaaggactccaacagagcaagatttctcactatgtgcaatagacactttgggcagtgttgtgggcaccaaaccattcggacctcaaaaaacggatcagttttccgcctttttctggaatattaatggggaaaagcgatcatcctaaatgaaaatggttgaatgggaatacaaggggaaccccaacaggtagaatgaatgtaaatggatggagaactcctgggcttgcaaatggaaa

SEQ ID NO: 354680 - DNA, 1322 bp, Homo Sapiens
  misc_feature (41)..(41): n is a, c, g, or t
tctgggccagggaaacgccgctccccaagaaaactcgccanctgggggtcccggatcccgcagttttgctcaccaggctcagccattttctttccttttggctcaggagggcagggcttgctctaaggacagcccggatggcctcacgttcctcttcttgttctttgcgaatctgctccaaacgaaactgttctgccatctctctctcgtgagcttccctctttgctctgtcagcctcaagtgaaaggcgataggcctcatcttgctctctcttcacattttctctggcttcacgttcatcctcgtcctttatatcttcctgttgttgggctgtgaagatctccattgcagccatgagtctcatcattaactcatctactgttgtgttcccttgtatcacattcaacacttcattagatgatcgctttcccataataatcaggaaaagcggaaactgatccgttttttgagtccgaatggtttgtgccacaacactgccaaagtgtctattgcacatagtgagaaatcttgctctgttggagtcctttgtcagatcccaagcccaggttataaaattttgactcagataagaaacaatggattcagcacaaagcatttgtgagcagaacacgttggttaacacactttcatcatggtggaggtagatagcaagaagctttctatctcgggctttcacatagaaggcctcttgaaaagcagcttctaatgagccaataaaaaatacaggatggcaatcaccatatcttgaagaaaactctgctgtaaattgtaataaggcatctccttcattttctgcgttttctggcatcattggagattttctcaaggcagatgacgccatgccaaatacttctccatcatccaccccaaattctgtagcatcttcaaagtcatctccatcgctatcactaaccatatgaacatcggtgatttgttcttccgactgttcccgggtctgtgcaggtgaagatcttcttcccactgtaagtcgatggcagggataagagagccctgattcagcaagacacattgagtcgtctgtagcagaagttggccagccctcccataattggtggcgaacggggatacttgtaaggtcatacacatttctctttacctcttgaatagtactgcttcctgagaagttcaggttgtactcccgctggacttctcggtgggtgatgatcagcatgaagttttgatttaatgactcctgcagggcaccagcatgactagatgatgaaggtggtcctcgtgccgattcacacacccagcctcgctacctagcctaggtgtggccg

SEQ ID NO: 354681 - DNA, 1501 bp, Homo Sapiens
  misc_feature (129)..(226): n is a, c, g, or t
  misc_feature (1255)..(1255): n is a, c, g, or t
  misc_feature (1284)..(1284): n is a, c, g, or t
  misc_feature (1290)..(1290): n is a, c, g, or t
  misc_feature (1355)..(1355): n is a, c, g, or t
gctgggtggcgattcggcacgaggccacatccagaccatcttcctgtccgggctgctgcgacgcgggctccgcaggttgcaggcgggcggccggggcgcctgaaggttaccgagtgcatgagcgcctannnnnnnnnnnnnnnnnnnnnnnnnnnnnnnnnnnnnnnnnnnnnnnnnnnnnnnnnnnnnnnnnnnnnnnnnnnnnnnnnnnnnnnnnnnnnnnnnnacggtcgcaggaggtgccgtctgcctcccaggtgcgcgcttcgctcccggagccgcggaactcggcggccgccatggcgtccaacatggaccgggagatgatcctggcggattttcaggcatgtactggcattgaaaacattgacgaagctattacattgcttgaacaaaataattgggacttagtggcagctatcaatggtgtaataccacaggaaaatggcattctacaaagtgaatatggaggtgagaccataccaggacctgcatttaatccagcaagtcatccagcttcagctcctacttcctcttcttcttcagcgtttcgacctgtaatgccatccaggcagattgtagaaaggcaacctcggatgctggacttcagggttgaatacagagacagaaatgttgatgtggtacttgaagacacctgtactgttggagagattaaacagattctagaaaatgaacttcagatacctgtgtccaaaatgctgttaaaaggctggaagacgggagatgtggaagacagtacggtcctaaaatctctacacttgccaaaaaacaacagtctttatgtccttacaccagatttgccaccaccttcatcatctagtcatgctggtgccctgcaggagtcattaaatcaaaacttcatgctgatcatcacccaccgagaagtccagcgggagtacaacctgaacttctcaggaagcagtactattcaagaggtaaagagaaatgtgtatgaccttacaagtatccccgttcgccaccaattatgggagggctggccaacttctgctacagacgactcaatgtgtcttgctgaatcagggctctcttatccctgccatcgacttacagtgggaagaagatcttcacctgcacagacccgggaacagtcggaagaacaaatcaccgatgttcatatggttagtgatagcgatggagatgactttgaagatgctacagaatttggggtggatgatggagaagtatttggcatggcgtcatctgccttgagaanatctccaatgatgccagaaaacgcagaanatgaanggagatgccttaatacaaatttacagccagagttttcttcaagatatggtgattgccatcctgtnatttttattggctcattagaagctgctttttcagaggcccttctatgtgaaagccccgagatagaaagctttcttgctatctacctccacccatgatggaaagtgggggtaaccaacgtggttcctgctcaccaattgcttttggg

SEQ ID NO: 354682 - DNA, 1442 bp, Homo Sapiens
  misc_feature (296)..(368): n is a, c, g, or t
  misc_feature (397)..(457): n is a, c, g, or t
  misc_feature (1323)..(1323): n is a, c, g, or t
  misc_feature (1420)..(1420): n is a, c, g, or t
gggctgggtggcgaattccgcacgaggggcggccgcggcgttcgcccgcccgctcgctcgctcggtttccccgcccccgccgggcttaacgccgctgaaggcatccgggtgcgcgctgtcgcaacctgccctcatcctggcccgcgactgtaagaccggacccacatccagaccaatcttcctggccgggctgctgcgacgccggctccacagcctggacgggggcgggcggggcgcccctacgtttcccatcgcacgcacgcgttacccctcctggcggcccgccgctcgctggnnnnnnnnnnnnnnnnnnnnnnnnnnnnnnnnnnnnnnnnnnnnnnnnnnnnnnnnnnnnnnnnnnnnnnnnnggtgcttcgggggggagtctgggcgtggnnnnnnnnnnnnnnnnnnnnnnnnnnnnnnnnnnnnnnnnnnnnnnnnnnnnnnnnnnnnntcgggccgtcccgtttcgtggcgcagggctgcggcggacggcgcccccgcgccgggccccggcgtgtgcggtgtgttgcatcgcgtgtcccgtgcgcgggggcgcgcgggggaccgcccgggtggtgcgccatcccgtccgggaggcggggccccgcctcccctatgcgccgccccgttccgctgcgcgacccccgccagggggccgtcgcgcggcgggtgggagctgtgagcgggggcgcgtggggtcgcacttagcgcccgccgtccgtcggctggcacgccccggcggccgccggccaaacggggcgcgggcgagggggggccggagcaccgcccatatctcctcccgggcacctctcggacgggccccggcccgtcagctcgcccgccggtgtgtcggccgcactaacgtgtgggggcggtctacatgcgggcgactttgggcgcggcgcgaacagtcccgggtatgtcccgcgcctctcacgccgcgcgtcctctgcgcgtctgtcggctgccacgtcccgcctcttatactactgcgcccattccgggtggcggtgggggtgcgcgagctgctcacttctcggtttcgctacacagattgccacaacgcgttggtgcgcgctcacataccactgtgccgcggttttagtttaacatgcgcgccacccgccacccgcccactatattgtctgcgccacccgccccgcgcgttgggcatatgagtccgccccacccgccttacctggagggcccgtctaccacccgtcgggacgcgttccctctgagtggcaatgctccacccaccccagccaccgtgtggcatatacgggccccccgccgcccggcgggcttgttgggccncccgccgtggtgtctactcggccggggcgtagagtttattggtttatccgacgccggtgtgttgccggtcggcggggggagtggcagacgcgggctncggagggatcatcgggggcaac

SEQ ID NO: 354683 - DNA, 706 bp, Homo Sapiens
ggggctttgtcaccgagcagctgacccgagatggggttgataatgaagataccattttgaggctgtcagctcctggcccagttacactggtaccgcagtgaaaggttgtgtatctgctatcagacctgatccttgacaagctcttggaggaaaaggtcccctggagttttctggcaagttgattggagagatgacccagtctctcttctgcctttgtaggtggccactgtgcttactgaattgtcttgggaacactatttcgtcaacttctgctgactccttcactgactcctcagttaaggttggcttcaggctcaattttactgccacttgccacttttcctgggtctctttgtcttgggcatatatcaggaacttggcatgttcagaagagagtggaaagcttctcacggcatacaccatgccatcttcatccaccttaaaatctgcaggctcactgctctcatattgtacttttctttttccattgcagttgctaaacttcacattgagaagaggctgtccttcatgcacatccttcgataagactgcactgtaaacatcttcaggaaatccagtcttgcataatgcgatttcaccagaagcctctacagacgcctgaagcagggccgccagcagcggcagcagggtccgcagcgctcccgctatccggcacatggaggcggagaggggccgagcgaagagc

SEQ ID NO: 354684 - DNA, 711 bp, Homo Sapiens
gtttcattaccagccctgatgccgttaaaaatcatacaggaatatgatcatcttcttgtgatttggaaaagcctggctataaaggaaaagcatagtaatgaaagcaggggctatcagatacacatgtttgattagtgccatgaatatcacagctgaccttggaaatactactcacaatttctttaaaatttccaacctgaagatgggtcataattacacgttcaccgtccaagcaagatgcctttttggcaaccagatctgtggggagcctgccatcctgctgtacgatgagctggggtctggtgcagatgcatctgcaacgcaggctgccagatctacggatgttgctgctgtggtggtgcccatcttattcctgatactgctgagcctgggggtggggtttgccatcctgtacacgaagcaccggaggctgcagagcagcttcaccgccttcgccaacagccactacagctccaggctggggtccgcaatcttctcctctggggatgacctgggggaagatgatgaagatgcccctatgataactggattttcagatgacgtccccatggtgatagcctgaaagagctttcctcactagaaaccaaatggtgtaaatattttatttgataaagatagttgatggtttattttaaaagatgcactttgagttgcaatatgttatttttatatgggccaaaaacaaaaaac

SEQ ID NO: 354685 - DNA, 1195 bp, Homo Sapiens
ctgtagaacatcttggatcttcacccatacatctgccatatcatacagtttgatatcttcctgctgagtcagtggagtcactacagtgtcctgcaggtatcccaggaccacagagtgtgcagcggctacagcattaaacttgtcaaacagtaactccagcagttctagaagcaaccttggttggttctccacagtaacgttctccccccgctgatagccactgtctgccacctgggttgtagacctcttcacaatttgcttcaactcctgctccaagcgctctatgattgccttaactgtttctgggatcttcttcagtttcgccaagcccttaatgaggatacccataaacagggtgctgttttcctctggatccaattctaaatcttccttgatgtcctgcagatttatctccctcacacttgagcttccagcagtagaatagtgagaggtatcaaggaattttcgaggagtagggaggtttgtaacatcaatcagaggaacagaagcatctttcacgagggagctgattttccctttttccttgttacgctgcacaactcggctagtcgatttgatgtacaggtgccggtgtagttcatctatgagaaccaagtgaaggttcatcttcttgctgtgaagctctagtcgaaggtcactcagtccttccacctggagcagggggccctccaaagactcaactgctgacaccaacatgtcagtggcactgagatagtgcttgctggccatgcactgttccagcttttgaggcacttgcttgatattctcaatttcatccaacaagttcaggacatgcttatgctcaattccttcaatccacagtttccgaagctcatcccgtttgcagtgcagcagcatcttgcatgaaagcaggttctcttttacctgctttattttatttcgggagttagtgatgcgctctgtgatgctctggtatgtgcgaatggctgtcgtcaattctgtgtagtgctgtacaatcaattcatccaggtcacggtcacatttctcgtaggcttcttcaaggcgacccttttcattttcccttcttcgacatcgtcactagtagacagagtcctgatcacagagatgagcagccccgaggggtctttgcttttgctgactgtgcttctgtatttcccaccagctgcttctgccgccatcttggatcccggga

SEQ ID NO: 354686 - DNA, 1068 bp, Homo Sapiens
  misc_feature (735)..(736): n is a, c, g, or t
  misc_feature (793)..(793): n is a, c, g, or t
ggctgtacggtccggaatttcgggatatcgtcgacccacgcgtcggcacttggtagggcgtgggtaccggggattgggggtctcggctctctgcttcaagtcccgtagtaggccaggtacactcaaggctgtgactctggctggctcttggcgactgctggcagtgactgatacaggggccctgtatctctatgacgtcgaggtcaagtgctgggagcagctgctagaggataaacatttccagtcctactgcctgctggaggcagctcctggtcccgagggcttcggattgtgtgctatggccaatggggaaggtcgtgtcaaggttgtccccatcaacactccaactgctgctgtggaccagaccctgtttcctgggaaggtgcacagcttgagctgggccctgcgtggttatgaggagctcctgttgctggcaatcgggccctggcggggtagtagcttgcctagagatctcagccgcaccctctggcaaggccatctttgtcaaggaacgttgtcggtacctgctgcccccaagcaagcagagatggcacacatgcagtgccttcctacccccaggtgacttcctggtgtgtggtgaccgccggggctctgtgctgctattcccctccagaccaggtctgctcaaggaccctggggtgggaggcaaggctcgggctggtgctggggcacctgtagtggggtagtggtagtagtgggggggtggggaatgcnntttcactgggttgggggcccagtgtctaccctggccctcctctgcacggggaagcangggtgttgacctcagttcacatgcccatgggtggcctatgttgtataccaacaggggcggtggatggaagccctaacttaccagcctgtttttgtaacgaggacgggccaagcctccaagcccagttccctaaagggcagaaaagtccttggcccaagggcattgaaaacttggggcttaacctggggggctcccctaataagtggcccccaaagggggaaaccatggggttattcccctgggggtgtttcccatggccacaatggaaaattttt

SEQ ID NO: 354687 - DNA, 1587 bp, Homo Sapiens
  misc_feature (118)..(118): n is a, c, g, or t
gacaacgtttccttgaccaaagatggcccttcccagagggttccggctgagatctctagggcaaggttctacccccgccagggccccgatgccagcaacaagagctctcaataaccancgcaggccccagctcaagctgtgcaccttcccaggaaacaggctctggtccacagcagcagttggagtgtggatggggacaacctggacacgaccttccccattggccatagcacacaatccgaagccctcggggaccaggagctgcctccagcaggcagtaggactggaaatgtttatcctctagcagctgctcccagcacttgacctcgacgtcatagagatacagggcccctgtatcagtcactgccagcagtcgccaagagccagccagagtcacagccttgagtgtacctggcctactacgggacttgaagcagagagccgagacccccaatccccggtacccacgccctaccaagtgccacagccgaatgcctgagtcatcacccccagtgatcacccaggcctgcctctcatgggcagctatggcccggatcccacgtccctggtgtccccgaaaggcctggaggatctcaccttcatggctccacaccaagcagacacaatcctctcctgcactgataaggtaattctctagaagcttgacctgccacacacgggcgctgtgcccaaagcagtgcccaatattctgcacccgacccccaggcactcgcaggtcgcccaccttccagatacgaacgcttcggtcttctgaagctgtagccagcaatcccttgctttccaggtatgacatgctgaagatgatgcccacatgcccactgattcgtcggtcaggtgctacaggtttgttgtctgctaaggcagttgctgggtaccagaccaagagctggttggaaacagcacctgccactatggtcagctccttccaggcgtctccaatcaggcaggctgaagagagggtgcacctgtctgtgcagggcacctcttgcaggatgcaccctactacagggtcatatagcaccactgagttgtggcccagggccaaggctatatttccctcaagccagcgtgcatcccaaatccagtcagacatgttccacaggccagagcgccaaagctcccagaagtggccctgtccccagctaattttcacaactcggagtcccttgcttccaaacacagccaccatggcctccaagtcaaggtctccattaggctctggccgtacccggaagccatggataagatagtggccaagcaggttctgcactcgctttatcatccgcagatgcccaccaaaagtccaagctgtacaccaggacatcgggaccctcacccgccaacagccggtcccccacgcactccagacccgtcactgggaggagtataagctccgaggttaaaaaacggcacaaacgtagtcctcgagagcgtccatgtcgatcctcgaggtgctgaggcagccacggaaaagaagggagctgaactctcgcgagacgagccttcccagcgcgccgcgctgcccatcaacagcaccctcagctacaggtagcagagacccacgct

SEQ ID NO: 354688 - DNA, 2540 bp, Homo Sapiens
  misc_feature (373)..(373): n is a, c, g, or t
  misc_feature (2096)..(2096): n is a, c, g, or t
ccgggatgggcaccatggtgctgtcggtgcctgtgatcgcgctgggcgccacgctgggcacagccaccagcatcctcgcgttgtgcggggtcacctgcctgtgtcggcacatgcaccccaagaaggggctgctgccgcgggaccaggaccccgacctggagaaggcgaaccagcttgctcgggtctgcacaacagttcaatgttaaaaagtccacggaacctgttcagccccgtgccctcctcaagttcccagacatctatggacccaggccagctgtgacggctccagaggtcatcaactatgcagactattcactgaggtctacggaggagcccactgcacctgccagcccccaacccccgaatgacagtngcctcaagaggcaggtcacagaggagctgttcatcctccctcagaatggtgtggtggaggatgtctgtgtcatggagacctggaacccagagaaggctgccagttggaaccaggcccccaaactccactactgcctggactatgactgtcagaaggcagaattgtttgtgactcgcctggaagctgtgaccagcaaccacgacggaggctgtgactgctacgtccaagggagtgtggccaataggaccggctctgtggaggctcagacagccctaaagaagcggcactgcacaccacctgggaggagggcctggtgctccccctggcggaggaggagctccccacagccaccctgacgctgaccttgaggacctgcgaccgctttctcccgtcacagcggggccggggagctccgcctgggcctggacgggacatctgtgcctctaggggctgcccagtggggcgagctgaagacttcagcgaaggagccatctgcaggagctggagaggtcctactatccatcagctacctcccggctgccaaccgcctcctggtggtgctgattaaagccaagaacctccactctaaccagtccaaggagctcctggggaaggatgtctctgtcaaggtgaccttgaagcaccaggctcggaagctgaagaagaagcagactaaacgagctaagcacaagatcaaccccgtgtggaacgagatgatcatgtttgagctgcctgacgacctgctgcaggcctccagtgtggagctggaagtgctgggccaggacgattcagggcagagctgtgcgcttggccactgcagcctgggcctgcacacctcgggctctgagcgcagccactgggaggagatgctcaaaaaccctcgccggcagattgccatgtggcaccagctgcacctgtaaccagctgcccagctgcctcccttcttggacagccctgacccgtcctctgcaacctcctttctgtgcccctttcctcattctgacacccagaagacagtgacagatgtgtttgcaaggctgggatggctctctcatcatactcttgtttcttagaaataagcaagacagagcaggaaatggaatatgcgggtcacactgaggaatgcattttgctcatctgtgttattgaaggaggtgcttattaaatacagttcctatgcctgttttataggtggggttaggccagatgcagagaaagctaaatgtgggaatcatggatgcaaagaagaatttggctttttgaaaaacaagcatttcaaaaatgatgaaggaagtgaaagtatcctggatcaactcctagagttagagattgcccaggtggaaagaaaccttagccagcgttcaatcaagctcaccatgcagggcagtcacccggcagttctcaaactttagcatgtgaagagtcaccagcagattcctgggctcgcctggagacattcctagtcggtattcctggtcgaagcccaggagccttcctttttaacaagctgatgtagagggtggagcactgtatgtggagaaattccttctacaatattccacacaggtttttggccacagtccttgatggagtcccaaaaccatggtgcagccagttccaatgctggacacctcaaccatcagggtgaaatctggggcctcagctttttaatttaattattttaattcttaatactttaatttgtgcatttcataagcccccngctcttggactgaattttgtgctttttattgaagaattttattgtttttatcttaaaatcagtttctattatccttggggagaccatccctaacaaagtaacaggtgggatctcctgtgaagtcattggctgggttcctgattgcctagatgtcacaccccacccagcatcacccaaagtgactctgagatagaccggtcccttcctcagcgttaccagtcacttcaggaggaatttagttattgacttagtctatgacatctggctacatgtaggtagagaagaaagacaattttaaaaaggaaatcaggtcttttgcaactgtgcctccctctgtctgttttcacttgaatgggtaaataaccagcagctaggttttgaattcctaccttgttattctaaacagatgtccacattgttaattaaatctaaattatgagcctt

SEQ ID NO: 354689 - DNA, 1252 bp, Homo Sapiens
gggtccggaattcccgggatcttggggaaggaggcgtcttggcccgggcagcagtggcggcagcgcccgagagagggaaccaacagtgtttgtaatgaagaacatcagactctgagctgtaacctgaattcttgtccaaaattcagcacactggcaacgagcacatcaaacagattgccacttgtcctgtcggcgtctttgagacacacttgcccatctaggaaagcacagtgcaggtatctgtgttctgccaccgtgtgccagcccggaccagctcacagacagccctgcctgtcttacttgggctgctcggcttcactgtctcagggcccctgaacctcccagagccctccgtgattgttggaatggtgagcttgtcggccacagactgctacattgtgcatgagatctacaatggggagaatgcccaagaccagtttgagtacgagctggagcaggccctggaagcccagtacaagtacattgtgattgagcccactcgcattggcgacgagacagcccgctggatcaccgtgggcaactgcctgcacaagacggccgtgctggcgggcaccgcctgcctcttcaccccgttggcgctgcccttagattattcccactacatttccctgcccgctggtgtgctgagcctggcctgctgcaccctctatgggatctcctggcagtttgacccttgctgcaagtaccaagtggagtacgacgcctataaactgtcgcgcctgcctctgcacacactcacctcctccaccccggtggtgctggtccggaaggacgacctgcacagaaagagactgcacaacacgatagcactggccgccctggtgtactgtgtaaagaagatttacgaactctatgccgtatgatttcagtagaacagggagcgaagcaaaaccacccggcccacaagagacaacagagtattcagatcgccacactctgtgaggcagcagagcctgggcaggtgtttggcttagtatttgttatttttaaaaaataacagatcacgggtgtacccagggtttttcagctcattacactaagatgtggatttccataacccaagaggggggtctgaggctgtggaagtccgactgggcagtggaatgctgatggaggcagacgctgccgagggggtgtggacgtgctttgggggaggtctttaagtctattgtttaactgtaccatccagagcccaccagaagctattgatcattaaaattatgagaatttc

SEQ ID NO: 354690 - DNA, 1078 bp, Homo Sapiens
  misc_feature (982)..(985): n is a, c, g, or t
  misc_feature (992)..(992): n is a, c, g, or t
  misc_feature (994)..(994): n is a, c, g, or t
  misc_feature (997)..(997): n is a, c, g, or t
  misc_feature (1011)..(1011): n is a, c, g, or t
cggtccggaattcctgggatgatggccgcttggggaaggaggcgtcttggcccgggcagcagtggcggcagcgcccgagagagggtgagcttgtcggccacagactgctacattgtgcatgagatctacaatggggagaatgcccaagaccagtttgagtacgagctggagcaggccctggaagcccagtacaagtacattgtgattgagcccactcgcattggcgacgagacagcccgctggatcaccgtgggcaactgcctgcacaagacggccgtgctggcgggcaccgcctgcctcttcaccccgttggcgctgcccttagattattcccactacatttccctgcccgctggtgtgctgagcctggcctgctgcaccctctatgggatctcctggcagtttgacccttgctgcaagtaccaagtggagtacgacgcctataaactgtcgcgcctgcctctgcacacactcacctcctccaccccggtggtgctggtccggaaggacgacctgcacagaaagagactgcacaacacgatagcactggccgccctggtgtactgtgtaaagaagatttacgaactctatgccgtatgatttcagtagaacagggagcgaagcaaaaccacccggcccacaagagacaacagagtattcagatcgccacactctgtgaggcagcagagcctgggcaggtgtttggcttagtaattgttatttttaaaaaataacagatcacggggtgtacccagggtttttcagctcattacactaaaaatgtggatttccataacccaagagggggggtctgaaggctgtggaagtccgactgggcagtggaatgctgatggaggcagacgctgcccaggggggtgtggacgggcttttgggggaagggcctttaatcctattgttttaactgtaccatccagaggcccacaggaagctatggatccttaaaaaatatggagaatttccnnnnaaaaagnancancgtaccatagggcncgcacccacctaaccgtgctctcggtgagcctcagctgttatgcatgcgaacggttccgcgcggcga

SEQ ID NO: 354691 - DNA, 839 bp, Homo Sapiens
  misc_feature (618)..(618): n is a, c, g, or t
ggggtctccaagatggccgcttggggaaggaggcgtcttggcccgggcagcagtggcggcagcgcccgagagagggaaccaacagtgtttgtaatgaagaacatcagactctgagctgtaacctgaattcttgtccaaaattcagcacactggcaacgagcacatcaaacagattgccacttgtcctgtcggcgtctttgagacacacttgcccatctaggaaagcacagtgcagggtgagcttgtcggccacagactgctacattgtgcatgagatctacaatggggagaatgcccaagaccagtttgagtacaagctggagcaggccctggaagcccagtacaagtacattgtgattgagcccactcccattggcgaacaagacagcccgctgggatcaccgtggggcaactgcctgcacaagacggccgtgctggcgggcaccgcctgcctcttcaccccgttggcgctgcccttagattattcccactacatttccctgcccgctggtgtgctgagcctgccctgctgcaccctctatgggatctcctggcagtttgacccttgctgcaagtaccaagtggagtacgacgccctataactgtcgcgcctgcctnctgaaacactcacctccttcaccccggtggtgctggtccggaaagacgacctgcacaaaagagactgcacaacacgatagcactgggccgccctgttggactgtgtaaagaaaaatttaccaaactctattgccgtatgaatttcagtgaaaaccggggagcggaaaccaaaaccaccctgggccccccaggagaacaccacgaggtattccgaatccgcc

SEQ ID NO: 354692 - DNA, 919 bp, Homo Sapiens
  misc_feature (599)..(599): n is a, c, g, or t
gctgaagtggcgatttcggcacgaggccggagtgagcatgaggaagatgaacattcagaggaggaagaaacaagtggaagttcagcatcagaggaatctgagtctgaagagtctgaggatgcccaatcacagagccaagcagatgaagaggaggaagatgatgattttggggtggagtacttgcttgccagggatgaagagcagagtgaggcagatgcaggcagtgggcctcctactccagggcccactactctaggtccaaagaaagaaattactgacattgctgcagcagctgaaagtctccagcccaagggttacacgctggccacgacccaggtaaagacgcccagtcccctggggcctgagggttcagtagaggagtctgaggctgaagcctcaggtgaggaggaggaaggggatgggaccccacgccgacgtcctggcccccgccggcttgttgggaccaccaaccaaggggaccagcgcatcctgcgcagcagcgcccctccctccctggctggccctgctgttagtcacagaggccgcaaggccaagacgtgagtgggctgcccctccacctaggctttccaccgtggccnactccctcacatgaccaggcctgactctgttaaccactacttgaagtcttgagggggaaagcctccagggagacataggggccttctcccttcttcccaccaaagtagggggtaggcaactggttgtcatggaaatggggatcatcacagtccccttccccttcaccccacgtggctgggcagtgttaagggtggcaagatagtctctgtccccacccccttgtacttgattccccagctgtctttcacacagccccccacccttaggggaagggggaggggcttctctacaatctacattagtggatctcttttcatat

SEQ ID NO: 354693 - DNA, 564 bp, Homo Sapiens
  misc_feature (41)..(41): n is a, c, g, or t
  misc_feature (129)..(129): n is a, c, g, or t
aggcaaaagacagggaaaaggcaggtgagatgtgcaagctnaaaaagccttactagccattctctagaactccccagagagctcaacctcaggaaatgccggtgtcaagaaaaatgcaaaccggggganactcgcaggcagaggcaggggggcctcaccttgaccttcagtcacctgggagtaacttgcagactgttctgaaatttccagctcaggaaagctgttggatttctgtcagtctgaactggcccttgtcactctggggaagaaaggggagaaacacaggatgcccttgacctttagtctgtggtgcaagtttaacttttggggttggtccttacactgggatggaactgctaaaattttcctctccatttcctcagccttgagccctcccagtaaacctcagaggatcctttttttcacagacccccaaagacactggggaagccctggtggcagagctcttctcccaaggaagcctctttaactctccatgatcgcagcaaggggacacaaagtgaagaagggctttggggacccctgcgtctttcccctctttgc

SEQ ID NO: 354694 - DNA, 344 bp, Homo Sapiens
  misc_feature (157)..(157): n is a, c, g, or t
  misc_feature (160)..(160): n is a, c, g, or t
  misc_feature (260)..(260): n is a, c, g, or t
acctcatggtcagcccaggaggtggaatcagatttgagggccctttgctacagcaaggggttggaatgaggtttgagggcccccatggtcagtcagtagctggtctgagatttgagggacaacataatcaacttggtgggaaccttaggtttgaggntcnacatggtcaaccaggggttggtatcaggtttgaaggccctttagtccaacaaggaggtggaatgaggtttgagggtccttctgtaccaggaggtggcctnagaattgaagggcctctgggtcaaggtggtccaagatttgaaggttgtcatgctttaaggtttgatgggcagccagtagtgggt

SEQ ID NO: 354695 - DNA, 728 bp, Homo Sapiens
  misc_feature (26)..(26): n is a, c, g, or t
  misc_feature (32)..(32): n is a, c, g, or t
  misc_feature (39)..(39): n is a, c, g, or t
  misc_feature (58)..(58): n is a, c, g, or t
  misc_feature (69)..(69): n is a, c, g, or t
  misc_feature (75)..(75): n is a, c, g, or t
  misc_feature (96)..(96): n is a, c, g, or t
  misc_feature (99)..(99): n is a, c, g, or t
  misc_feature (123)..(123): n is a, c, g, or t
  misc_feature (288)..(353): n is a, c, g, or t
ggtaatgaatgctaccttactgatgnccaatnaagctgnagtaccctttcacaaatgnctttatttagnagaaantgtctagatatctaaaatagnccntgaaaatgtgtatatgtgcatccntgtatctacatatgcataaacaaagtgaatctgtggatgtatgccctttctcactgttctttaaaatcaccctaaattcaaattgggaacattctctagtaaatcagaacagcattcttcgtggtcatgtttatttaagtattacatattctcattcctttgttnnnnnnnnnnnnnnnnnnnnnnnnnnnnnnnnnnnnnnnnnnnnnnnnnnnnnnnnnnnnnnnnnntagcaatgctggcccttggtcttttccctgacctaaatttcactctcttgtaaaaaggtcatttccccctacccaagggagaataccaacatattttttctgacatacctctaaggctccaaaccttccacaacgatcaagaaaaatgacttgtttaaaagcttatttatatagtgttgacaataagattgtcagagtatggacatggaatagaatatattcaactggccagtggaattttatgtcagaataagcctatgccttcacttctccatgatgttgcataatacccactcctattactgtataatatttccagtagctatttacaaatcattctgaggaaaaataaccatttagggttttagatcatat

SEQ ID NO: 354696 - DNA, 576 bp, Homo Sapiens
  misc_feature (24)..(24): n is a, c, g, or t
tgaccctgaaaaaaaccaaacccngaattttccacacctatgtctgcattaaaggctgtttaactaccggaagttacatagacttcctgcagtcagctgctgtgccccagtgccttactggtcctttgtagatttgccttaatgatttgtacaaatgactgggaggcggggatgctgcctgtgtcctggtgaaccttaatgaaggggccgtcttaggcacagtgcaaaacaagcatttgtcctgtactgttagagccaaaattgtgatgagcaatactgataattgtccagtttatgtcatctttcccagattttaaaatctgttctagatattcttagcttgaaccacttttgattgtgaaatgtattaggtgttgtcccattattactgtaaaatgaagttttgaatcttcttgttaataaactgtggatttcccctctcaatttcttaaacaacaacaaaaaaatgcttgaagattgtctttgagtgtaagatctgccttttcagaaagggagtgttagtttgtaatgttaaaaaataaagacctcattcaataaaagttgaagtcatcttta

SEQ ID NO: 354697 - DNA, 951 bp, Homo Sapiens
aaaatgacatgggatggaatacatctcctcgcttctgccttccatgtatatccaccttccccaggatcataataaacttctgctgtaagccagaggtcagaaatctacagcctgtggtccaaatctggcctaacacatgtttttgtaaataagttttactagaacacggccaaattcatttgtttatgaattggttatagccgatttcacgtataatggcaatgttgagtagttactacagtatggactatatagtctgctcttttacaaattttgctacctctgtgtattgttatacagactacaaaactctgtatgatgtttcatataatgaaaaagtgtgtgattaggacactgatcttcttataaccagaacagcatactgaacttggaaaatattaacacaagaaatagtttgagataaattaactttggagaagagacagaagagcaccttttgtccaggtaaaataaatgagcattgcaaaaaggaacacaagttctacctaaaaatctagctgccaatgaacaaaataatatagtatgaaaggagacactaatggctgtacacgtatgagatttttaaacctttaatcttgtgttgggaggattaactgacatcaaagtgattgattatatagtcttaaaattctagcaagtgtttgttattgctaacactggtctagagaggtaattaatattactgaatgcctcccatgtataaacctatcaagacaggttgggcaatatggtgagcagttccccaatggacagtgcagcttatgttatagaagcagacaattaaaacaccaaataagcactattttatattaagcccgtttaggttaaccagaaaacaaaggaaaaccagggtaacgtggataaagggcacatctctttggtgcactgagatttttattacagctgcagatagttctaatgatggcaata

SEQ ID NO: 354698 - DNA, 814 bp, Homo Sapiens
  misc_feature (34)..(34): n is a, c, g, or t
atggtacggtccggaagtttcgggatatcgtcgnaccacgcgtgcggaaagtgaagcatagttatgagccagcaatgtttttattgatggaatgtgtgcaaagtcagacacttaagcaagctctggggaatgagagttggggggaatcaactgttttatttgctaattggtatttcctttaaaagatagagttcttccagattttaactgtgttaatagttactctagaaaaattggagatttgtgtgcatatattttatgttgtaaacagacacatacccagagacactgagagagacagacagacagtaaacagaggagcactaaccacaaacggtttacaaatgacctctgtgctcattcacctgtctgttccccaccttgccttttatagcaactatagcaacagccatgagagtcattgtggaaagaaataaaataacaattaaaaaatcctggaagcttgtaaagcaatgtgagcaacaggggaggaagttgtgaaaaaaatgaataaagggcaccgatccagagtattgaagaaagcagagtggagagcctagtaatgagtatctggtaccccagtatcctctcccacagaatctgtacagctctccgtttatgacagtttaaacttaatttcaaattatcaaacagacactttcctcaaacatataacatgatgaggcagttcattcaggctgtatgtcataaagctgttccagccacctttttctaacggcttctctatatcttttacatggagacaatgagagattgcttaggacacatttgactgtacattcagacgtaggaa

SEQ ID NO: 354699 - DNA, 428 bp, Homo Sapiens
  misc_feature (18)..(18): n is a, c, g, or t
  misc_feature (399)..(399): n is a, c, g, or t
tccttgacaaaatgccantgtgaaaaaattttaattttccggcgttgcaatgcggggaggagaagtcagattatgtacatagttttctaaaaagcctttcttctaaaaacgaaaaaagaccccccacccaaaatgtttcgagtcaacaaatttaagagacagagcccattttctccataaatttgtaacatgctatttttatgtgcatgttttatgagttcaaaatgcaatgagggaaatctgacaggggaaattatctgtatgaactaaaagtaaggggaaccccggggaatggggaggacaggatttttccaagggaaccttttttcaatggaaaggggaagggaagtttaaaacctataggggttattttttgtagggagccttgaggtgttttantacgggggccccaggaaattaaaggtatc

SEQ ID NO: 354700 - DNA, 754 bp, Homo Sapiens
gcgactggtacggtccggacgttctcgggatatcgtcgacccacgcagtcgccacgcgatcgttagagtttagcccaggaaaggaatctccctctactgatgtattcgaccacagtcccattgatggattggaaaaactcgcaccactagcccagacagagggagggaaagagataaaaactttacccgtttatgtcagtattgtacaagtggggacgcaactatgaacaaggagatacaacaaggaggtgtaaaaacacatcataacgtcaggaactgtaacgacagtacaagaaaccagggggaccttttatacaactagacagcaacaagcaacctccttctccccaaggtagtccagaagatgatactctagagcaagtatcctttctagacagctctgggaaaagccctttaaccccagaaacacccagttcagaggaagtgagttatgaagtttacatctaagacacctgactcgctcatagcttatataccaggcaaaaccagaccaattcccgaggtttctgaggagtcagacggaggaggaacaggccaagtcaacctcccttaagcagactacagtggaggaaacagcagttgagacgtgaaatgcctaatgacgtgagcaaagactctaaccaaagacccaaaaataacagagttgacctatattgaagtttcaccctcctccagcactggaatgcggaccagcattgagtcagataagaagcatcatgatctccagaaacag

SEQ ID NO: 354701 - DNA, 508 bp, Homo Sapiens
  misc_feature (489)..(489): n is a, c, g, or t
gcggccgctgggcagcgcccttcgtccaggctcgcgccccagctgccgccgacgacagcggccgagagaagggggggtctgactagacgcttacggggcctcggaccccggcgccgcggcgacctcggaggaaccggctccttgcgtcccgcctccctgggagctccgcacgggatttgcagatttacagaatggctgcacattaatggaaagagaagcataaacctatcttctttcattatggagggaggtttggcagatggagaacctgatcgaacttcgcttcttggtgatagcaaagatgtccttgggccatcaactgttgtagcaaacagtgacgaatctcagcttctgacaccaggaaagatgagtcagcgccaaggaaaagaagcttatccaacgccaaccaaagatttgcatcagccatctcttagtccagcaagtcctcatagccagggttttgaaagagggaaggaagatatttctcanaataaagatgaatcttcac

SEQ ID NO: 354702 - DNA, 687 bp, Homo Sapiens
  misc_feature (654)..(654): n is a, c, g, or t
tttttttaatttaaatgtttgtagctgctatgtggacagttgttttctagtgtggtctgtagcccaataactggggaacgagttacagacaaacatcaccgtaaatgactcacaacattataaacagttgtgagaaaatatttcacattatcaaagctgtacaataaaaaggtaatgtttgtataatgtggttgcaaactcttaatttatactattgcacttttagtattttgtattagggaggtttgtctataatttgaaaatttaaaaaaatgtaaagtattttataaatagtacttcagtttaaggaaaatgggaaaactgttacagttccttgttttgtcttatggtcaaacaatattagaaatctctgccacttgaaaagccaccaagacttgtcagcttttcagtaaagtagggcctgccgtttcttaaattaaaatgatttatttaacttttccacaaagcccactttaaaactgtgaccgccccctaacgaaaccttggtgaattcatcctagggactatgacgtcagtacaagccagggaaggaactagggataaccttcttgcaggtctgatttttcatgtaaggcgggtctgtctctctctctcacccacagacaaggattgtgggctgcctgggtggcactnggtcacatgttacagtaaaaccccaggaggaaa

SEQ ID NO: 354703 - DNA, 1989 bp, Homo Sapiens
gagaccgggaagcagccctgtgggagatggaagagcaccagctgcaggagaggcaccagctggtgaagcagcagctcaaagaccagtacttcctccagcggcacgagctgctgcgcaagcatgagaaggagcgggagcagatgcagcgctacaaccagcgcatgatagagcagctgaaggtgcggcagcaacaggaaaaggcgcggctgcccaagatccagaggagtgagggcaagacgcgcatggccatgtacaagaagagcctccacatcaacggcgggggcagcgcagctgagcagcgtgagaagatcaagcagttctcccagcaggaggagaagaggcagaagttggagcggctgcagcaacagcagaaacacgagaaccagatgcgggacatgctggcgcagtgtgagagcaacatgagcgagctgcagtagctgcagaatgaaaagtgccacctcctggtagagcacgaaacccagaaactgaaggccctggatgagagccataaccagaacctgaaggaatggcgggacaagcttcggccgcgcaagaaggctctggaagaggatctgaaccagaagaagcgggagcaggagatgttcttcaagctgagcgaggaggcggagtgcccaaacccctccaccccaagcaagggccgccaagttcttcccctacagttctgcggatgcttcttaacaaccgcccggggctgtggctggcagcttggtgggccccaggggccttctccttcattctctgtgaacatgtaactcagtgaccccttttccctcttgcgtcttgtgccatgcttcaagatccatgcccctcgcccttgtgccaccccaacctgttgcctgatagacctgccccagcgttcctgacattcttgctggacctgtggcagtggtgaggtgtaattcattttgtcacctgaaccctaattgtatattctccttgagccccagatcccttcaagctggaagggatggggctgttggtggggtcaggctccaagaggaatgggtgttctgtggcctcgagtcctctcctgtttgcgaaaataccaagttagctctctgtgggacaaagcactgctgatgaagtccccgtgggctcatccgggctggaaattcttggtttttcagccattccctgcagagtcactcaatcatcaagtccctcacagccatttctgttcccagaggagccaggcctgcagctggctgctcaggagatggcctcattcctcctgttctcccagtttgctttccacttaagacaaagccttgtctatgtggggggcggggaccggggaaagagggaggctgaaatgtttattctgcttctcccgtgtttcatgccatctcgcgtcccccttcctgcacatgggtgtgaatgcacacacatacgcgtacacacaggacttggtctgctggcctggcctcttctgcccaggtgggttggaacacgtttgctgcctgagcctgtgccactgagcatgttaggtggagcagttggtgtggcacgtgcggggtgttggcaccggaggcatggaaaagcacaggctgtactgccaggctgcgatgcgtgctggcccccgcacaggctcctgtgtgcagggactgattcctcagcacacgaggcttccacaacccagtctgctccatagcactctggcccaccctgtctgcaggtgaaacaggagggctgtttgcctctgccccatccccccgactgtgttcaggagtcccaccttgcatttcagacctgggctggcagtctgttggacttctcttcaggaagaaaaagcatcagggggaaatggaatgcccctgccccaggaacatggcagaagcacaggttctgtacctcagatggactcctgctgggccttcggggtctcagttggcttcccccagattctgattctacagctgcagaatgtatataacgcaataaaagcaaatgtttgaaccgaataaaaaa

SEQ ID NO: 354704 - DNA, 921 bp, Homo Sapiens
agtggtactcttcgggcggactgcaggtgcgcgaggtcggtttcgacccccgcctcagccgcgtggtcatctggaattcttcttggatgggcttggttcccttcgggttggctcctgctccgacgtcgtggtggatcatgcatccaaactgaagctgccttggacatcaagggatgccggagcagagacttacgcccggtaccgttacccaggatcactggacgagagccagatggccaaacaccggctgctcttcttcaaacaccggctgcagtgcatgacctcccagtgatggcccgctggggatttctgactgtcaggctgggcctgcctccttgtccctgccaggaatttccaacaaaccccaccaccctgtgagcactctactggctgtccctgagcctctagttcctcactcttccttttcagaacctgatgcccagtaggggttgtcctggtgacacccctcctttttccagtgcccagaggcctggtggagccataacctctcccacagccagtgccaagtcctccccctgcccattctcatggggcaggaaatggggggatcactttccaagtgccaaagagcccagagggactctaagaacctaaggtggaaacactgtcctctcatcttgggaccgagggggtggggaagttccccaacacataatcccaagactgtgcccctcatctgcatcttcagatccagtactctgtgtacctgctccagccccacccccacagagagaacttgtggctctggggctggggtgagggctggtggttggtgaaagccattcttagttgtgtctctgcaatgctgtgggcacaaaagaaggggcaccagagtccctgtgcaaacacctagactcacttcatggattccaaagctctcagcttcattttattagttac

SEQ ID NO: 354705 - DNA, 307 bp, Homo Sapiens
ctcagtgcaaaagggggcagcctaagggggctgtcattttcacgctaaccttgacccgaaaagtattcattcattttgcagtgagggagagccaccaccgccccaaaccgcgaaaaaccaaccagtaacaactttatcattcctttttaacagtcacaatcgtgggcaaatgagacttaagttacagcagctagctggcactcacactcccctcggctcaggctccttaaacaacaacaacaaaaccctaatgcaagcgacccaccggggctcacaatgtcaaacccttacctggcatagggaaaat

SEQ ID NO: 354706 - DNA, 433 bp, Homo Sapiens
  misc_feature (46)..(46): n is a, c, g, or t
ctccaaggtcacctgagccacagggtccattgaactgtatccattntccatgaaaatctctgtataccggcccatcttgattgcctctagccattcacctactggatctgtaggcccccagatcctagtgggctatgttctgccaataaattagatactctgcaggatgcattaaccagcgtcttcagactacttgggttacgtatcagcttgtccaacatgttgactatttcatcaaacttgggcctgctatttcgctctttctgccagcaatccagcattaactgatagagagcagcaggacaatccatggggcttggcagacgatagccttcctctaccgctttaatcacatcttgattggtcatctcccagtagggtctctctccataagacacaacttcccacattactattccataactccagacat

SEQ ID NO: 354707 - DNA, 1154 bp, Homo Sapiens
  misc_feature (370)..(370): n is a, c, g, or t
gtagcgaggcctgggtggcgaattcggcacgaggctctgcaaagatgattttgcttttccctagtgctggtatactatagagaaacccctggggaccatgtgattaagttcctatcttttgaaagtttgttctgcagagacttctaggaggatgctgtgcctcccaagctcagagcagcctctgtcctggctgtgcacattctcccttgattccacttgtgtggagggattgaacacaggcaaagaggtgctgctttgcttcttcaatggcaccttcattctccgttgtcattgacttcaagatgcctcttctacctcttccagaaagcacaggccaggggatctgggtgtgtgagtggaaggagagggncagaggtcccctgaggtcatgcattgtaatcatcatagaaggagagcccaggcctgccctcacgctctccatcataggctgacaccaagaagactccgtcttggcacaatctcacacagctggggctgtagcaaccctttccaacccctttgctggttgctgggcctcattctagcaccttgtccttagagcagattctagcacatcatggcagtgggaccaagcgtggtcccgaggaagggccagagcctggtagagactagggaagggaggtctcctctagactcactcacattgccttgagctttccagttaagttgctgtaagcacctgggctgaggagccagtttttgttccttcctgcgttatagcggggccttgtctcttcctctgcaggacacagatctggaggacgtggactggggtaggaaaccaccctgagggtgttagtacctagtggtaaaacggatgacctcatttctaaggtgtgttccccgtgcatctgggcacaatcattggaattccttggacccactgggattcatggctttgtatccaactgcatccaggcctgaggctgctgacgtttcacaccagccccagtagagagtgcccttttgtatcttaacccaaaaattgagccctgggggtcgcgaaggggagaaggggtgggacccaatactgagtgcctgcagcatctactactctgtcttcactattcagaacttgtaactaaagtatttaaagaaactgattttaaatgcaaattaaagggcagatattc

SEQ ID NO: 354708 - DNA, 748 bp, Homo Sapiens
  misc_feature (87)..(87): n is a, c, g, or t
  misc_feature (111)..(111): n is a, c, g, or t
  misc_feature (175)..(175): n is a, c, g, or t
  misc_feature (180)..(180): n is a, c, g, or t
  misc_feature (184)..(184): n is a, c, g, or t
  misc_feature (598)..(625): n is a, c, g, or t
aggcctgcctcacgctctccatcataggctgcacaagaaagactgtctggggcacatctcacacagctggggctgtagcaacctttnccaacccctttgctgggtgctggngcctcatctagcacccttgttcttagagcagattctagcacatcatggcagtgggaccaagcgntggtnccgnaggaagggccagagcctggtagagactagggaagggaggtctcctctagactgactcacatttgccttgagcttttcagttaaagttgctgtaagcacctgggctgaggaggcagtttttgttccttcctgcgttatagcggggccttgtctcttcctctgcaggacacagatctggaggacgtggactggggtaggaaaccaccctgagggtgttagtacctagtggtgaaacggatgaggtcatttctaaggtgtgttgcccgtggatctgggcacaatcattggaattccttggagccactgggattcatggctttgtatccaactgcatccaggcctgaggctgctgacgtttgacaccagggccagtagagagtgcccttttgtatcttaagccaagaagtgaggcctnnnnnnnnnnnnnnnnnnnnnnnnnnnnagccaatactgagtgcctgcagcatctactactctgtcttcactattcagaacttgtaactaaagtatttaaagaaactgattttaaatgcaaattaaagggcagatattctcaaacaggaaa

SEQ ID NO: 354709 - DNA, 396 bp, Homo Sapiens
caaagagacccccagtgtgtgtggctccccctacgcgtcaggaaacatcgggcccattcaagcagcctttaggttatagagatgatttacagtcacatggaaggagagttttgcttaaaactggtagaagaaataggtaaagtaagtgggaaatgaggtaagcttgctagctacacaaatcatcttcacaactcgaagctcaaataccctcagtgttcagctggtgtgtcttcactatttgatgtgcagtaaatattctcgcttctttttcactataagagcaacgtcattttcagtgtccacaagctggattcacgtagatcccccaaatccttaaacatctgtgaccgttggtgtataaacggtcgaagcatttgatcaacttcctaaaaaaaa

SEQ ID NO: 354710 - DNA, 798 bp, Homo Sapiens
  misc_feature (46)..(46): n is a, c, g, or t
  misc_feature (48)..(48): n is a, c, g, or t
  misc_feature (401)..(448): n is a, c, g, or t
  misc_feature (665)..(679): n is a, c, g, or t
ggatcctctagcactggcccgcctactgggtgcaaaaatagtatgnanctaccctttgttaatttattcttaaatcaaaatactaacttttaaaaaacatcagaatcatcagcattgttcatcagtagtaaaatgagcttctcagtcaaggtcataccaagtcagtgaaaagtgtgactgcaaaaaggaacaaaaaaagtgaaagcagaaagtagaaatgggtgatttagcatgtaaaaccgattgcccagttgcttgatgatgaaatcaacatagtgaatactgtgtctgctccctctgccaaagcttctaggtcaaatggaccccgttccacacctggaaccgctgtacaaaaagaagaatgagactctttaaaaattatgcacatacacatgcacacnnnnnnnnnnnnnnnnnnnnnnnnnnnnnnnnnnnnnnnnnnnnnnnnagttcatcagccagctacacatgaggaccaaaatgcttcagtctaaaatggaagatacacatttttttccttcaaaatgcaagtgagaactgaagtagcttttttatggagttaaatgtaatccttctgtgtaccaatccttgttgtattttatatttcctaggacacagatttctagttgaccacttaacatttgtaactgatgatgtgttgaccnnnnnnnnnnnnnnngccaaactagagaaaatgtccatatacttttgctgtaaatgtgtttatatttatttgaaatgaaacaaatggtgaggaaacatccattatttgttctctattttaattgctatgtatct

SEQ ID NO: 354711 - DNA, 516 bp, Homo Sapiens
  misc_feature (36)..(36): n is a, c, g, or t
gagggaagggaagaggcagataggaaatgcctcaancttcttctcgctttgatgtttacttcctcactagaagccaaaggtaaaggtgtccatcttcagaaataatgcctgtaataatctttttagagagtccaactatttatatcctctctatagtaagcatttgaatatcccagaacctcctttccgaggatcctctgttaaagttgcccagatgaattgaaaaattgaacttgcctttttttgtttaacacagtgttccctataacaagcctgtgactaattttcacttaagtgattgaacccaaatttatctaataacatttcaggtgaaaattatattgcaccaaaactttgacacaatatgcaaaaatagtatgaaactaccctttgttaatttattcttaaatcaaaatactaacttttaaaaaacatcagaatcatcagcattgttcatcagtagtaaaatgagcttctcagtcaaggtcataccaagtcagtgaaaagtgtgactgc

SEQ ID NO: 354712 - DNA, 311 bp, Homo Sapiens
attcctttagaacaagaagggtgttatgcatatttttatgtgtctggcattcaataaatgtttgttaggtaaacaaaattccattcatttctaattttctcatggtttctagtaaaagacaaacactcatcttcaaaatgttatgagagttgggagatgagtggtacaaaaaattgactgaaataataaatttcacggtttctctatcatccatcttgaaataatctctctgtcatggtgtgctcaagatgctttgcttttcaacacctcaaaaaatctttggttggctgggcatagtggcgcatactttt

SEQ ID NO: 354713 - DNA, 466 bp, Homo Sapiens
aataaatgggctggcccctggtgccctccctctttgtatgtgccttgcttgcccctcccgccttcccaccatatgatgatgcagcaaagaagacccctcaacagatacctgcctgtaaaccttggacttcacagcctccagaactgtgagctaaataaacctctgttcctttataaattacccagtctgtggtattcagttataccaacagaaaacatacgaacatatgggctgcctagcccttacagtctttagggcataagtcccatagggcctacctgtaaggataaaaggtgttggattaaggagtgtcagagagaaaaatcacatctgagaactaaaaaatgagagatttggtaaagagccaggagccatgctctttcttcagtgggaagagttgctccccagttcctaagaggtcaggcgaggatattagtaatacacgacctttgcctgctacatgcat

SEQ ID NO: 354714 - DNA, 377 bp, Homo Sapiens
cagctacccttccaacatcctgtgtccaggcctaatattttgggtgaaaggaattcttgtgtttctcaaagaactagagctgaagcagaaataagttccaatgagcaagtgtccaattggaccattgaatgaaatctagtgttttaaacaattctgatgtttcaatgttttgttctgttttcttttgatcttgtgagcagtaagacatattttatgtgggtggtaaaggaagaaatcaagtaacagaatgaggaattgttcccaggaagagttagagttgggacaaatgggttgttaactttgatttttagatcttctctgaagacattaaacatggaatggtcatctttagaaaaataaaagactatgcaactcca

SEQ ID NO: 354715 - DNA, 1068 bp, Homo Sapiens
  misc_feature (967)..(967): n is a, c, g, or t
cactgggactttgctgataaccctggaggacgtgaatgacaatgccccgttcatttaccccacagtagctgaagtctgtgatgatgccaaaaacctcagtgtagtcattttgggagcatcagataaggatcttcacccgaatacagatcctttcaaatttgaaatccacaaacaagctgttcctgataaagtctggaagatctccaagatcaacaatacacacgccctggtaagccttcttcaaaatctgaacaaagcaaactacaacctgcccatcatggtgacagattcagggaaaccacccatgacgaatatcacagatctcagggtacaagtgtgctcctgcaggaattccaaagtggactgcaacgcggcaggggccctgcgcttcagcctgccctcagtcctgctcctcagcctcttcagcttagcttgtctgtgagaactcctgacgtctgaagcttgactcccaagtttccatagcaacaggaaaaacaaaaatctatccaaatctgaagattgcggtttacagctatcgaacttcacaactaggcctcaatggttccggtttcctatttgctttacaatttcacttagtctgtacttcatcattttgacagcatcttcctccctcctttaattaatggaatcttctgaattttccctgaatgtttaaagatcatgacatatgacttgatcttctgggagcaggaacaatgactactttttctggtgtgttaacatgtcgctagccagtgctccaggcacccagctttgtctgtgggttagtattggtgtatgtatgagtatctgtatgtatatatacacggtatttatagagagagactatcctgggagaagcctcgttttgatgccattcttccttgcaaggttaagcaaggtggggtgggaaactaaaggacacctggaaccctccaggggcctcccgcattcaaggtcaggcatngagggacagaccacaggagctgtccactttttgctcccgaagctaactttcttccactgttccccgtttcagtctggaatgctggccacaaccagccaggg

SEQ ID NO: 354716 - DNA, 307 bp, Homo Sapiens
  misc_feature (54)..(54): n is a, c, g, or t
  misc_feature (116)..(116): n is a, c, g, or t
  misc_feature (170)..(170): n is a, c, g, or t
  misc_feature (180)..(180): n is a, c, g, or t
  misc_feature (187)..(187): n is a, c, g, or t
  misc_feature (263)..(263): n is a, c, g, or t
ggaagaaggtttctcagaggacagccttattaatttctcagaggatgaatttgnacaatggcagcacgttgcagtcacaacttcttaaggtgcttcagaggctgattgttcctagnaacacagagtaatgaactattcctgaagagcaatgaaacaggttttgaattttnttgtatctgnacttagnaacacatcagtccccatcaacccatgacttctcttcagtatttgcatgctcagtcaatcacatgtcaaggcatgtncctctgtgcagtgatacgagcttttgcatcagcactgtgcatgt

SEQ ID NO: 354717 - DNA, 1156 bp, Homo Sapiens
taaagaaacaacagtcaagcctaaaatttgagaccccgaggcagcttcccgagggagactgctcagacaggaactgcaggacagaagtggatgccccacagaccctggccccctccccaagtccatcccctctctgtggcatgaggaaggccgcgtccgagttgacctctgaatgtatgtgatgagaggcagagctggatattgcatttctaaggcttgcattgctttcccctcgcccgcggttcttggcgcatggaagaggcggtccagccatctgatgttgatcctgtctcagtctccccactgcctgtcaggatgagttagtcattgtttttctccgaggcggcctgcttgccacagccctgctccccaaggcctggtggctttgccgaagctctgggaccgcagccccagcgaggcccccaacctcacccagacgaggccaggagccccgccaccctccacgggatgtgcaccctcagaccccattctctctgttcgtccttccttgaccagtctgtaaaccttcactgtttggggatcgtcctgtccatccatgtaaatgtaaatgttggccgagtcggtatttattctgattgatttttattttattctattattttctccgagggatgagggtggggggtgtgggaagggtaccacagatcaggccggggcagctgtaggggcgggggcccagacagccaggccgccaccagagcagccccatggggtgccccagacgcgggcctccaagaagccaagtcccagtctgttttctggcatcagacaccggcccgtgttccttgtcagacagacagactctcaggcctgcctggggagtcgtgtccctcagctgcagggcactgtgttgggaaaccattggctgggcctttgaggacacagatcagaagaaagaaagacaactttcctctgcgcggaacactcacacggaagggctggccgcctccctgagccggctgggagtggacgacaggacctacctccccagagcaagggcctggggcttcccgccaaagctgccgcggaaccccgctagtgcgaccaccctccctccgtcggtatgtcctgctttccagctgaacccaaactacaagtgggtttaaaaaaataaacaaacaccaccaccaaaaac

SEQ ID NO: 354718 - DNA, 2460 bp, Homo Sapiens
  misc_feature (111)..(111): n is a, c, g, or t
  misc_feature (1312)..(1405): n is a, c, g, or t
  misc_feature (2147)..(2147): n is a, c, g, or t
  misc_feature (2150)..(2150): n is a, c, g, or t
  misc_feature (2180)..(2180): n is a, c, g, or t
  misc_feature (2332)..(2332): n is a, c, g, or t
  misc_feature (2354)..(2354): n is a, c, g, or t
  misc_feature (2356)..(2356): n is a, c, g, or t
  misc_feature (2362)..(2362): n is a, c, g, or t
ggataaaactttgactgtcaaaagactgagtagacggaaattatatgtatgctctcagagacagaagagagattgaagagaaaaatatcttttgagagggagaacagatgnctcagtacatggggtctggattttaattctttgccgtatcaagtacctacttcagatgaaggaggcgcaagacaaaatccaggacttgcctatggaaacccatattctggtatccaagaaagttcttcccccagcccgctctccatcaagaaatgccctatctgcaaagcagatgatatttgtgatcacaccttggagcaacagcagatgcagcccctttgtttcaattgtccaatttgtgacaagatcttcccagctacagagaagcagatctttgaagaccacgtgttctgccactctctctgagtatcccaacctcttggatgtatacagagattttatagaatagaacctatagcttctaccatgagttatatgagtcaagatcctgcctaacctgaaattattagggatttactcagccctgctgccgctaacagtggagttatgtcactgatctgaaggtcactgttaagggcttctgctgccatccttgtgggttgctacctttaagtcgcataactctagctgtatcatcctctcacctgtcattcttctgagggtctcagtacaagggccctgggatggagccaacctgggtattcacaacaggcctgacttgatactaagtgattagttttccaagttgtcccactgccattcaaagtcagcccttgagtgtatttgttctcagtcctaaccctggggccagagattggtccgaggttgagaattccttcctcctcatccttggtgttgctttctccaaatgattgttttagactagccaaaaatgccgtggcaaagagctcagaaatccaatttggataccaaaggtttctcatgttaatttctcagcccccaaagaagcatcttactcctgaaccttagacaggaagtattgtttcagtcacagaaagcttttctgggtacctctggttagcactttctactctctgatatttcctatgtacatagcttttattgttgtaaatcctttcttaatggttaaataggattgttagcaactatgggtttgcagttttctgagtaggtgagttttgaatatgggtaaatcagaataatgagacaacttgttaatctctttaatactaaaaataaattactcttctatttcagggacttaggtaatttaaaataaaccttcaatttatggtcttctgttttgaagctcatgggnnnnnnnnnnnnnnnnnnnnnnnnnnnnnnnnnnnnnnnnnnnnnnnnnnnnnnnnnnnnnnnnnnnnnnnnnnnnnnnnnnnnnnnnnnnnnnggaaagaacgtacaactcacatcgatacctaccgaaaataactgggaccatgctctccaaccgtcggggccacatatcatgtgccccttttcgtggtccccccccgcctggttccacaatattccgccggtctatcttcctgcagggcggggggcccaagctatcgcgacaatagacctgtcctgtagtctgtgtttttcccgtacaccagatccgtcgattaagaacaccccccgtggagttatgtccccgacaaaacaagactctttcgggcgccccctgatccccaccccggctccgcatccttccccgcgtaaccccgttttcggcagacgccccgccgggccgtcgctcctatcccataccggcgccgccctcgcatacctcccaccgcgccctattatttatttaacgtcgccctgctggcccgccaccgtggctgcaaagtaaagcggggggcgccgggtggcggaaacaggctgtaaagcagtgtacaagttcatccgcggcgccgtgcgctcggcggaaaggagcgacttccgttcgcctaacacaccagccttcttgctcggaagcgaagcactatagcgcgctagtattcctcggcggccgaggagccgcattcctcccccacccgcacacggtactagcgcccgcgtcgccagtagattaatacgggactgctccctgtggtcacgccgcgccgaggaaaaaataagtgtggtctcgcgcgccaccaccntgntcgcacccctccccacacgaatatggtgtntatagccgcccccctaggtaccgctaattccgagcgagcagaaagatgtggctacggaagaaacaccccggcttacacgaggaccacaccgctacctggtgtagcccttggggagtatataacgcgcgcacgccgcgcgcggcgccgactanatcataaagtctttgtgaagangntccgcnctgacgtcaagcgaccgcgaggagagcaagctcgccctatgtaaccgaccccgccctcccacgcgtgatcgcggacgcacaatcgcgggcgccgacta

SEQ ID NO: 354719 - DNA, 477 bp, Homo Sapiens
cttttcccccggaagacgcccccccctaagttaaggccaatacaagaaaaactgcccaattttaagcccctaaagtaaaggcctgtgaagaaaattccattttaccattgggtagacagtaaaaaacaagtaaaataacttgaccatgagcacctttagatcccttcccctcccatgggctttgggcccacagaatgaacctttgaggcctgtaaagtggattgtaatttcctataagctgtaatagtggaggtattgtgggttcatttgagtaagccctccaaagataccattcaaataacctgggagaatgtcataaattattcagataattatcactgcatgaatctgattcagaggcatgcatttacatatgttgccctaattaccatttgatgatcataaatacaagtgaatgacattggacttttagtaacaaacttaatttttaaaaaggtgtagacaatggtggttaaa

SEQ ID NO: 354720 - DNA, 838 bp, Homo Sapiens
ggccgagcagggccggtggcggcggcggctgcggctacggccggagacggcagtgttggcggtagtggtgggtggcaggggcctgtgaccgggagctgcccccggacccgggcaccatgagccaaggcccccccacaggggagagcagcgagcccgaagcaaaagtcctccacactaagcggctttaccgggctgtggtggaggctgtgcatcgacttgacctcatcctttgcaacaaaactgcttatcaagaagtattcaaaccagaaaacattagcctgaggaacaagctgcgtgagctctgcgtcaagcttatgttcctgcacccagtggactatgggagaaaggctgaggagctgctgtggagaaaggtatactatgaagttatccagcttatcaagactaacaaaaagcacatccacagccggagcactttggaatgtgcctacaggacgcacctggttgctggtattggcttctaccagcatctccttctctatatccagtcccactaccagctggaactgcagtgctgcatcgactggagcccatgtcactgaccccctcataggatgcaagaagccagtgtctgcctcagggaaggagatggacttgggcacagatggcatgtcaccgatgtctggtgtatctgggggatttgtcccgatatcagaatgaattagctggcgtagataccgagctgctagccgagagattttactaccaagccctgtcagtagctcctcagatcggactgcccttcaatcagctgggcaccctggcaggcagcaagtactattatgtggaaagccatgtattgctacctgcgctgcatccg

SEQ ID NO: 354721 - DNA, 946 bp, Homo Sapiens
cattcatagttcgaatatcgtcgacatgttagaagcattgatgtctacaagggttgacagttatacatactgtaatgcttttcaatgctctgaggggtctaggtggacagcaccggatagaatccctgtgaaggtgaagggtctttagggtgaagggtgatgttgtttttggatctcctcaatttaaatacaattagttgtaggctacatgggaaattctctactaggcctccctcatatgtagtcttgggttcactgtttattatatgatttatgggccctaagaaatattttatataaatagtaggcgcccattggattcttactatattgacatttaaagccctttaagagcttccttttagatgattagttgtttcaaatatcagtgttaataagggcaaaagaaagaatttaaatacaggtaatattaagaggatgacaatttcacagacttcattttggtgtgtcagttttctcgttttgtattttataagacactacagtccgggttaaactatttcctaataaatcatgaagagctgaaaatagtttctagtggcaaacgatttggtttggaaaagcttcaggctcccctgccttgcgggatgtgtaaatctaattagacagttagataggtaaaaaacattaaacccttttagaggactatctttttacaaaattgtttcattaacaagagtgacaatttgcatgattgagacatttatatgtaccataaacataattttttttatcaggagttcagcagggctcagtaacatttgcttttatttttaattgcacttgcttgtagggactgggggccatcttgctctatgacgtggttaatattaaataagtcctttctaaagaacagtgtccatcttgctaactaataacatcacaaatgcaatggatgaaaggtggaataaactcatagattttt

SEQ ID NO: 354722 - DNA, 822 bp, Homo Sapiens
  misc_feature (284)..(292): n is a, c, g, or t
  misc_feature (723)..(777): n is a, c, g, or t
acacggaccaataaacaaagaagcgaagataagaaagaaggcctcatatccaattacctcactcattcacatgtgagcgacacgcagacatccgcgagggccagcgtcaccagaccagctgcgggacaaaccactcagactgcttgtaggacaaatacttctgacattttcgtttaagcaaatacaggtgcatttaaaacacgactttgggggtgatttgtgtgtagcgcctggggaggggggataaaagaggaggagtgagcactggaaatactttttaaagnnnnnnnnncatgagggaataaaagaaattcctatcaaaaatcaaagtgaaataataccatccagcacttaactctcaggtcccaactaagtctggcctgagctaatttatttgagcgcagagtgtaaaatttaattcaaaatggtggctataatcactacagataaatttcatactcttttgtctttggagattccattgtggacagtaatacgcagttacagggtgtagtctgtttagattccgtagttcgtgggtatcagtttcggtagaggtgcagcatcgtgacacttttgctaacaggtaccacttctgatcaccctgtacatacatgagccgaaaggcacaatcactgtttcagatttaaaattattagtgtgtttgtttggtccagaaactgagacaatcacatgacagtcaccacgaggagagaaaatttnnnnnnnnnnnnnnnnnnnnnnnnnnnnnnnnnnnnnnnnnnnnnnnnnnnnnnngtctaataagaactttggtacaggaacttttttgtaatatacatg

SEQ ID NO: 354723 - DNA, 368 bp, Homo Sapiens
ttttttttgcttctctaggtgaaggtttaaattaacttcagcatgggtaaaactattctttccttcttttttctctcccagagttctcaccacctcctcccaggctaaatccttcatgttgcaggagacagagaatcccaggtgagacccggactttttctcctccctcccttccttttttcaccgtgttcaggataaattatcttggttttgtttctggagggaaaagggcagagaggccctgacttgaatctcaatcacatttctgcacacagtacctgaggagacagaatagcagaggggtgggaacaattaacattgctttatggggctttaggaatggagaaaaaataattcccactcttttt

SEQ ID NO: 354724 - DNA, 804 bp, Homo Sapiens
  misc_feature (476)..(476): n is a, c, g, or t
ggtaacattgttctccgttaagatctttgcaaaccacacacaagaatgctggtcatcctgccaatagatgctgctcacagaaccaaatttcctgtgctgaattgtcactcatgggcttgagagtaggagactggagaccaaggtggctagaatccagttgggcctgatgtctccctgttgaaagggctccttgtggaatgaatagcacatggctcctgtggtggatctgatagtggcatagcaccaagtgatgcaggcctgccaggggccacagacacagaagatgctcccggggtcccccatgtactccagacacactgcaggccacctctcccagcaggttgccagtcatgggccccatcatcatgacttctgtccaaggtactgtgtgcagaaatgtgattgagattcaagtcagggcctctctgcccttttccctccagaaacaaaaccaagataatttattcctgaacacnggtgacacacacacaggaagggagggaggagaaacaagtccgggtctcacctgggattctctgtctccttgcaacatgaacggatttagcctgggaggaggtcggtgagaactctggggagagaaacaaagaaggaacacgaatagttttacccaatgctgaagttaatttaaaccttcacctagagaacgcaagaaacgatgaccaacagttttcccattttgggtgctccctttcctagaagcttaagcccaagggtcagatacgtaaatggggtataccagggcaactaatcagtcttattccaagctgggtggatgccttaccg

SEQ ID NO: 354725 - DNA, 1008 bp, Homo Sapiens
  misc_feature (51)..(51): n is a, c, g, or t
  misc_feature (72)..(106): n is a, c, g, or t
  misc_feature (145)..(199): n is a, c, g, or t
  misc_feature (283)..(344): n is a, c, g, or t
tgcatgtatatagggcctagcgcttagagcgaacgacgagcgccaggagtnagtgagcgaggaagcggccgnnnnnnnnnnnnnnnnnnnnnnnnnnnnnnnnnnncagtcgacggtagcggacatatgcccgggaattcggccnnnnnnnnnnnnnnnnnnnnnnnnnnnnnnnnnnnnnnnnnnnnnnnnnnnnnnnagctgggactagaggtgcaggccaccacaccagctaatttatgtaattttgtagagacgagtttcaccacgttacctaggcttnnnnnnnnnnnnnnnnnnnnnnnnnnnnnnnnnnnnnnnnnnnnnnnnnnnnnnnnnnnnnngtataaaccacaagtgcccccgtttttactctttactgcatccttcccatcagtattaattcctcagaaatttagtacattcctccaccatttcaaaatgctcccagaactcacactagttggtacttaactacaaccttcaacctcaccatttaatttcgatgtctgttctggatttaccaacagtactttctttcatgactacttgatttagttaagaatgctcactgtacactgaatgttaattactcagcttaattcacactgatttcctgtttaaaaatatgatcccctccaggcattcatgtgaagtcagggtacagctgatgccagctacagaatcactatgtttcaatatgggaatatgaaaagtccttaacacattaatgtgcaaatcattttcttactaatggtatacaaatattgatcattacaaaatagttatcaggttttttcacctaggaactaatacatcttccttcaaatattcaggcataaataatggcttaaatgagtctgggggggaatggaacgttggcatcaaaggcttgtgaaattcctgtggccttattatagtagacaacttcaaggtgcgagtcactagggagggaaagccagaggaaaaggggggggcaatggttcaaaaaagcgggccctgaaattg

SEQ ID NO: 354726 - DNA, 346 bp, Homo Sapiens
tacaatgatcaataatgctctcagtgtttatcagcacaaaatttacttgtgatagagataatgccagtcccccttctagtggctcttaaaacctgaatttcttactcttatccacattcttttatatgaaactgcctttttatcatcttgctaccttgtgagctttctaacatggtgtctttggaccaaaggggagttcttttaaggtactagaagtgagtttccttagggtgggaaaaacatttctagggattgtgtgattgggatttcagtggaaagctttcaggtctctcatgaatgatgttgtcccagctatgttatattttagaccagacatgtactgatg

SEQ ID NO: 354727 - DNA, 1266 bp, Homo Sapiens
  misc_feature (30)..(30): n is a, c, g, or t
  misc_feature (234)..(234): n is a, c, g, or t
  misc_feature (903)..(920): n is a, c, g, or t
gggaaaggacccgttgcctctttttttaancccgccatggaggaaattttccccaatgtccacttctccttactggggggattaattaaaagagaaaagggggaattccaaaaaagggaaaacccaaatagggaccatggcattagttttttattaaaggaagggctttaggaaaggagtaaaagggaagttaaaggaaaaagagggttcaggccctccagaaaataaactccntacatccctcaagtagagagaggctgaaagcccatatgtaataggcactgaaagcctatcttttggcatgaatttactacaggcaaagccaccatcatatatctattatgtaccgaggaaggctagactgttaagtgtcacgtatatacggtctcaatggagcctcaggaagctattaaacaacctcaaatcacaaaatcagaaaagtgttgaacatttagaggaagaatagaaaggaaaaaaaagcctccaagttgtgtattatttgtcagtaaagcaaaacaaatgtgtaagcccacttatatttaataatgtctcactgaaattaaagtaataggggagagtctgaagtttccacagataaagagagtgctgtactcaaatttactacaaaattaataatagtaaatgtaaaatatgtatttatacagccttttgcagacttatgaactatctcaaattcacgaatcctattttttaaatacagttttaagtttcaaccacttgtatcaccagaattttgagacttaactcccatggttaagagatttccaagctgtgttcacacctgtagtcccagctacactgaaagctaaggcgggaggaccacatgagcccaggagttccagactagccttgctctatttaaagagcaagactccactgccnnnnnnnnnnnnnnnnnncaaagaagagaattccataaattacttggcttcttatattccatctcttcagtgaaacagtacatcacttaaggctaaaactatgtcttttatcactgtaagtccccagtactgcttacaccctacacagagtagatgctcaataaatgtttgatgatttggcaattaatgggataggagggaatattaatatgtgtcaataaattactctgaatattataaataggcttatgagtatggaaaagacccaccctcaaggaatttgtgatcttttctcttacatcatactgctgttttcaatatgccataatttttcttttcttcagggtggggtcagggaaacaac

SEQ ID NO: 354728 - DNA, 428 bp, Homo Sapiens
  misc_feature (335)..(335): n is a, c, g, or t
  misc_feature (339)..(339): n is a, c, g, or t
  misc_feature (350)..(350): n is a, c, g, or t
  misc_feature (371)..(371): n is a, c, g, or t
  misc_feature (373)..(373): n is a, c, g, or t
  misc_feature (386)..(386): n is a, c, g, or t
  misc_feature (400)..(400): n is a, c, g, or t
gaacccacactggggagaaaccatatgaatgtaaggaatgtgggaaagccttcaattattccaactcatttcagatacatggaagaactcacactggagagaaaccctatgtatgtaaggaatgtgggaaagccttcactcagtactcgggccttagtatgcatgtacgatctcacagtggagacaagccctatgaatgtaaggaatgtgggaaatccttccttacatcctcacgccttattcaacatataagaactcacactggagagaagccttttgtatgtgttgaatgtgggaaagcctttgcagtttcctcaaatcttagtgggcatttnaggnactcacactgnaggaggaaggcctctgaagtntnagatatgtggggnaagtattttggggnatccccccatgtctttaataatccccat

SEQ ID NO: 354729 - DNA, 566 bp, Homo Sapiens
  misc_feature (80)..(80): n is a, c, g, or t
  misc_feature (84)..(84): n is a, c, g, or t
ccatttcatccctgccagccttccaggacatttcaaacacttacttgctttctatgctgagagctggtgggtggaagaanaggncgcttgtccataggaaatcagggtggtcgcctgccgaggcctggaccttggaacagggcatcatgtgacatcgcagaggacagatggtggaaaagacatgagcaacctaatgggaagaggaaaatgggaaacaatgcattggaagaggaagaaaaaaaataaataaccaaaggttttggcaagtgcagtaccaggtggagaagcttgacttttctatccttgatcattttattccctcccaagaagtcagtcacaggacctggaaggccagaaagggtacatgtgggagacggtctgaggaagtacctcggtcactacaatatttttgcacatataaagggttggggaggaaagagacacaaacgtatttaacacagatttgctggatggaagctgcgtgtgtgaacgtgtgtatgagtgagtgcattttgatttcctctttgcttgttttgcacagttgagggccaacatccaactagctt

SEQ ID NO: 354730 - DNA, 365 bp, Homo Sapiens
  misc_feature (47)..(47): n is a, c, g, or t
  misc_feature (112)..(112): n is a, c, g, or t
aaaggccccccaccaaattaggcccaaaaaccaatgataaacctagnaatgcttacacaacccacattttcaagcattcatataaaagctagagtgtgtcagtgcaaatagnacaaggcaaccagaatagagggttcagaaatagacccactcatatatggaaatttgctttatgactaaagtttcactgtagaactgtagggaagggatagtcttttaaagaaatggaaccaaattggttggatactcacatgggaaaaatatattttgactactacttcacactatacataatttatttcagttggcctttgatctaaatataaaaggcaaaacaactaagcttctaggtgaaaaattagaca

SEQ ID NO: 354731 - DNA, 819 bp, Homo Sapiens
atctgaatcacctcaaaatcactagggtagtcactggatggattgtttcgaggtataattctccaattgtctacttcactgctcttcagggcacttgaaataaatgaatttctagctttggctgtaaagtatccattgaaagccacaatatattcatattccacaactgttgatgagaattccaccttcaaagtcaggtgggaacagccagggcatggggccttttcaaaagatttcttttccagtctgtcgcccagatgtttcttcccacagagcaaaaccacgagcagaagcagccagatgttgacaagcttcatggtcacaagcgaatatgatcataaaattgcatatattcaaatcacacttttttcttcttgattaaaagtgaatttttgtttcagctaaaagctgcaacattactgatcagccatcttacagtcttgcccaacataaataaaagttaaatcccatggccttttgtggttcagcctgaagagaggctttcatttctttctccgcttcttctccatcttggaaataaggcttctctcactcaggccgtgacgactgagtcctgtactccatttgtaccacagaaccaacgtccaatggggttgatcaatcaaccactgtgagccaatctgcgccgccgggagctcagggccggcgggcccgggatgacggcgcctccgcggcgaacacgcctgggcactccattcggggctgtttactcccaactctcgcgagactgggcggccgggccagcgaggcccacaactccgctctcgacgaattcgagctcggccgatttggcctgat

SEQ ID NO: 354732 - DNA, 501 bp, Homo Sapiens
gagtttcgacagcttccgaacaaagtggtcaagttggataaacttccagttcatgtctatgaagttgacgaggaggtcgacaaagatgaggatgctgcctcccttggttcccagaagggtgggatcaccaagcatggctggctgtacaaaggcaacatgaacagtgccatcagcgtgaccatgaggtcatttaagagacgatttttccacctgattcaacttggcgatggatcctataaatttgaatttttataaagatgaaaagatctccaaaggaaccaaaaggatcaatatttctgggattcctgtatggggtgtcgttcagaaccaacaaagtcaggcgttttgcttttgagctcaagatgcaggacaaaagtagttatctcttggcagcagacagtgaagtggaaatggaagaatggatcacccttctaaataagatcctccagctcaacttatgaagctgcaatgcaagaaaagcgaaatggcgactctcgcgga

SEQ ID NO: 354733 - DNA, 714 bp, Homo Sapiens
agcagcacatcttccgacaccagccaggaccggtcaccctcggaagaaagcatgtcctcagagcctgcacccagtgtactgcctgcaactggcgactctgacacgtacctctccatcatccactccctggagaccaagctctacgtcacagaggaaaagctcaaagacgtgaccgtgaggctgaagagccagcagggtcagagccgtgaggcactgctcgcactgcaccaccagtgggcgggcaccgaggcccagctgcgtgagcagctccgcgccagcctgctccaggttggcgcactggcctcccagctggagcaggagaggcaggagagggccaggagggttgaagggcatgttggagagcttggggacttccaggtcaagaatagtcaggccctgatgtgcctggaaaattgccgagaacaactgagatctctgcctagggccagccaggaggatgagcaggacgcacgcgcagcctccctggccagtgtggagagtgcactcgtcagcgccatccaagccctgcagcactggccggccccagcccatggcggggcccgtgcacagctggagacaggtggcaccgaggagaatgggaagcctgcctccctgcagcagtgctcccagtctgagttgacagagcaggagcaggtgaggcttctttctgaccagattgctctggaggcctcgctgatcagccagatagcagat

SEQ ID NO: 354734 - DNA, 666 bp, Homo Sapiens
  misc_feature (632)..(632): n is a, c, g, or t
  misc_feature (644)..(644): n is a, c, g, or t
  misc_feature (652)..(652): n is a, c, g, or t
gggggggcctgggctagctgctggctaccaatattctactttctgtctctatgaatgtgactaccctggttacctcatataatctccctggaaaaggagacatgaatgtctgcaatgatacttcctgacaagaagttgatacaagaaaaggaaaggagattaacagctagtgagcagaatttcgaacagcaggatttcgtattttttgcttccaactgcacacttccgttgcccacttttaaatcagagatacctacactcaaaacccagacaaggcaaaaggatacttttcttgtatattttttgagatcgaagaaacgacaatgtccaggaaacagaaccagaaggattcatcaggattcatttttgatttgcagtccaataccgtactggcccagggaggagcttttgagaacatgaaagagaagataaatgcggtacgtgcaatagttcctaataagagcaacaatgaaattatcctggttttgcagcactttgataactgtgtggacaaaacagtacaagcattcatggaaggtagtgccagtgaagtactcaaagaatggacagtaacaggcaagaaaaaggtaaaatgaattacatttaaaagcatgatgatgtgtatattattnttaaaaatttangctctgcnaaaatatttgaaaa

SEQ ID NO: 354735 - DNA, 468 bp, Homo Sapiens
cctgccgcagaaccaagtaacggcatcccagattccagtaaatcagtttccattcaagaggaacagtctgcgccttcctcagagaaaggtggtatgaatggctaccatgtcaatggtgccatcaatgacactgagtctgtggactcactcagtgaaggtttggagacactttcaatagatgccagagaattggaggatcccgagtctgccatgctagatacgctggatagaacaggatccatgctgcagaatggtgtctctgattttgaggaccaagtctttggactatggcactctatttcacaattctcaacaacccaggaattgctgccaaatctctcttcaagacctaccacagaaactcagttttcaaatatggggatggaagatgttcccctcgccaccagtaaaaagctaagttccaatattgaaaaatctgtaaaagacctccagcgctgcacagtgtct

SEQ ID NO: 354736 - DNA, 339 bp, Homo Sapiens
cctagatccctatttaatgtctgcagtagactgaatggtttgtgtgcccccagaattcctaatgttgaaatcctcatttccaatgtgatggtatttggaggtggggcttttggtaagtgataggtcaggagagtaacagcgctcatgaatgggattagtgcccttatataaagagacccagagagctccatcaccccttctgccatgtgaaagggagaagacaaacatccacgaaccaggaagtgggtcctcaccagaaaacaaatctgtaagcaccttgatcttggacttcccagcctccagaattgtgagaaataaatttctgttgttgataaacca

SEQ ID NO: 354737 - DNA, 2794 bp, Homo Sapiens
  misc_feature (796)..(847): n is a, c, g, or t
gggggggcccagacccagacagaggaggagatgaccagatatgtccaggagctccaaaagcatcaggaaacagctgaaaagaccaagagagtgagcaccaaagagatctaatgaggaggcacagaccagtgtctggatcccagcatcttctccacttcagcgctgagttcagtatacacaagtgtctgctacagtcgccaaatcaccagtatttgcttatatagcaatgagttttattttgtttatttgttttgcaataaaggatatgaaggtggctggctaggaagggaagggccacagccttcatttctaggagtgctttaagagaaactgtaaatggtgctctggggctggaggctagtaaggaaactgcatcacgattgaaagaggaacagacccaaatctgaacctcttttgagtttactgcatctgtcagcaggctgcagggagtgcacacgatgccagagagaacttagcagggtgtccccggaggagaggtttgggaagctccacggagaggaacgttctctgcttccagcctctttccattgccgtcagcatgacagacctccagcatccacgcatctcttggtcccaataactgcctctagatacatagccatactgctagttaacccagtgtccctcagacttggatggagtttctgggagggtacacccaaatgatgcagatacttgtatactttgagccccttagcgacctaaccaaattttaaaaatactttttaccaaaggtgctatttctctgtaaaacacttttttttggcaagttgannnnnnnnnnnnnnnnnnnnnnnnnnnnnnnnnnnnnnnnnnnnnnnnnnnncttgactaggtattaagcttttgtaattatttttcagtagtcccaccacttcataggtggaaagagtttgggggttcttcctggtgcaggggcctgaaataacccagatgcccccaccctgccacatactagatgcagcccatagttggcccccctagcttccagcagtccactatctgccagaggagcaagggtgccttagaccgaagccaggggaagaagcatcttcataaaaaactttcaagatccaaacattaatttgtttttatttattctgagaagttgaggcaaatcagtattcccaaggatggcgacaagggcagccaagcagggcttaggatatcccagcctacccaatatgctcattcgactaactaggagggtgagttggccctgtctcttcttttttctggacctcagtttcctcagtgagctggtaagaatgcactaaccttttgatttgataagttataaattctgtggttctgatcattggtccagaggggagataggttcctgtgatttttccttcttctctatagaataaatgaaatcttgttactagaacaagaaatgtcagatggccaaaaacaagatgaccagatttgatctcagcctgatgaccctacaggtcgtgctatgatatggagtcctcatgggtaaagcaggaagagagtgggaaagagaaccaccccactctgtcttcatatttgcatttcatgtttaacctccggctggaaatagaaagcattcccttagagatgaggataaaagaaagtttcagattcaacagggggaagaaaatggagatttaatcctaaaactgtgacttggggaggtcagtcatttacagttagtcctgtgtctttcgacttctgtgattattaaccccactcactaccctgtttcagatgcatttggaataccaaagattaaatccttgacataagatctcatttgcagaaagcagattaaagaccatcagaaggaaattatttaggttgtaatgcacaggcaactgtgagaaactgttgtgccaaaaatagaattccttctagtttttcttgttctcatttgaaaggagaaaattccactttgtttagcatttcaagcttttatgtatccatcccatctaaaaactcttcaaactccacttgttcagtctgaaatgcagctccctgtccaagtgccttggagaactcacagcagcacgccttaatcaaaggttttaccagcccttggacactatgggaggagggcaagagtacaccaatttgttaaaagcaagaaaccacagtgtctcttcactagtcatttagaacatggttatcatccaagactactctaccctgcaacattgaactcccaagagcaaatccacattcctcttgagttctgcagcttctgtgtaaatagggcagctgtcgtctatgccgtagaatcacatgatctgaggaccattcatggaagctgctaaatagcctagtctggggagtcttccataaagttttgcatggagcaaacaaacaggattaaactaggtttggttccttcagccctctaaaagcatagggcttagcctgcaggcttccttgggctttctctgtgtgtgtagttttgtaaacactatagcatctgttaagatccagtgtccatggaaaccttcccacatgccgtgactctggactatatcagtttttggaaagcagggttcctctgcctgctaacaagcccacgtggaccagtctgaatgtctttcctttacacctatgtttttaaatagtcaaacttcaagaaacaatctaaacaagtttctgttgcatatgtgtttgtgaacttgtatttgtatttagtaggcttctatattgcatttaacttgtttttgtaactcctgattcttccttttcggatactattgatgaataaagaaattaaagtgaaaaaaaa

SEQ ID NO: 354738 - DNA, 263 bp, Homo Sapiens
taataatataacataatctctgtcaaattcattttgccctgagcatatttatgtatatgtctgggcttcatgtttgtttaagactgaacaagtggagtttgaagagtttttagatgggatggatacataaaagcttgaaatgctaaacaaagtggaattttctcctttcaaatgagaacaagaaaaactagaaggaattctatttttggcacaacagtttctcacagttgcctgtgcattacaacctaaataatttccttctg

SEQ ID NO: 354739 - DNA, 1874 bp, Homo Sapiens
  misc_feature (1419)..(1449): n is a, c, g, or t
  misc_feature (1849)..(1849): n is a, c, g, or t
cgctgccgctgccgccgccggcccggactcgtccggagcgcagggtgtctgcccagctgcgcgcggcgcgcggaggctccggcgtccgccgctgcgccctccggcccctgctcctcgcgccggcccgcgtgggtcccggcgggcgcgaacccaccatgcagctgcagttccggagctggatgctggccgcgctcacgctgctcgtggtcttcctcatcttcgcagacatctcagagatcgaagaagaaatcgggaattcgggaggcagaggtacaatcagatcagctgtgaacagcttacatagcaaatctaatagagctgaagttgtaataaacggctcctcatcaccagctgttgttgacagaagtaatgaaagcatcaagcacaacatccagccagcctcgtccaaatggagacataaccagacgctctctctgaggatcaggaagcagattttaaagttcttggatgctgaaaaggacatttctgtcctaaagggaaccctgaagcctggagatattattcattacatcttcgatcgagacagcaccatgaatgtgtcccagaacctctacgagctcctccccaggacttcgccactgaagaataagcactttgggacttgtgccatcgtgggcaactcgggggtcttgctgaacagcggctgtgggcaggagattgacgcccacagcttcgtcatcaggtgcaacctggccccagtacaggagtatgcccgggatgtggggctcaagacagacctggtaaccatgaacccctcggtcatccagcgggcctttgaggacttggtcaatgccacgtggcgggagaagctgctgcaacggctgcacagcctcaatggcagcatcctgtggatccctgccttcatggcccggggcggcaaggagcgtgttgagtgggtcaacgagcttatcctgaagcaccacgtcaacgtgcgcactgcatacccctcgctgcgcctgctgcacgccgttcgcggatactggctgaacaacaaagtccacatcaaaagacccaccaccggcctcttgatgtataccctggccacacgtttctgcaaacaaatctacctctacggcttctggccctttccgctggatcagaaccagaacccagtcaagtaccactattatgacagcctcaagtatggctacacctcccaggccagcccgcataccatgcccttggagtttaaggccctcaagagcctacatgagcagggggctttgaaactgactgtcggccagtgcgatggggccacgtagggtgggcaccccatgggactcagtggctcacatttcctgccagctacaccacaggcagatgggagtcggggtggcacaaacaatagaacaagcaggctagtggttttctttgttaaagtgtaaaacagtgaccagnnnnnnnnnnnnnnnnnnnnnnnnnnnnnnntgacctgagtatttataactgtgtggtgttcatctagcattaggcagataggccacaggaagaaggtgtggagaacccacctgaaccagattgagactcaatccatctttgggggtggaaggacttgacatgaaaagaagccagtcccatgactttggatgacaaactgcctcctggcttggagggatctttgggctcatggatgaatggcgagccacctgttgtcagctgccccaagcctctgggatatgtggattcggagaaagctgaggcccagaggggacactcgacccagtctaaagtgggtgccattcacggaggagaggggaggttggagacttcaacccggcaaggagcacaaggaaaccagcagcagaggcccatcagcacagaggcctcngttcacgacgtagatttgactgcct

SEQ ID NO: 354740 - DNA, 425 bp, Homo Sapiens
gccgccgctgccgctgccgccgccggcccggactcgtccggagcgcagggtgtctgcccagctgcgcgcggcgcgcggaggctccggcgtccgccgctgcgccctccggcccctgctcctcgcgccggcccgcgtgggtcccggcgggcgcgaacccaccatgcagctgcagttccggagctggatgctggccgcgctcacgctgctcgtggtcttcctcatcttcgcagacatctcagagatcgaagaagaaatcggagctgaagttgtaataaacggctcctcatcaccagctgttgttgacagaagtaatgaaagcatcaagcacaacatccaaccagcctcgtccaaatggagacataaccagacgctctctctgaggatcaggaagcagattttaaagttcttggatgctgaaaaggaca

SEQ ID NO: 354741 - DNA, 1839 bp, Homo Sapiens
  misc_feature (302)..(311): n is a, c, g, or t
  misc_feature (481)..(490): n is a, c, g, or t
  misc_feature (1082)..(1082): n is a, c, g, or t
  misc_feature (1105)..(1123): n is a, c, g, or t
  misc_feature (1126)..(1126): n is a, c, g, or t
  misc_feature (1129)..(1129): n is a, c, g, or t
ggtccggaattctccggatagcttttgcctccctcttcctgttctcccctggactgagaaatgggttgctcaagggaccatttccctttttcttcaagctccttttgatattccctgccccagagctcatgaccagaacccagagttgatttaaaatattttgaaaaatggaggaggcagactgctcccagcagcctgtcaatggctgctcatctgtccatggagatggttacaggcaggtgtagtcaaaatgattgattccttgggtttgggggtgaataggctgggaaatttctgagccnnnnnnnnnngtcacagtgccctcaagttgaagtgatgagctggatttctttcttgttccatactgggcggcatgctcctcccatctccaccccttggtttgggggcttccagctcattggcaaaatctctctagttgccttcctttcaagctggagcctgacttttccccaatgtacannnnnnnnnnctccacaaagagttccttctctaatgtccccatctggtattaagtgcactttaaagaaaggggcagggtggattttcaagaggtgggaagctctaaggcttgaccctgaggggtcttctcccagccattctcagcccatatgcagacaccctccatactgaagaggactgttgttttagtttcagacggtcctttccttccacatggtgctaaggtggttttctaggtaactgcagggatggaggtcactagccattccaaaccaggagagaaagtctggtgtcctgatatccagtcttttctaggaggaagaccaagattctccagcggcagggcagcctatcacccaacttctaagtcaggaaaggaagctgagtgggaatgccagctggtaagcgcaggctgcactggcccatgactccttcaaggaaaagaggccctgctccctttacctgctgagctccttttagcagttagggagaactgcagggggaaaaataccagtggagtgtggaataaatccaaagcagtgatatataaatgttttacaaaaacaaatcttacatagaaccccaatataaaagataaagtnatgcagagctgggcagtttgcannnnnnnnnnnnnnnnnnnggnggnagaagtctcagcgtctcttaggactgactgttcaagggctcctcagcaaatgagcccttgaacagtcctaagagaccctgaggattctgtggagtagtttgaaaaccattgttctgaggaagggggtccaatctggctcctctgcactaaagctgcaactcatggaaaagagggcaacggtggggtagacaagccatgctgtctccagacccactagggtggaaagaaggttcctgtgggcctgtggacttaggctaatatttgctgtcagcagggcacttaagaatccagggggttttatgtaatgttgccaccacatggttcttttaaaaacacataaggaaatgtgagggtgtagcgcagatgaggagagagatgacacagagggagcagccttctctttagcaagatgtaagggaaatataattcacttacataaaaaagaaacaacacacacgcaaacccttcaccagaagcttcacactacatcctcctcctcctcctgctccccaccttcaccgcatccctttcagagccagggtcactgcaaggggcacctggcctgcccactcacatctgccaaaatgttgcatgccagcgtggaagacaaaccaaactgcgcaaccccctgtgtgtatttacttggtgtacatagataactttaaaataaaataaattcaatgataaaaaaatgaacacataagacatac

SEQ ID NO: 354742 - DNA, 303 bp, Homo Sapiens
  misc_feature (41)..(41): n is a, c, g, or t
  misc_feature (85)..(85): n is a, c, g, or t
  misc_feature (251)..(251): n is a, c, g, or t
aaacattgacaaattagtgcattgaattggcatttgaaagncctagttaagcactatttaagcactattatggcataatacaggnaaaactacctgtattatttatagtgggtgccttctgaaggatctgaaggagaatcagttctatgcctctctcctcattcccaggtaggtgcctggcattccttggcttctagacgcatcaccctaatctctacctctgccttcacatggtgccccctgtgtgtatntacttggtgtacatagataactttaaaataaaataaattcaatgataactct

SEQ ID NO: 354743 - DNA, 610 bp, Homo Sapiens
cagtacccccttcacctttatatgctgtaaatctttgtaatgaatactctattaatgatatagatgactgaattgttggtaactatagtgtagtctagtgaagatgaattgtgtgagttgtatattttactgcattttagttttgaaaatgacttccccaccacctagaaacagctgaaatttgacttccttgggagaacactagcattaatgcaagtaagactgattttccccctaagtcctgttatatttgataaggagcattaatccccccggaaatagattagtaggatttcctaatgttgtgtagcaaacctatacttttttgtatttaaaaattaatgtgaaatatgcatcatacacaatattcaatcctagattcccagtcccatggggggatttttcctaataggaattcagggtctaaacgtgtgtatattttggctcttctgtaaatctaatgttgtgatttttatatttgtttcgttttgtctgtgaactgaataatttatacaagaacacactccattgagaaacgttttgttttttgctcgtttgtatcgtctgtgtataacaagtaaaataaacctgataaaaacgctaaaaaaaa

SEQ ID NO: 354744 - DNA, 526 bp, Homo Sapiens
  misc_feature (34)..(34): n is a, c, g, or t
  misc_feature (45)..(45): n is a, c, g, or t
  misc_feature (80)..(80): n is a, c, g, or t
  misc_feature (86)..(86): n is a, c, g, or t
  misc_feature (109)..(375): n is a, c, g, or t
taagccgtttgcaaaagtgccatgtgggaaagcnggtcgcccccnacccctaaccttaaggcaaaaggggccttccccgnttgaanggggccccaaccttgttggtaannnnnnnnnnnnnnnnnnnnnnnnnnnnnnnnnnnnnnnnnnnnnnnnnnnnnnnnnnnnnnnnnnnnnnnnnnnnnnnnnnnnnnnnnnnnnnnnnnnnnnnnnnnnnnnnnnnnnnnnnnnnnnnnnnnnnnnnnnnnnnnnnnnnnnnnnnnnnnnnnnnnnnnnnnnnnnnnnnnnnnnnnnnnnnnnnnnnnnnnnnnnnnnnnnnnnnnnnnnnnnnnnnnnnnnnnnnnnnnnnnnnnnnnnnnnnnnnnnnnnnnnnnnacagcatgaaataatgatgtatctataaatgagcctttgcaagattaccatttatcaaagaaaaccagtgatgtttagttaactgtttgtaaaaataaatggttagtagaatgtctaattcaataaatgtttcataaatgagtaaaaaaaa

SEQ ID NO: 354745 - DNA, 903 bp, Homo Sapiens
  misc_feature (858)..(858): n is a, c, g, or t
ggcgactcatcttgagtagggactgggttatgaagctgagacccactgggctgcattcccaggaagttaggcattcttagtcacaggatgagataggagattggctcaagataaggtcacaaagaccttgctgataaaacagtctgtggtaaagaagccagccaaaacccaccaaaaccaagacgggaatgaaagtgacctccggtcatcctcactgctcattatacgctagttataatgcattgacatgctaagagacactcccaccagcaccatgacagtttacaaatgccataacaacatcaggaagttaccctatatggtctaaaaaggggaggaaccctcagttctgagaatttccttgaaaattcatgaataatccaccccttgtttagcatatgatcaagaaataatcattaaaaaatagccaaccagcagctcatgctctgtccttgcctatggagtagccatcctttctttattaacctgctttcactttatggactcccctgaattcttctgcaggagatccaagaaccctctcttggagtcttaaccaggatccctttccagtaacttcagcaggatctgtgagtgccagtttccttctgtggtgcaaaactaggtgctaagtacactttttcccccctttcctctatttttaaaagaactttcagcccttttgaagtgggtacattgtctgggagtacataccctggggttcattgttatagggggaatttagggacacagacacacgagggagtttagggagcagaggtttaaataggtaggaaggagaaggggaaagagaaacagctttcctctattagatgtctggcactgaacaccgtgggnttaaggcatgggcccatgatgtgtctccgagtggaaaagactggt

SEQ ID NO: 354746 - DNA, 648 bp, Homo Sapiens
  misc_feature (59)..(59): n is a, c, g, or t
tcaattacccatactccaaaagatgagaaagatgtaatggttggttagaataaagccgnttcaagaggcagtggaaaacagtgatttgataataaaactgatctctcacatttgtacggcgctttccagtttatatagtgtttttatccagttatctgattatattcttaccacaactctgtgaggtagttagtgaagtattattcccattttatagctgaagaaccttaggcttgagagaccaagcggtttgaccaaagttacccagctaaggaagtgtggagccaagtgtccaggtttcttgactccaaatccagtgctcttccccctatatagtctataattggcaggcaattgaatgaattgcccatgatcatatacctgctaagtgttggtgatgggattaggtttcagtctccaaatctgttagtacggtgccccttcaccataccaactaactgggccaatgtgctcagaatgtctaccatggaagagatcagaagaacatctagttagttaactactcttttctatgtctaggtcatcagttctctccttcatcctcccccaagtcaacaatgtatcccaactggcaaagcctctaaaacatgcactattcctagaacagaacccaggcgtccgtagcgg

SEQ ID NO: 354747 - DNA, 650 bp, Homo Sapiens
gggagacgcggcgcgcggcggtgtgaagttacagcccggccagccgagcctcttgaagccattcttacagatgatgaaccagaccacggcccgttgggagctccagaaggggatcatgacctcctcacctgtgggcagtgccagatgaacttcccattgggggacattcttatttttatcgagcacaaacggaaacaatgcaatggcagcctctgcttagaaaaagctgtggataagccaccttccccttcaccgatcgagatgaaaaaagcatccaatcccgtggaggttggcatccaggtcacgccagaggatgacgattgtttatcaacgtcatctagaggaatttgcccccaacgggaacccatagcagataaacttctgcactggaggggccctctcctcccctcgttctgcgcatggaggctctaatccccacgcctggggatgaattgcggaatatgccccccccacggtattttggtaaagaatggagccccaggcagcctacaccatgttaccaaccttggcggaacaggcccattttccgcgccagatggcgatggggttatttcttcgttggccgaccccaaccgcgagggaaaacacccttccggtggggaattttaagggaaaaatcctacactttt

SEQ ID NO: 354748 - DNA, 1296 bp, Homo Sapiens
  misc_feature (44)..(44): n is a, c, g, or t
  misc_feature (119)..(119): n is a, c, g, or t
  misc_feature (167)..(187): n is a, c, g, or t
  misc_feature (1105)..(1145): n is a, c, g, or t
aaagacaacatagaatgtatagaaacaaggggttggggactcangcgcatttccacaatacaggtaattaggttggctggtttcagaagggccagggcatcactcatgacagcgatggnccacgggccctctctatgggactgattcactgttccaatgtgggtctnnnnnnnnnnnnnnnnnnnnnattaaaaaatataaataaaatggcgctgcaggcctaggctggaaggactctgcaggactctgtcttcgcacaacggcttcttggaggctactgtcagaaaacatcacaaactagcaggatgacagaccacgctgacgtcgactgggcggcacgcgtccacccccacccctgggggctcaaaattttctcagaacttaagggctctcgagcttccatccgaaaactgccacacatcttgagctctctgggtactacgccgaatgggggtgtgtgaagaacccgcggggtcaggggacttccgtgttcgctttctaagtagattcttaatccatgagtgttctgtgcgtgttgcaagagaaaccatgcactggtgaatggctgtttgcaagttgtacatgtgtagctgctgggctcatctttacaaataccctgcggggcatattctgcactcatcccaggcgtggggattagagctccatgtgcagaacgaggggaggagaggcccctccagtgcagaagtttatctgctatgtgttcctgtttggggcaaattcctctagatgacgttgataaacaatcgtcatcctctggcgtgacctggatgccaacctccacgggattggatgcttttttcatctcgattggtgaaggggaaggtggcttatccacagctttttctaagcagaggctgccattgcattgtttccgtttgtgctcgataaaaataagaatgtcccccaatgggaagttcatctggcactgcccacaggtgaggaggtcatgatccccttctggagctcccaacgggccgtggtctggttcatcatctgtaagaatggcttcaagaggctcgggcgagaattcccgtttgcttaagtgctggggtttgccttgcttgcggcgagacatggtgggctnnnnnnnnnnnnnnnnnnnnnnnnnnnnnnnnnnnnnnnnnacgacggctcggttcacatcgggagagccgggttagaaagaaggagactccagagaaaatatcttcatcagtgccttttgacatccaaaataaattagaaataatacaaagatggcgcagggaagatgaattgtgggagagccgtcatggc

SEQ ID NO: 354749 - DNA, 641 bp, Homo Sapiens
  misc_feature (630)..(630): n is a, c, g, or t
cgtgggttccttgcagaggagggagggggggcgtcgccaggaagggcggcttgctacctggctggaatggttgcagtaacctttgcatagggctgggccggcctggggacagcggtgggctagacgtgttccctgccagctctctaagtctcctagagaaatccatggcgggaggctccatagccattggattcaaccgcagcaccctgtcaaaggcactcgggtgatgggtggccagggccatctcttccgcccccaggcgctctatgcggtgggggtccaaatgatctctcggtggtggactaaacagggggggagtgggtggaaagcgcccttctgcccaggccggaagcctctctcgatactgatcctggtattctcagcaggttaaaggggttattgtctgcaatatgaatcccatggagaggtggctgggaaggacattctgcacctagtcctgaagggataccaacccgcggggtcaggggacttccgtgttcgctttctaagtagattcttaatccatgagtgttctgtgcgtgttgcaagagaaaccatgcactggtgaatggctgtttgcaagttgtacatgtgtagctgctgggctcatctttacaaaatactgcgggncatattctgcc

SEQ ID NO: 354750 - DNA, 1289 bp, Homo Sapiens
  misc_feature (30)..(30): n is a, c, g, or t
  misc_feature (109)..(109): n is a, c, g, or t
  misc_feature (165)..(165): n is a, c, g, or t
  misc_feature (449)..(739): n is a, c, g, or t
  misc_feature (1002)..(1002): n is a, c, g, or t
aatcccccacacccccagctgcctctgggnaaccataccagctgtagctggaccctggcacacctgaaaaaagtgcctgctgtgtgctaggcaccctgcagcagttagnaaagcagtggttaggggctgtgtcctgctggaggagcctgcactctagtgaggganacaggataagcttaaggaaggacgttaaaaggtgacaagagtttgggaacttgcagggagcaggggattctgggtggtggcgggcatgttgcagcaagtagggtaggtctccttgagagggtatcgtttgaggaagtgaaccagcgggatcagatgcaggtggggagagtgctctgggctgagtgaagagtaagacagagactggctggagctgagggagtgagaggggtgggacctggccctggagggcttttaggccatggtagggaccttggctttattcnnnnnnnnnnnnnnnnnnnnnnnnnnnnnnnnnnnnnnnnnnnnnnnnnnnnnnnnnnnnnnnnnnnnnnnnnnnnnnnnnnnnnnnnnnnnnnnnnnnnnnnnnnnnnnnnnnnnnnnnnnnnnnnnnnnnnnnnnnnnnnnnnnnnnnnnnnnnnnnnnnnnnnnnnnnnnnnnnnnnnnnnnnnnnnnnnnnnnnnnnnnnnnnnnnnnnnnnnnnnnnnnnnnnnnnnnnnnnnnnnnnnnnnnnnnnnnnnnnnnnnnnnnnnnnnnnnnnnnnnnnnnnnnnnnnaggctcacaccccaccccggtttttttccttaaggagacctgcgtgagcccacctggggccggagatgtgggggggcaaccagggcttgattggagtcccctggacacaaggatgacagttgggttggctcaaggccgcaaaaagcaatggggacatggggaaaaggattggggtgcctagagacttggagttcccggggttagccaccaccgggggtgccgcctcgcaaaaattccacgggtccggggggggaacaaggggntgggagaactgataccctccttccccgcgtgcctttggcgtgtgtgaaaaaacggcccccagtggtgagacagcggtgggcgccctgggagtggtaccccccagattatgcgacggccggcagcgtggggcgagacgccctcttgggtgtgcggccacagagctgtctgcccccccaacgcattcttcgggcggacgaatgtcgggggggcagttacctcattctggcgccccacgggccagtaattagacggtccccccctgtttctatcaaacgggtggttggcc

SEQ ID NO: 354751 - DNA, 744 bp, Homo Sapiens
ctcctgaaagaagaagcgcccaggtacaaatagagtctctgagagcacaaaaaaaagtgtggcataaaaagagagtcaaggtgttaattgctgaagagtccttcaggttgaagagaaggatccttcactatcctgtatcctgcagccccttccttcttttcaaggaactgcagagattatgtccgccattcctatcaatttgtttattcagtgaccttttgacagccaaactgctaggagctgctcagttgcggcacagccaagcaggcctgcacaagtttccaccacacccaggcttcagcttggtagaaaatgaaaatggtcaagagttttaatgagttgttaatgatttaagtactcacagtgatatgcttgcaagataagacaaaaggaacttaggagcagtgaaaccaaatcaaaccaataatacattcaacagtgatgaatacaattacacaacctctgcatacatttagggagcttccgaaacagaatttggactggaacatcccaaggtctagcctgcttcctccactcagaagcccacccatacccttgctaagaaagtattctacttgttttctttaaactctcctgggaattctataggctttccttcataattttaccttatttgctccacaaaaacttggctttcttaacggtcaacccttacctcttcatctgcttactgaggggacagggacgggaaactttgagtttggtttccctggcaggacaaaa

SEQ ID NO: 354752 - DNA, 1065 bp, Homo Sapiens
  misc_feature (833)..(833): n is a, c, g, or t
gcctgggtggcgaattcggcacgaggtcctaatttactaaagtcactaagatctcagaaaatagtttatatttgttgtggagaagatcatactgctgctctaaccaaggaaggtggagtgtttacttttggagctggagggtatggtcagttgggccataattctaccagtcatgaaataaacccaaggaaagtttttgaacttatgggaagcattgtcactgagattgcttgtggacggcagcacacttctgcttttgttccttcatcaggacgaatttactcttttgggcttggtggtaatgggcagctgggaaccggttcaacaagcaacaggaaaagcccctttactgtaaaaggaaattggtacccctataatgggcagtgtctaccagatattgattctgaagaatatttctgtgtaaaaagaattttctcagggggagatcaaagcttttcacattactctagtccccagaactgtgggccaccagatgacttcagatgtcccaatccgacaaagcagatctggacagtgaatgaagctctaattcagaaatggctgagctatccttctggaaggtttcctgtggagatagccaatgagatagatggaacgttttcttcctctggttgcctaaatggaagttttttagctgttagcaatgatgatcactatagaacaggtaccagattttcaggggttgatatgaatgctgctaggcttttattccacaaacttatacaacctgatcatccgcagatatctcagcaggtggcagctagtttggaaaagaatcttattcctaaactgactagctccttacctgatgntgaagcattgaggttttatcttactctaccagaatgtcccctgatgagtgatccccacaatttcacacaatagcaattcccttttggaccgctcctgtgaaccctagaaaggcaacacctgaaagtacttggaaaactgggtggtcagtacttggaccctccactatttcctcaagatagtaaaactttttaaaggaaattgtgggtacattcttttggaaattctacaaga

SEQ ID NO: 354753 - DNA, 351 bp, Homo Sapiens
  misc_feature (108)..(158): n is a, c, g, or t
agaaggggtcatgctactggtaaaagcacaggggaaccccatcctgtcattaatcattttattgagcactgtagttagaacagcattattgagtttagcacaacaacnnnnnnnnnnnnnnnnnnnnnnnnnnnnnnnnnnnnnnnnnnnnnnnnnnnccaaacacagactggaagcctagagtcgctggcagccgtgtcaaacccttgcggtacgctatactaaaaaaatttgaaatatccacccgtcctctccactctgccacaaactagcaaagtcaaaaaatacaaaagtcttcaacttgttcacttttgcgagaataaagcaaaaacgtctttgtgccaggtgtga

SEQ ID NO: 354754 - DNA, 250 bp, Homo Sapiens
agcggggaaaaaaaacttttttgttttaagcagtactttgtgagttacaagacagcagcagctccttagtgttgattgccgaggccttttgggtttgaaaactctgcttccttgtgtgaattgggtgttaggagttcttattgttattctgcagcctttactattgtcctttatttactgaacacagtgaataccaagcactgtttattagaggttaggagtaggggcaggtgattaaagaaacaaaaaa

SEQ ID NO: 354755 - DNA, 1362 bp, Homo Sapiens
  misc_feature (1293)..(1293): n is a, c, g, or t
  misc_feature (1304)..(1304): n is a, c, g, or t
tcctggagccagtgtgtacgactccacagagcatttggattacactcctccgaatgctgaaggaaaaacgctcaaaatctcattcttcagggggaagcgttgccactccgaggtgcccactgggaacgaatcccaaagccacgagcgcctgcctagtggggaatgtgaactgttatcctgagagtcgtccttctctctccctggtccaggacagaaaatactgaatagacaggaatttctgaagtctaaacgcctccaatgataacaggagtgttattggaaagggaacaagcgagaagacacagtcttcgaggagttaagttttgctaatctaatgatgagactgcattcatgaagactgagtgaagactttattgcaccatcacatcactaaggtttttctccaacatgaacattctgatgaagtcgaaggcttgaggcctgactaaagcacatatcacactccctacacttccatgttttctctcccatgtggaccctctgatgcatatcaagattcaagcgcctgttgtagcccttcccacagtcctcacatttgtatggcttttctacactgtgaactttttcttgcacttcagagaatgaattctgtacaatgttcttcccatgctgctcacatttgagaggtgtttctctgctgtggcgtctctgatgggtcagacgagttgaggaccagctgaagcccttcccacactcatcacatttgtatggcttttctccagtgtgcactctttgatgagaatgaagctgtgaattctgagtaaatcttttcccacactcttcacatttgaaaggtttttccccactgtgcagtctctgatgtttcaaaagacacgaggcccagccaaaactcttcccacattccttacaattgtatggtctctctcctgtgtggaccttctggtgcatatcaagattaaacttactattgtagccctttccacacttctcacatttgtatggcttttctccagtgtgaactctctgatgggaatgaagatgtgaattttgagtaaatctcttcccacactcttcacattggaatggtttttctccactgtggagtctctcatgtttcaaaagacatggggcccgactaaagctcttcccacattccttacaattatacagtttctctcctgtatggacgcgctggtgaaagtcaagatccaacctccttttgtagcccttcccacactccacacatttgtatggtttttctccactatgggatctctggtggggaatagcattgtgaatttgtgtaaaatncgttcccacantcttgcacatttgaatggtttttctgccactgtgggactcgctggatgttttcaaaag

SEQ ID NO: 354756 - DNA, 2456 bp, Homo Sapiens
  misc_feature (680)..(690): n is a, c, g, or t
  misc_feature (2131)..(2131): n is a, c, g, or t
  misc_feature (2140)..(2140): n is a, c, g, or t
agggaccgcccccccggaccgccttcccccaggggaggcagggaccccccttttagcggggggggccaattcccccttccatctccggcagaacgggggtagcaatgggccacagcccccccaggcagatccggcgtctccccaggagttaagaaatatttgcggccctcacagatatggacggtctgttaacagacagaagggcccctctgtacctagctccacaaacaggagaaccctgttggaaaagatgagaagagccaaaaaatctcctctggagaatgatctaaaattcatttggtaagtcttcacatttagaaaaccaccagaatatatttcaattgcaaatagtaataattactatagcctggccgtgaacaggattctgcctaggaagggctatgatctcccagcccaatggctgcctcctgttttaacaaaagggataaagattaccccactgtcccactctcttcattccttcagccttaagaaattcatcaagagaggaggagtttaaagaggagctgcttctggcagagcaatcactactcttctcttcataaacaccatggctcttctgagggaactctacgaataggcatcttgtcaacacttctggagttctgatctgaaaatggcttgaaattgtgtgctgtgtgctttttccttttttcagnnnnnnnnnnngaagaagaaagctgggaggtggttaaacacccttatcccccaaaaacctttacagagattacaggagtattcttccaggagtcagagagaaagaactaaggtagggataatgtgccagctagtctgtcctgaggaaattaagagtccggttcctagtcaaagacgaggggaaagaaagctgccaagtccagcaatcccatttccagcatgaagaatgggggtctgaaaaaaattcaatagtggaggcaaagggttggccagttgaaaatccgtaccacccaactctggagtggaggggatgctgcggtcctcaactctctgaggcactaaggcccattcatgaggaagaggaaggagagaaggttcttcttcaggaagaagatggaggagcagctcccctcacttctattacactccttttttgatgaccaagtagaagaaaattcagcattgctggggcaagggctgacatcttgggatcacagagatggcagaatcttgttccaggtcttctgaggctttgcgcttaatgggtgaactctgactctgcaacttcaagcttttccaaggttgtacttgtagttagcatttgcaaagtctctccaactagaggtgagaaactggggtcaggaataggcgagccctcactgatttcctccaaaggtggagtctgaggtaaaacatcaggacgaccaaggtgaacgcctggctccacttctgcctttgttgtcacttgtgccttgtgttccccagagaccgatggctggtaagtaatgcaggagttgccactggagcctgctcgccgagagaaagatgagccagaccgaaactttttggaaggagaaggcttcaagggaatcttcttaaatactgtgttgcacatgaagcgctggaaccgttcagcgtagaagcctgggcgatgcactgagacagtgtctccgtcatgtaccagggctttccaagagtgctccaacttcttaacaaacctgtaagactgtagaatgtcaatgatgccaatataaagcagaagcctttcccctttactattccgggcagggatgccacccatatggtcatcagtctccatggtaccaccccgtcgagcctctccctggatggattccatggctgtggaatacagagccttttggggggccggtcttcgagtatcaactgagtactgtgtttcactgcttaagggctctcgttgtgcatgatctatattatggattgacatcaagaggctataatccattatcttgaagctctgcagcaccaaacagtcacgctgcagggtcttacagagagcgttgtacatgtcagcatccaaaaaaagaccatcagggatgtcttgtaagaagtctaggtctttaaatgtgggaagaggcttctctcgctctttctgggaagcccgccgtttgtaggttgagcctttgaggtncatatttgnatatgcatttttacagatcttggtaaaagattgttcatcaccacaatccgaatgttcttgccacctgcctgcacacagtacagtccatagaatttaggcagcaaagtccgagggttctggttgaggttcatgtagtatcctggaagcagcttctgcagaaattccgcctctttatgttggactgtcttaataatgaactcatcgtcgctggacacatagaatagggaaccactagctccagagctacagagttcaatcagcggctcactgcagagggaatacaagtaatcctcgtgccgaattcgccacccaggcc

SEQ ID NO: 354757 - DNA, 386 bp, Homo Sapiens
acagggtgctaaaagaaacagtgatacaaaatttttttgatcaggaaggataatgaatgctggaaaagccaatcaaagtctctgtgtgatgagagtgatcaatggtcaagagattactgagaaactctttttctataatactaaattgtgattataagaaatagtccaaatgtttctgaagaattttcaatgttgtatatagaaaatacagaatttcatggtgatatcagaaatgtaaatattgtacagtattgtcatgtacaagcgtacctaatgcacactttatcttttattgtacaaagaaatagtgtacaaaattctttggtttctatggagtacacctaccagagactaccagtgtaaagtgataaataaaaatacaacct

SEQ ID NO: 354758 - DNA, 605 bp, Homo Sapiens
gtaatacatggaaaataaagtcagaggatacagtaccaggacgtgcagctacactacagaagcattgtccaaaaccagattcaataaattaatggcaaactatactggatttctagtccaggggagaaagactaattgagattaaaccaaaagcattataaactgctacaagtgtttgtccttttgtttacgatgaatgggtttcatttttggaaattgcttttacaagctgcaagatccttcacttgaggctttcagccttattctcctcctgtcaaacaactaaactactccgatgtttgatgaaaattaaactgctactcaggatactgcaattacaaggagagggaatgatcagcccagggaggctattacgtgtgacctttgagatggacctgatcgccccttttactttttagactacaagtgcagggaggtggagcttatttgcatttgaactcctgtaaagagtaagaatatggaaaggatgaagcctcattcattcgggcatattaaaaagaaattgccttcagaaacactttgccttttaatatgtgtagctacagtaagtaccaatgggctaactaattgaagctaacatttta

SEQ ID NO: 354759 - DNA, 342 bp, Homo Sapiens
gtctaccatatgggtggacgagaataagtctctttcattctgctacttcactgtcatcttcaatttattactgaaaatgattcctggacatcaccagtcctagctcttacacatagcaggggcaccttccgacatcccagaccagccaagggtcctcacccctcgccacctttcaccctcatgaaaacacacatacacgcaaatacactccagtttttgtttttgcatgaaattgtatctcagtctaaggtctcatgctgttgctgctactgtcttactattatagcaactttaagaagtaattttccaacctttggaagtcatgagcccaccattgttcat

SEQ ID NO: 354760 - DNA, 265 bp, Homo Sapiens
  misc_feature (222)..(222): n is a, c, g, or t
ctgagcaacatagtgatagtcatcactcatttattcatttcttattttttgagctggtactagcgacagttacacactggtagaaaaaccagggtaaatatcacctcagtttttccatgaggaagtacactgaacaaagacaagcttggtgaataaccgtggtataaagtagaggaatggaaggccaaggcagggggatggcttgagactaggggttcgagnccagtcggggcaacataacaagaccctgtctatacaaaaaata

SEQ ID NO: 354761 - DNA, 282 bp, Homo Sapiens
tgaagtgaaatttaactttttgtgcaagtagtactattatacccatcttcagtgtcttacttgtactgtatcacattccataccctcatttaattcttaataaaactgttcacttgtttttctgggtagcatggtaattactggaatagtataaatgtgttgaatggtctttgagaaaatgaattaagattacaataaaccacaattgcaggaaaacaatgtagttctgagtctaatagtgataaagaatgcagtttgaagtttgaaatattgaatattgta

SEQ ID NO: 354762 - DNA, 723 bp, Homo Sapiens
  misc_feature (135)..(135): n is a, c, g, or t
  misc_feature (140)..(140): n is a, c, g, or t
  misc_feature (706)..(706): n is a, c, g, or t
tggagttagccccatctccaatgatccgggaaggcactgtgttggttgtaacctccaagggctcactgaagtctccatagccagctgctgtcctggctcgcacgtggaaaacataggaagtgagagggttcaggnctttnatatctgtgttcctggcagctgtccgaactatacgaaagcttcgctcatactgatcctactcataatacttgacttcatataccaggattaccccatagggccgatctggtaccagacaaagccagtgccacactgtaatctatgtgacttctttagcctggaccaaagcaatggatgatggtgctgcttgaatggttggtcacagtgacagaaactgatttggtctgggtcagggttatatatggacactccattcacagcccagatttcaaaggtgtaattggtatgagctaggaggtcaggttgatggagactttggaggtcttcaagccattctgctgtggggtgtagtggaccccacttccacagggtcggcacttgctggggtcaccagctccacatttcttgcataccacattataggaaatgtcctggcggccacctgtattctgagggctactccactccaagttcacagatgtctcgttgacatttgaaatcaagttcaggggagcagatggtggacgggtgcagggcatagaggcagcatcgttgtcagctctgnaaaagcctcggtcacag

SEQ ID NO: 354763 - DNA, 3279 bp, Homo Sapiens
  misc_feature (2772)..(2803): n is a, c, g, or t
  misc_feature (3160)..(3160): n is a, c, g, or t
  misc_feature (3167)..(3167): n is a, c, g, or t
  misc_feature (3219)..(3219): n is a, c, g, or t
aattctcgggatcactgaaggagcttcctctgcagaagggagatattgtttacatttataagcaaattgatcagaactggtatgaaggagaacaccacggccgggtgggaatcttcccacgcacctacatcgagcttcttcctcctgctgagaaggcacagcccaaaaagttgacaccagtgcaggttttggaatatggagaagctattgctaagtttaactttaatggtgatacacaagtagaaatgtccttcagaaagggtgagaggatcacactgctccggcaggtagatgagaactggtacgaagggaggatcccggggacatcccgacaaggcatcttccccatcacctacgtggatgtgatcaagcgaccactggtgaaaaaccctgtggattacatggacctgcctttctcctcctccccaagtcgcagtgccactgcaagcccacagcaacctcaagcccagcagcgaagagtcacccccgacaggagtcaaacctcacaagatttatttagctatcaagcattatatagctatataccacagaatgatgatgagttggaactccgcgatggagatatcgttgatgtcatggaaaaatgtgacgatggatggtttgttggtacttcaagaaggacaaagcagtttggtacttttccaggcaactatgtaaaacctttgtatctataagaagactgaaaaccatggagattatttttattggaggaggaagcatcattcatgaaccgatctttttagttgagtcagtaggaaaattaatacagtggataaagtaagaagcaaaagacagggacagagaagtgttgtgtttaaaacccaagcctgtctaaggttactgtgtattagacagggccgaactagtgtgctgagcaaaaagaattgaagcaaattgtatttacttagccgcttctgggagccacttcagcctttcccctcccctccacttcttgggtaatctgacctgaagcatagtccaggagcagagttagccagaaatgcctcctgctgccgcagccttagagagctcccatctcaatcattgagcctgaaggcttcaagcccaagaatgcaacaagacccccagcctacatttctcagctcccctggagccagctgatcctgtaacgctgctggaggtcagtctgagctaccaagactgtccctagacaaaggtggagtcccccacactgcccaagaccaaatccctcactcaactgctgaggtgtggatggggaaacagaggcaaaactgaggcacctgatgcattcagcctgctgtgcagcagtgccattgactgccctgatgttcagagagaaacgcacacaaggtttgcccatgagaattgggggagcagatggccaagcagataggttatgtctgttttctgagtgatgaagtcaggaagccctgtggctctggagcccacttgtggttcattcttttcccatatccttggcttttagaaatggttaccttcaggacagtgcagctgcatttatcagagcactattgctaagttttcttttctggcttgtgtttttctgggacagtttagaattgggaggcctattctcatagaacaccaaaaatgatgttcagtgattcatttaacatacaccaatgtactctggctgctggggggacaaccataagcaagacatgcccagggtttgccgtggctccagatctactccctgtaggagttcaaggatcacacaaacggtagtaaccagggttgtgaatctgagtacaccctggcaaggcttctcttcagactgaagcagcaattctgccactaccagcagcaaccaggacgtctgttctttgtgggggccagatcagaagagagaggcccctgtgacgcccgggctgcttggtcacaactctgtccaattcaaggatgtttatcggcctctcttagatcctgagtgagacaaatacagaaatgacccattccctgcccaccagaaactcagaggtgattggggagactgacacaggaaaatgaacttaatcaagagagactgtgatatgtgctaagaagggtgtgagggagggagagatgaattttccctggagggatcctagaaagcattgtcatattgccatctccattagctcacttttaaacaactagggtgctggaagaacctttgtctgagggtagttcatagctggaaatacttggaatattttccagagtctctaaactctcatcttcccccacagatacacatccaagctcacaaataggagtagcaattctaggtggtagggttgtgtacggaacccctggctgtctgcatatatctcagaattaccccaggaccattgtcccaaagtctagagtctttacaggtaggcaaaatttgttttcaatgcctgtgcctcagctgctgtcacaaatacccatcttaggatcccatcagcttcccatcccccaccagacagccacagtaccctcactttctccctattgttctttcaaatcctgttctcaggaaagaaactgccactaattcattcacactaaggtgtaaatgattgataataggaatgagttacctcttcccacagacatttgtttttaagtatgacagagcagggccttaatcccaagggaaaaggttatggaactggagggggtgagctatctgggtagaaggagacttcctgaatttccttaaaacccagtaagagtaagacctgtggtttgggaaggtctgctccaccatctaagagcacnnnnnnnnnnnnnnnnnnnnnnnnnnnnnnnnacggtctctgagggaatatagtaaaaatgcatatgcacgtgcaatttgcacggcagcatttcaccgattgtggactgtattggctaatgtgtttcctggtctttagatgcaaaccattaataacactatcttatctcatagttttttcaggggtgcttcttgattagtagggaattttgaacacctctttaaatacagctagaaaataaaaccaatttgtaaagccacatttgcatatgatgccagcctcacgcatttgtatatctccagaaattcaggtatgcctcaccaatttgcccgtctttaataaaatcttgtgttaaaatttgcatcacgtcgccttcctatgtatgacgnaacaagnaacagagatttccaattgctcttttgtcttcagacatttagtaatataaagnacctatttttatgctggaaatgtttatacaggtttattaatagcaaggtgcaacctaact

SEQ ID NO: 354764 - DNA, 217 bp, Homo Sapiens
  misc_feature (95)..(95): n is a, c, g, or t
  misc_feature (114)..(114): n is a, c, g, or t
  misc_feature (122)..(122): n is a, c, g, or t
aatgctttatgatcaacttgccataggactgatggattaaccagtgttcggctttatttgaagtctatgccctgcacagctcttgtatgtatttnagatgctagaagttttttnagcatgtnatgtgtgattcttgtttgaattctaggtaccttgtccaacttggttctttttcaaggttgttttgggtattctgggtcccttgcttttccatatg

SEQ ID NO: 354765 - DNA, 380 bp, Homo Sapiens
  misc_feature (254)..(254): n is a, c, g, or t
ttcctaaaagcagtctttcctacaacttgtatgcagtaagtcacttaagcacttaagtgtcatatgggtacttacatggaattagagcacttcctgaatggaattagaaaaaggcaaattgtgcatactactgatgcattcatttcctacagagatatgataccaagggccaataagtgaatagaaaaagggaggaggatttattaatggaatgagttctaaccctgtctcttaccagccatatgactttgggntaaataatcaaacgcccaatgagctcaactgtctattattaggggaatttaaatgagagaatgcacattaattatgcattgcagagtacatgggaaaatagtaaaagcttaatatttaatacggtc

SEQ ID NO: 354766 - DNA, 849 bp, Homo Sapiens
  misc_feature (754)..(754): n is a, c, g, or t
  misc_feature (782)..(782): n is a, c, g, or t
  misc_feature (808)..(808): n is a, c, g, or t
  misc_feature (813)..(813): n is a, c, g, or t
  misc_feature (826)..(826): n is a, c, g, or t
  misc_feature (835)..(835): n is a, c, g, or t
ggtggaagaaaaggttgaaggcagctgcctcgggagggttgtgatgctcggcacatcctgcctggcacatacacgtgtctgcaggccacaccgtgcatgtccccagacctgccgcctggcttctggagtgcttcaagcagagcatggtgggtcattgaggagacccaggaatctcatctgagaacccactctctgccggagaaccccatggtgacacattttcatctttctgacctttggaaaagccttgtcactttggacgtttgcgtcttttgaagaggcgatgggagcatatcatgactgcctgccaccattgcttttcagactaccacaactcaatcatgctgtccaggacttctggccctgtgttcaccactgggaaaacgtacttcagactggatagcctaaaaaggagcaatgcccttgtaggatgtggagaagggaaaatacggacattaacattaaaagacaccagtgaaattgttaggtctctaggaagttggagcacaaggcttcacgctttaagaccatctgtggttttcagtgaacaagcgctgagcaccagcagcagaaaacaacaacaaaaaaacacctcgtttttaccttgtcttctagacatgaaaaggcagttgcattccactctgcattatgttctacatgttgccttatcagtatatgcttagctgtaagtgacaagtattttttctggaacagaagtttacttaggaattaccaggcacttggggggtacccntttaaccggctggaaatttggccttttngttggtctttggggaggcccggtttntcttngggtttttttggnaggtttgtntcctttggggcccg

SEQ ID NO: 354767 - DNA, 1255 bp, Homo Sapiens
  misc_feature (33)..(33): n is a, c, g, or t
  misc_feature (326)..(349): n is a, c, g, or t
  misc_feature (362)..(627): n is a, c, g, or t
  misc_feature (997)..(997): n is a, c, g, or t
ctgctacttgagcccgggatgcaaccattttgncctgcatctcttctttcctgtagagcctttgaagcattgtattttgggaaaattcttctgtaaatactataacttttataaatggttaagttatttagaattatctccagtgcttacttctcccttcttctgtataaatctgctacttcaattaagttctcctctaaacttttaggtcattgtttatatagcagaaaattcaatgttagcggatggaaaactgcttcttgaataaccttgataggtcatccctgagtgcacctcaggttctctctttacctgggcttgtatcnnnnnnnnnnnnnnnnnnnnnnnngagacagagtttnnnnnnnnnnnnnnnnnnnnnnnnnnnnnnnnnnnnnnnnnnnnnnnnnnnnnnnnnnnnnnnnnnnnnnnnnnnnnnnnnnnnnnnnnnnnnnnnnnnnnnnnnnnnnnnnnnnnnnnnnnnnnnnnnnnnnnnnnnnnnnnnnnnnnnnnnnnnnnnnnnnnnnnnnnnnnnnnnnnnnnnnnnnnnnnnnnnnnnnnnnnnnnnnnnnnnnnnnnnnnnnnnnnnnnnnnnnnnnnnnnnnnnnnnnnnnnnnnnnnnnnnnncatgcccggatggggctggatcttttacctggggcgaagaaaacggcttcccacaaactatgaactccctactcaacggggatctctcgcaatttaccccctgcccaagccaattatgacccaaaccggtgtcggtccgccacaacaccccctccacaagtcgtatctatcccccggacccccattatacggggcccccacacaagtcccataccgaagatctcttctccccaaaaaacaccgcaggcccaatcggagcgcaccccaccccttctcacaattacccaggacgacacacctagatcatacattcctagtaaataagcgcgtcgacgaaattgttataaaactagcagcaaacgctgctccnacgactgtctgaggcgacacacatctgaatccttacatagtccgcaatcacacgtcgccgtcactccgacacacatactctcaatcgtatgattacagccaccaccacctgttcccgacaacccgatctgttcatatccaatccgactcactcacacactggaggccacatatacccctcgcacagaactaagcgcaacgtcgaacagactccacaatctcgtggcattgtctgattcgagtactttcggtgcccgcc

SEQ ID NO: 354768 - DNA, 739 bp, Homo Sapiens
  misc_feature (616)..(616): n is a, c, g, or t
gggaacataacaagagactgcaagacttcaaggactgcattcgtaggcaaaggttgacccaatcaaagataaaagaaaatcgacagcaaatcgttcgtgctcgaaaatattatgatgattatagagttcagttgtgtgcaaaaatgatgagaatgaggacccgggaagaaatgatatttaagaaactgtttgaagaaggtttaaacattcaaaagcaaagattacgagacctaagaaactatgccaaagaaaagcgagatgaacaaaggagacgccaccaggatgaactggactccatggagaactactataaggaccagttttcattgctggcagaagccatatcacaggaacatcaagaacttaaagccagagagaaatctcaggcccagacattacataaggtgaagagggagctgagatctaagatggagaaggaaattcaagcagctgcaggacatgataacacagaatgatgatgatgttttcttccgggaactggaagctgagcgcttcagatctcggcttcagctggcttcctttcagtacagtaaaagtccctccctatgaggccagacttgataatagtaggtgaaggttctggaggcctttaccnggacagagctagaatcgagccagtaaacagtctaagccaggaaaataattttcaaatgctttacctgtattttcattccagtactttttatgattttttaaataaaaattgttttctaaaagc

SEQ ID NO: 354769 - DNA, 293 bp, Homo Sapiens
ccccctgagacaacttacgcaagccagttattactgaaaaatcattgaaatgagacagtttacagtcatttctgcctatttatttctgctttgttctcagtgatgtatatgcaacattttgttgaaagccacgatggacttacaagctttaatggactcgtaagccagcatgggcttgcaaaaatttcttgtttaccagagcatcttcttatctttccacagagctatttacatcctggactatataacttaaaagaagtaaaacgtaattgcactactgttttccagactgg

SEQ ID NO: 354770 - DNA, 622 bp, Homo Sapiens
ttcatagtccctctcagaaacccttaagtatggctcataaggtacttcactataaaatcaactcaattattcacacatatggagggaattaatggcagaaatgaattgttaaaatcacatttggtttagattgcattcatgtttccagcaaatttattgtttctaatgtttatgctactattgaaatgaaattatttttcttaaatatatgtcaacctaaggtagcaggaggccctaaagcatagtaggttataaacttacttacaaggcatggacaaactggatctcattcaagaattgttaagatgtgatatgaagagattatgtcctttaaaatattattttcaattgtttgttgaataaattgaagaacacaattgagcaatgttttttcctgactgaaatctgttcaagtaaacttagaagaatcagttactatatggtataaggtgatgcatgttccactatattactctgggtccatttaaccaaattattcctaaaacaacagaccatacttcagtgtatttcttactggttccttcagagttagcaatttatttcctttttgttctcattaaaaggtttatcactgcttaagaaagagagaagactaaccgct

SEQ ID NO: 354771 - DNA, 1115 bp, Homo Sapiens
  misc_feature (820)..(820): n is a, c, g, or t
gagcgaggcctgggtggcgaattcggcacgagggctatccaaggggatggacccaggctcgtggggaggttccacccttggatccaggaagaaccctccaccctgcctcgtgggtgggccaaaggctacagggtgcttcttcctcttcccccacccccactgtccctcatgtgccatgggcctgcctccccagtgacctgcgaaagtggagcatcgaggtaggagggaaacggcaaccggggagtcctcgagcctggggctgccctacctctacccattccccgaccagagctttgcccttgcttggctgcccgcctgcctctttggggaactgagctcagaggcaggtgcttcagagaaggaaacaaaatgaggggtggcagggataaaaagtcacctccattctctacctcccatgcagcatgaacacaatttctctccacctggctcccaaatttaaagatgtggaccaaggcctgtgggtactccaggggcaaggagagccctggggtcagtgacactgtcaggccaaccatgcactccacaaaggggagcatttggaaatgaaggactagctcctatgtatcaggttaagagcaagggagagctggccagggacagcagtttgcacagcagaggggaatgtagcaacagcagggcctcctaggccccatcttccatttcttaggtaagaagagcatttcctcagactcccaggcggaggactgagcctagccttcagcaaccaaggttctcctgggacccaaagtttatgggagaagggcaaagacttcatgggaaagagagaagaagggcctgngtagaaacgcttggtgctgttctctttggcctttagacaaagcgctcatcttgccctctacctcctgataggcttgaaggtttgccaacacactgtggctacaggtggagggaagaggactccttccctcaagtgctatggttaggaagtttctttaacccatatggccaagaaatactttgaagaggcccttttaagacaggaacagtaatttaccggttctactgggggttcctggccaccgtccccaggtggcccagccctaagaaaagggtcattctttaacccacattta

SEQ ID NO: 354772 - DNA, 417 bp, Homo Sapiens
tgcggtcagtagactggacagatatcttcagtgtagccaccgctatgtctcataattggtatacccagcctgagaggtccctggtctcttcaatgactgagttgaggcttgctgtgcggactcagctaatgctagcgccaacattcgggcaacatttttcggaggcggtggtggtgggataagagagactgaactgacaggaacggaatcctgaggggggtcatgggtaactgctcctgtctgagtctgtccagaagctacagccttactctgactgcttgagacagactgatcctctttccctggcaagtctacttcttcagcagccacctggtccaggggctggacttcagattcatatgcttcttgggcaactgtctcatttgttttcatctttactatctgggtgggggatcc

SEQ ID NO: 354773 - DNA, 503 bp, Homo Sapiens
  misc_feature (184)..(250): n is a, c, g, or t
ccccgttagattaataccctctctctctctttaattgagtgagactcaatataaatggtgtctctcttgagcacatgtacacacctctctccctcgttgggatattaaaatgaagctgtgactcttagcccccactaagcgcgacactcaatataacactcttctctctattcaaaaataatgnnnnnnnnnnnnnnnnnnnnnnnnnnnnnnnnnnnnnnnnnnnnnnnnnnnnnnnnnnnnnnnnnnncatctgtatgatgatttgccctggagttgtagacatcacagatcaaaagtggcctggtgctagctgtttgggtatatccttgaaaagggcaactttgtcatttcctagagtaacctagagagagatttccaagcatttccccatgaacagaagtggtaaatgctgatttattgtgccatatgtgtgtttgggaggaggggagatagcgtcttgttttgaaaaaagttctcacttcataaaataaactgcacac

SEQ ID NO: 354774 - DNA, 395 bp, Homo Sapiens
  misc_feature (251)..(275): n is a, c, g, or t
ccgatacgaatcgagccggtaccctcgcgaacgtgttatccttttgattagttgattggaaacaaagaagcaaaacacatacacatgcatgcgtgcacacacatacacatatactccctcgtaaaatgtgaaaaatgcaaatatataacgctggcattcgaaatcacttcagctttatacttagaactcataggctcttgatttgcccccaaaaatatttttccttgtccttatttaaatgcccaactacnnnnnnnnnnnnnnnnnnnnnnnnnggctttaaatgtacatgtttcaagtcagtgtcttgttaacaaaaaaggtagcattttcttcacttgggccattgttaaagatgcaggcatagagcaggaaatgttagactagcatgtatt

SEQ ID NO: 354775 - DNA, 1785 bp, Homo Sapiens
  misc_feature (45)..(81): n is a, c, g, or t
ggatcagctactattgcggacccggattaaccgcggtggcggcgnnnnnnnnnnnnnnnnnnnnnnnnnnnnnnnnnnnnnatcaggccaaatcggccgagctcgaattcgtcgagagcgggccgcgccggctgctgcggctggcacttggccctttaatccccttcgtgggcccctcaacctggagcggataaattcttggcgcttctccgggggttgtgctcttccgtactcggatcgcttcttaggagtatcctaactgccggattgtcagtggcttcgccccgaggagagctgactgccctgggctgctgcctccggcagagctgagccaaaatgtccccggaatctaaaaagcttttcaacatcattattttaggagttgcctttatgtttatgttcactgcctttcaaacttgtggaaatgtggcgcaaactgtcatcaggagcttaaataggacagattttcacggcagtggatataccagcatggctattatctatggagtgttctctgcttcaaatttgattacaccgtcagtggttgccattgtaggacctcaactctctatgtttgccagtggtttattttacagcatgtacattgccgttttcatccagcctttcccgtggtccttctacacagcctctgttttcattggaattgctgctgctgtgctttggacagcacaaggaaactgcctgacaatcaattcggatgagcacagcatagggagaaacagtgggattttctgggcacttctgcagtctagcttgttctttggaaatctctacatatattttgcctggcaagggaaaactcagatatcagagagtgaccgaagaacagtgtttattgccctaacggtgattagccttgtgggggacagttctattctttctcattcggaaaccagattctgaaaatgtcctaggagaagatgagtcttctgatgaccaggacatggaagtcaacgagtctgcccagaacaatctgacaaaggcagtagatgcttttaaaaagtcttttaagttatgtgtcaccaaggagatgctccttcttagtattacaactgcttatacaggtctggaattaactttcttctctggtgtatatggaacctgtattggtgctacaaataaatttggagcagaagagaaaagccttattggactttctggcattttcatcggcattggagaaattttaggtggaagcctcttcggcctgctgagcaagaacaatcgttttggtagaaatccagttgtgctgttgggcatcctggtgcacttcatagctttttatctaatatttctcaacatgcctggagatgccccgattgctcctgttaaaggaactgacagcagtgcttacatcaaatccagcaaagaagttgccattctctgcagttttctgttgggccttggagacagctgctttaatacccagctgcttagtatcttgggctttctgtattctgaagacagcgccccagcatttgccatcttcaagtttgttcagtctatttgcgcagccgtggcatttttctacagcaactaccttctccttcactggcaactcctggtcatggtgaatatttggggttttttggaacaattttcttttcttcccctgtggaaatgggaaagctgcccgcccttttgtaccccgccggctctggacttcccaaagtattctgaatcctgggggccccggggaaggggaacaccgtaatggaccctccagaaaacaccggctggggaacccagaaacctttggggggg

SEQ ID NO: 354776 - DNA, 1252 bp, Homo Sapiens
  misc_feature (132)..(140): n is a, c, g, or t
  misc_feature (879)..(879): n is a, c, g, or t
agtcaccctatggggatggacccccttaaaatgctctggacccggggaaaaccccgtcgtaagaaaggtagcccacacctttttttctagaggctttattgattataagaaccctttggccattgtccggannnnnnnnnaaaaataatatccttattaaaaaattcaaggggcccttttcacttccagggggaaattttctagggaggtctaggtggtcggagatatccccttctaaaaggaaggaaataagttgtttgcattctagcccccttgtacacccaaaaaaaaggaggcataacaccattaggccttctttggattttagaggcaacatattcctcaattgagtgtgttactctctgacctatttgccaagtgacccaaaaagctgctagttttaagcccaggataaaagcaggctctgcaacagggtccaggctgctgtgcaagctgctctcccacttgggctttatgtttcaggagatccaatggtgcttgaagtgtcagtggcagatagggatactatctgaagccactggcaggcctctacaggcaaatcagtgtggaccctagaactgtggagcatgccatcttccgctgataactactctccttttcagaagcagttttggcttgctcctgggacttagtggagactgctcaagcatgggccacctagctaccctgcaacctgagctttccatcatacattgggcattgtctgatccaccaagccataaagttaggcgtgcagaacagcactccaacatcacatgaagtggtatacagttgggtcctctgtatcctctgtgtggagcctgggccacatgggtctcccagatgtgctctgaagtcactgtcaaaagtcatgggcantggagagtttcatgtgcctgacgctacggaagataccaaattctacatttgcctccaatgggcacaaatgtcagtttccatcaagctccaccctgtccaggtgactcctgttgtggctcttttcatatcatctccccttctcccacaagtgccaccaacaggcaaaggtggggagctgggtttggagacgctggtctgacccttacggtgaaatcctctcccctgatgttgcaggagaatgggtgctcagatggagaatcagcactcttctcaggacttggaaggtgctgtggctgggggagtctgcattatgttctgggctgtgagcttttccagattcaactccacatgcacacgtctgctgttgtcaaag

SEQ ID NO: 354777 - DNA, 1065 bp, Homo Sapiens
  misc_feature (19)..(19): n is a, c, g, or t
  misc_feature (38)..(38): n is a, c, g, or t
  misc_feature (638)..(638): n is a, c, g, or t
  misc_feature (864)..(864): n is a, c, g, or t
  misc_feature (887)..(887): n is a, c, g, or t
  misc_feature (906)..(906): n is a, c, g, or t
  misc_feature (925)..(925): n is a, c, g, or t
  misc_feature (934)..(934): n is a, c, g, or t
ttggggaaactctcttctnagctccctttgccagtccnaagcctggtggatctgcatctcacgcccactgcacaccgttcctctccatctgcccttccctcccaggcccccggtcgggggagcaggtgtggcaagtgttaggaactcccttctggtgacagctggtcttcctagagtgttgctggtaactatcgcctcttggtcttctgacatcattgccaggaacggggcactttttcgtcttgtagtttggccctcgggtttcctcactaggtattgtgtaactccctcaaaaaaaggtttatgaaatgctgaacctcaggtttcatagacgtctttgtacactaaaaattctgcagcagaatatttttaaacattcgcagttttttgtaagctatatttttgtatatttaattgctattttaaaattttaatgcattttgctaatcactcctcaaaaataaaacatgcatgtaattgactcaaacgtgtaaataaaagcaaattttgacgcaagcaccttcagcaagacttggaaactcaaggtgagtaattctatcagagctggtaactagtactgagtgattgtgatggaagcccctgcccttcctgtggcatagtgtgcaagcgggggtggngtcagtggtgaagagtgtgtcaggccaccacagccagagaacagagaatcctggaatgcagagtacagtggagtctgaagccccctggccttcctgagctctgaaacagctggatacagataagcagtctttcacgtgaacgccagcaccagggtgacctgaaatagcctcgtgccgaattcggcacgagcacacatcacaggcttaaactgtcttagagactttncaagtgattggatcacaggctanggatctgtgcatggtgccngttgaaacccaagtcttcncagtgctangtgagggagggctcaaccggggtaatgtgaatggggctgttgtcttttgcaatcccttaacatattaactttggacaaaccttgataggcttgcaccaaacctttctaaacatttttatggatcatctcct

SEQ ID NO: 354778 - DNA, 975 bp, Homo Sapiens
  misc_feature (537)..(537): n is a, c, g, or t
  misc_feature (603)..(603): n is a, c, g, or t
  misc_feature (672)..(672): n is a, c, g, or t
  misc_feature (840)..(840): n is a, c, g, or t
  misc_feature (866)..(866): n is a, c, g, or t
  misc_feature (937)..(937): n is a, c, g, or t
ggggaggtcagaccggttgctttcccgggagttcggcgtttgctggggctgcagtagctgaagtgtagtgttttcttgggactggcggtctgcacttctctcccgggttccatctccccccgcccggtggtgaggccctcgaggagggctcggacgggtgtagcgatccgcgctagaggaagacgaggcccgggaacgcatgtcccccagggcaggttagggggctggaggggtcaaatcccgcggtacttgtggagactctttagcgtggcttcttctctctgctgagaccccgagagctttcccagttctcctcccaggaccaccggggttcctgaagatcgggacttttctgcgcccctccaccaacagcccatctcctgtctatgaagaaagacccttcgtagaaacaacttccccgctgctgacgcgttttcccgtcccgtccccgaagtagtctactatgacctcgttgtgagcctctgaacgattttgacactttcccgaggcctagggtattatatcctaaccttactnaagaccacagaggtgcttgccattatgggaaatcagcttgctggcattgctccctcccagatcctnttctgtagagagttatttttcagatattcatgactttgaatatgataaaagcctgggggagtactcggnttttttaaagttgctcgagccaagcaccgagaaggcctggtcgttgtgaaggtttttgcaattcaggatcccacattgcctttaaccagctataaacaagagctggaggaactgaaaatcaggcttaattctgcacagaattgtctacctttccagaaagcatcaganaaaagcatctgagaaagcagctatgntctttaggcagtatgtgcgagacaatctctatgatcgcatcagtacccgtccattcttgaataaccattgngaagcgctgggattgctttccagatcctgacagctgtg

SEQ ID NO: 354779 - DNA, 431 bp, Homo Sapiens
  misc_feature (403)..(403): n is a, c, g, or t
cggtgatctagcaggagcttattcggagtgcgtgggcggcaggtcttgtggcacgcgtttcctcaccacctacgaccggcgctttgtcatcaagactgtgtccagcgaggacgtggcggagatgcacaacatcttaaagaaataccaccagtttatagtggagtgtcatggcaacacgcttttcccacagttcctgggcatgtaccgcctgaccgtggatggtgtggaaacctacatggtggttaccaggaacgtgttcagccatcggctcactgtgcatcgcaagtatgacctcaagggttctacggttgccagagaagcgagcgacaaggagaaggccaaggacttgccaacattcaaagacaatgacttcctcaatgaagggcagaagctgcatgtgggngaggagagtaaaaagaacttcctggagg

SEQ ID NO: 354780 - DNA, 341 bp, Homo Sapiens
  misc_feature (13)..(13): n is a, c, g, or t
  misc_feature (64)..(64): n is a, c, g, or t
ccaaaaaagtganaaaaccacaaatatcacttgactcagccctacccatattcttttcataaancccactcaccaggtacaatagaaacttccctccttgtttgtcagcctcctgttcatgttccccacacacctgaaggtggtagaatcttttcagcctcttagccagtgagctaaatatggctaagcacaggtcataagagcacctaaggccagcatataagccaactacagttcacctttccaaatttgggcctatggatgttgagcatagggaagcaactctcagtattttggattattcaagtgtatgtggtaaaaatgcagatgattgctgcttt

SEQ ID NO: 354781 - DNA, 286 bp, Homo Sapiens
  misc_feature (72)..(72): n is a, c, g, or t
ccaaataactaatatcaggaataaaacataggatatcactagagaccctacagacatcaaaaggataatacnggaatactacaaattattatacacacataaatttggcaacttagatgaaatggatcacttccttgagaaacacaagctaccaaaactcaccaaatatgaaataaggtaatctgaatagtcctatcactattaaggagacggaattaataacttaaaattcctccaaaataaaaccccaagtcaggatggtttcactagaaaattctatcaaata

SEQ ID NO: 354782 - DNA, 369 bp, Homo Sapiens
  misc_feature (273)..(273): n is a, c, g, or t
tggcacgagggaatcagtaaccagatgcagcaaatatctaggcaatgtggactacctcattcagtaactgattgtcaaaatcacaattaaatcagacttcaaaaattaaagctaggtgtatagaatcatgctaaaagaaaacatgataactcatagtctacgtaacttcagagtctttaaacatgacaatccacattgtcatatgtgaaaattttctctctgatttttactttcattcatgaaaaatgaaaattcagaaattctttttttccnttttgttttgagacagggtctgctctgtcacctaggctggagtgcagtggcttaattcatgggctcattgcagtctccatctcctggggctcgagt

SEQ ID NO: 354783 - DNA, 761 bp, Homo Sapiens
  misc_feature (649)..(649): n is a, c, g, or t
  misc_feature (657)..(657): n is a, c, g, or t
  misc_feature (670)..(670): n is a, c, g, or t
  misc_feature (679)..(679): n is a, c, g, or t
  misc_feature (701)..(701): n is a, c, g, or t
  misc_feature (703)..(703): n is a, c, g, or t
tagatgactccctttcagtgtctgttgtgcaaacacctaccacattccaggaaacagaaatgtctccatctaaagaagaatgcccaagaccgatgtcaatttctccaccagatttctcccctaaaactgcaaagtccaggacacccgttcaagatcacagatctgaacagtcctcaatgtctattgaatttggccaagaatctcctgagcaatcccttgctatggacttcagtcgacagtctccagatcaccctacagtgggtgcaggcgtgcttcacatcactgaaaatgggccaactgaagtggactacagtccttctgacatgcaggactccagtttatcacataagataccacctatggaggagccgtcctacacccaagataatgatctttctgagctcatctcagtatctcaggtagaggcctccccgtccacctcttctgctcataccccttctcagatcgcttctcctctccaagaagatactctatccgatgttgctcctcccagagatatgtccttatatgcctcactcacctctgaaaaagtgcaaagtctggaaggagagaagctctctccaaaatctgatatctctccacacaccccacgggagtcctctcctttatattcacctactttttcagnttctaccnctgcagtcaaagngaaaacagnaaacttgccacagttcctcttntncaccaatagatgcagcatccgcagagccctatggcttccgtgcctcagtgttattcga

SEQ ID NO: 354784 - DNA, 1685 bp, Homo Sapiens
  misc_feature (1597)..(1645): n is a, c, g, or t
gaggcagacacgagacaaggagtgtggttataatgagctcaaagcctgtgccggtctggtctgtgaaaggtgaggcgaggtcaacaccccgggcagaagtcaggggggccactctagccatggcatcaggagtggttccaggcacatctctgggtcctgaggagccccccagcccagggctgggctctgcctgaggcccaggtgtcaatccctaaggtcttggggtctctgaggggcactgtcttcaagggtcacactggcatgtgcagctcattgtactcatcctggccatcctcatcgaagtttggttcagcatcttccgagtccagcgcctgcagctccctgtcctggaagagccggggcagaaggcaatgcctcagaggcaccgtgagcagcagcaggaagggaaaggcgagtgaggccgccgtggacttgaccacccagagcagtgcgatgcagcccagctggatgcaggtgaacagatgcatccgccacgtcttcaccttggtcacatagggctgctcaggatggtgttttgccggcatgaggatgagcaacagacgctgggacagctggataccagacagggacgtgacccccatgtacaggaagatcccaaagagcacagccaatgggatccgacgcagcacagcccccatgacgatggacaggcccacgaggctggcgatgagcacaccagtgacccgctgctcccgcacctcctggatctggggcttgtcaccaggcgcgatggcagtacgcatcactgtcaacgcattgacatgggtgacggagcggaccgtggcagccgtgagccagggcaacccaaacagcccacagagcccccccagggagccaatgaggagcaggtccaggtggaaaccggagcccttgagcagcctccgcgccttctggctgacgataagcgccgtgatctgtgtctccatgaagatcaggatgaggacgaggagggcgggaacagcggctgccaccatcatccacggcgggaaaggacgggcactgcccaggggtgggatgaaccacgagcgcttatcgggagaggtcactgagagccctgtaggcactgtcagcttctgcgtgtaggtgtctgtgatggagtaatccaccaggaccatcaccaggatggagatggggatgccaaagtccccgatgatgcgacgagccttgccccccaggaagcggctgttcctgaacttgcgcaggaagaaggctatgaagaaggtcccaagcatgagaatgagggacagcagagccgtattgggctggttcctcgggcccggcggcccctcagtggggggcagggcactgccatttggctccagaccagcagccagggaccccctcaggccccctcagggggtagaacggcagcagtgggggctctgtaacaccttgtaaagcttgtaaaggacttgtatatgaaaatgaggagatggaaaggcaacaatctcctgggggaaagcaagatgtaacgacccagaaagctgccttcgcggcccaccaggcagggaccaaaaccacccggcagaaaacaaaccccacccggcccgggaggtcctccaggtccctggctttnnnnnnnnnnnnnnnnnnnnnnnnnnnnnnnnnnnnnnnnnnnnnnnnncccacccacagccgcggctgtacttcccaaagaaaagaag

SEQ ID NO: 354785 - DNA, 739 bp, Homo Sapiens
  misc_feature (256)..(256): n is a, c, g, or t
ggatgtgaacggtgtggagcggaggccgcggaggcccctcggtccttcagcacccctcggcccgacgcacccacgcccctcaccccccgagagccggtaaaagaggcacccggggagctccgggagggagcggggccccgggcagccgacccccgggtgggagctgggcagctcttcaggcggggcggggccggcgcgcgaacaggtgagccgggcgggccgcggggctgcctccattcggctgagtgggggaagnccgctgccgctgcttttgtaggcgcgtgggctgcggaggagcagccgggccgaggctcggcgccgccgctggaatgtcactgacggggggagggggcgcgaggccgccgggtccctcccaaccacccccaagcctggctgcggcgcggccctgccctgccccatccggctgcggcaggtgggtgggggctccctcgtcgggatcttcgccagccgcctccctgcagaacgctcccaacaccgcccccggtcccttccctcggccgggagcgacttctgcagctcgttcttccgaatcgcaccagcaatgccggccagccgtagagggaggaagagcccggggagcccgagcatagcgtaaacggctctctgaccttaatttcatcctgcatggcgaatctctgccgtctctctgaacgcagaagggtctgagactggccgtctccttttctttccttgtaataaacatttttctttcttccta

SEQ ID NO: 354786 - DNA, 1258 bp, Homo Sapiens
actacatccaacgccgcgatcatacatcaaatactcgttttataatttaaagtgactgcagaatttacaggtgcagtttctcggactgcatccaacgccgccaaggtgcggatctgctcccagtttgtaatcagttcctctcgcttcacttgaatctgtgttgcactcagagggtgggactgttgcaggcggtcagcctcagcacacagggctttgaccttgtcttctagagcagcaagatctctctccagaccctcgtgcttccgaagcagagcctgaacacttgccaggtctcggccaaaatcatcagaggccattaactgctccttttccttaatccaactgatagtctcatccacatccctgttaaagcgctgaacttctgctgccccaaagagcttcccctgcctctgcagagccaggcccttcagccgctgccaggctgcattgacttcatcctgcttagtcttgatcagttcctcctcagggtgctgctcctgtatgagtttggcagcaaactggttcacttcattaactctttcttcatgagcagccatatctgtttgaaactcttcaaatttcttctgtaaaacctctacatgctccagatcctggcccagctcttcagaagtaacaattgcttccttgtcattgatccagtccatcacgtcctcacattctcgtaagtactgcaccaacttctgggcctgcagcagtttgattcctttttctcgcatcttctccaaaagtaattcccactggcggtgcagctccatcaaacgggtccgtatggtttcagatgcaaaatgcccttctgagatcatcaggtttccagtttcatccagcttaacaatggctcctgagttggcctgcacttcagcttcaaatgcttgatgcttctgaagctttccctgcaagttggttgggtctttataattctcatcagatgcaatctgaagtttttcctgtatccatttctccagctcttcagcatctctttgaaagaactggaatcgataggaatcttccagcttctgacgcctaagggttgagagttccttgaagcggtggtatcggtctaggacctgctgccgcctctcctggatgtcctctgctgtttccagcactttgaccccacttgggtccattttcggctctcggggggtgaggggcgtgggtgcgtcgggccgaggggtgctgaaggaccgaggagcctccgcggcctccgctccacaccgttcactccgcagcgggtaga

SEQ ID NO: 354787 - DNA, 582 bp, Homo Sapiens
  misc_feature (566)..(566): n is a, c, g, or t
gactacccgctgcggagtgaacggtgtggagcggaggccgcggaggctcctcggtccttcagcacccctcggcccgacgcacccacgcccctcaccccccgagagccgactccacattcctccatcatgttgtcatcgtttcgtaaacgcagagtccagaaaatggacccaagtggggtcaaagtgctggaaacagcagaggacatccaggagaggcggcagcaggtcctagaccgataccaccgcttcaaggaactctcaacccttaggcgtcagaagctggaagattcctatcgattccagttctttcaaagagatgctgaagagctggagaaatggatacaggaaaaacttcagattgcatctgatgagaattataaagacccaaccaacttgcagggaaagcttcagaagcatcaagcatttgaagctgaagtgcaggccaactcaggagccattgttaagctggatgaaactggaaacctgatgatctcagaagggcattttgcatctgaaaccatacggacccgtttgatggagctgcaccgccagtgggaattactttntggagaagatgcgaga

SEQ ID NO: 354788 - DNA, 665 bp, Homo Sapiens
agcccttcgagacaaacacgggttgtatctctgatcctgccctacctaggcttcaaggggccttctgtctggagaaatgcccctcaaaaggggtaaccagtaggtgtggcattgaattggccagtgttagcatctacagccatcaccgagatgagtttgcctgcccgagggccccctaaggttatagacggtatcagcagggaggccgtcccgctggttttctaggagagcccacaggaggaagggagcctcttcaggggcactggaatcttttgtgccaggggcttcttttcatcagagccggggagtacattgcagtgacttcttaaacatttgtgtgggacagacgagcgtgagggaggttttaagccaggcacaaagttagtttccaatactagttaataaatctatttttcttcatttcctttttttgcacagaagctggtaatctaggacctacgtgtgaacaactttatatgaatattttttgtacttggtttacttgggttggtatgatacattatatttaagttccttgaacactgtggatcccctaatgtgtatgaatgactgaggctttgtaaattaagggacgtttgtgtgaataaagttatttgatggggtcaaaaaaccgcgccccaaaacatagaatacgcttgtcgggc

SEQ ID NO: 354789 - DNA, 967 bp, Homo Sapiens
  misc_feature (804)..(804): n is a, c, g, or t
cattccttcattcactcatttttaaaagcgtcatatgtacaaatatatagtccagaaaatttttaaatataactgtctataaaagtatgtggcaaaatcccattcacagtcttattctccttccacagccaaacacttttaattcatttcttatatatcatttcagaatttatctttgcaaatacacatgtatattcttattctacccttctctctcaacacaaaaagtagcataccacacatacgataccattccttctcccttttaaaaaacacacagaatatatccgagttctacgtgagtacagagtctttctcattcttttcagctacacagtatgcatcatttggatgtaccacagtttacttaaccagttcccatttggcagacactgaaatcatccctatcatactattacaggcagtaatgccaagcataaccacctatacacaccaagttcattgctgaatctgcctttgatgaagcctctgtttgaatcaccataatgtcacaaggctgaaaagttagcccccttttttagttttcattatgtactgcagtatgtagcaaaagactccctcgggcaaaaggaaatgtactctttggggatttacttcataacaataaatggataaacagaacaccaaggataactgtttatatttaaccatgaacatgtatgtatacaatacatgcacatgcatagaaagtataaaataaataaatccatcaaagcattaagcattgtctcagtatggtggatctagggagtgctttgtagaccaccctccttgcctatcaantctttctaatttcacaacagtaaatacgtacaacttctgcaatataaaatttcaaaaaatgttaactcaaattaagctgcatatattccttcagtctgtcctatatttgtatgatgctccagaatgctcaaataacacttcattaaaaaaatttatttcttca

SEQ ID NO: 354790 - DNA, 1720 bp, Homo Sapiens
  misc_feature (685)..(725): n is a, c, g, or t
  misc_feature (1575)..(1575): n is a, c, g, or t
  misc_feature (1583)..(1583): n is a, c, g, or t
cgctgggtccccaagtttcaaaaaaggcaccaatgaaacagggggaaattgaagagggtcagagggacccctgtattatgagggagaaaagtggcctccacatcagagggaaccgcgtcaaggtgcccgcggccatattaagagggattggggaaaaacctgtaagacgagaaataaaaagaggtaccagggcaaaaaagaggtacaggaggcttacaggggattcaagggtatttcatagtaatgaagtgatatgcagggggggcaagggcatagaaaagagagaggcgggtaaacaagagggaggaaggggataccaaagaaggggggttaatccaggggggccaagcaaagcaaaggttggaaggccaggcctaagcagtttttaggtcctgggccagaggcagggtcactccccaaggatcaggaaaaagcaagctttgatcaggcaggttcttcactgactgcagatcagattgccatgctgccccttaagcaaaggcagagtatcctgattttaaaggaacaaatccagaaatccactggagcgtcttgaaaggttttagaaaatatttggctgtagtctcaaattttattctgtagcatggagaatgggtgcaaaaagctgacttctgtatccccacacttggattagggtttccctcctcctagaacctaatcttannnnnnnnnnnnnnnnnnnnnnnnnnnnnnnnnnnnnnnnnaattgagggtggggggaggagggagtgcgtctgttcactttaagttactttaaaataactctgaacatgattatattatgccaaataagattacaaagaataagcagcaatattgaagcatctacagtatgttaactacattttttaaatgtcgagtaaaactttgtgaaaactgctcataaagactaaaagttgacctgttaaaacgttaatgtactaagatagttttaagatttttggttgtataacaaaataaaagtttacccaaaagtataagatacattttttggtaaaccatttaaaatacaaaatcctattttggaggcaataggataagcattgtcttagtgttttagaattatttttgaaacagagttaacaggataaggttacacttgtattagaattgtttttttctaaagttatgttacctgaaaaatcaaggagtgcacctgatttactgttgcttcatttatcccatccttcagagaccagcaaggttctgccaggccccaagcatctgagcatgatgattttgctgtgacaattctaagatcaaccaggttacttaagtccgctctgatgaaacccagtctctcaataccttcctatttctcaatagtctttaagccctaaatctgagtcagtaattctctaaaaatccttcccaaaaatcagtgtctagggactggttgatctagatgagttataaatggtatttgacttttcataagtagtggaaggtttcactaagtaaagatctgagtttcttggtatctgacgtttgtatacagatggtgtccatttgctcaaccagacaggagttaacttgtattaggaattgtttttnctaaagtnatgttacctgagaaattaaggactgcacctggtttaatgttgcttcacttatcccaccctacagagaccagcaaggttctgccaggcctcgagcatccaagcatgattttcctgtgacaaaatctaaaaatccaacc

SEQ ID NO: 354791 - DNA, 402 bp, Homo Sapiens
  misc_feature (14)..(14): n is a, c, g, or t
aagaaaataggaanggtattgaagagactggggtttccatccagaacgggacctaaagtacccccgggtggatcctaagaattgtccacagcaaaatccatcatgcctcagatgccttggggcccggcagaaccttgcctggtctctgaaggatgggataaatgaagcaacagtaaatcaggtgcactccttgatttttcaggtaacataactttagaaaaaaacaattctaatacaagtgtaaccttatcctgttaactctgtttcaaaaataattctaaaacactaagacaatgcttatcctattgcctccaaaataggattttgtattttaaatggtttaccaaaaaatgtatcttatacttttgggtaaacttttattttgttatacaaccaaaaatc

SEQ ID NO: 354792 - DNA, 438 bp, Homo Sapiens
aaggaacttataacttttatgggatccagtcctaaagtagattagaccgatgtagaattctgtctggagacgttctccccttcaattcaatgggaaggctcttttctggcatgaactctccgatgtctaatgagctctgagcaccatccataagctttcccacattctttacatataaaaggtttctctccactgtgaattctccgatgctgacttagatatgagctttgactaaaggccttcccacactcattacactcatagggcttctctcctgagtgaatcctctgatgctgaacaagatgagcaccccatctgaaggccttcccacattcattacattcgaagggtttctctcctgtatgaattctctgatgctgaccgaggtttgagctttgtttgaaagttttcccacagtcactacacttttaggggttt

SEQ ID NO: 354793 - DNA, 498 bp, Homo Sapiens
agcggagagtcaactctgccccgaggcctagcttggccagaaggtagcagacagacagacggatctaacctctctgggatcctccagccatgaggctgctctgggggctgatctgggcatccagcttcttcaccttatctctgcagaagcccaggttgctcttgttctctccttctgtggttcatctgggggtccccctatcggtgggggtgcagctccaggatgtgccccgaggacaggtagtgaaaggatcagtgttcctgagaaacccatctcgtaataatgtcccctgctccccaaaggtggacttcacccttagctcagaaagagacttcgcactcctcagtctccaggtgcccttgaaagatgcgaagagctgtggcctccatcaactcctcagaggccctgaggtccagctggtggcccattcgcacatggctaaaggactctctgtccagaacgacaaacatccagggcatattaaaggcttttggcagc

SEQ ID NO: 354794 - DNA, 1063 bp, Homo Sapiens
aatgcaacaccatctagccttgaatagagatttgtccacacctggcctggagaaggacagtggagggaagacacctggtgactttagctatgcctatcaaaagcctgaggaaacaaccaggtccccagatgaagaagattatgactatgagtcttatgagaagaccacccggacctcagatgtgggtggctattactatgagaaaatagagagaaccacaaaatctccaagtgacagtggctactcctatgagaccattgggaaaactaccaagacccctgaagatggtgactattcctatgaaattattgagaagaccacacggacccctgaagagggtgggtactcatatgacataagtgaaaagaccaccagcccccccgaagtgagtggttacagctatgaaaagactgagaggtctagaaggcttctggatgacatcagcaatggctatgatgactctgaggatggtggccacacacttggggaccccagctactcttatgaaaccactgagaaaattaccagtttccctgagtctgaaggttattcctatgagacatctacaaagacaacacgaacccctgatacttccacatactgttacgagactgcagagaaaatcactagaacccctcaggcatccacatattcctacgagacttcagacctatgctacacggcagaaaagaagtccccctcagaagcccgtcaggatgtcgatctatgcctcgtgtcctcttgtgaatacaagcaccccaagacagagctttcaccctctttcattaatcccaatcctcttggagtggtttgccagtgaagaacccactgaagaatctgaaaagcccctcactcaatcagggggagccccaccgcctccaggaggaaagcaacagggccgacagtgtgatgaaacccctcccacctcagtcagcgagtcagccccatcccagaccgactctgatgtcccccggagactgaagagtgccctccatcaggggcgagccaatatcgactctgaaacgagtcggaaacatccccacagcttcgctgatgggatctc

SEQ ID NO: 354795 - DNA, 1122 bp, Homo Sapiens
  misc_feature (986)..(986): n is a, c, g, or t
  misc_feature (996)..(1028): n is a, c, g, or t
gggggtcaaggccgttccttcagtgttttcagacgccctgggaacgcggctgcagggtccggtcttcggtttgcacagctagaggccgcgcagcagcaaaggatgagcggaaccttggaaaaggtgctgtgcctgaggaacaataccatttttaagcaagccttttctctcttaaggtttagaacttcaggagagaagcccatctattctgtaggtggaattctactaagtatcagtcggccctacaagacaaagcccacccacggcattggaaagtacaagcacttaattaaagcagaagagcccaagaagaagaagggaaaagtggaagtgagagccattaatttggggacagattatgaatatggggttttaaatattcatctgactgcatatgatatgaccctggcagagagttatgcccagtatgttcacaacctctgcaactctctctccattaaagtcgaggaaagttatgcaatgccaaccaaaaccatagaagtgttgcagttgcaggaccaaggcagcaaaatgctcctggactcagtgcttaccacccatgagcgagtggttcagatcagcggtttgagtgctacgtttgcagaaattttcttggaaataatccaaagcaagtcttcctggaaggaatcagactgtcagtgaaggagcacactgaagaagacttcaagggacgattcaaagctcgaccagaactggaagaactgttggccaagttgaagtagctactgtagaccctttcatgccagcagtggtcatattgagtgccaaagagaagagcttactgggtagttagagttcatcaggagacccaacccttagatttcataagtaccccattcccatagccagtaatgtccctcactcctctgggggccttggctggaccttgccatttccttaccacttacctaagaaggaaatgcttggttatctttccatctaaataaaaatctgcttgccggaanaaaataaatnnnnnnnnnnnnnnnnnnnnnnnnnnnnnnnnntatttcgggggcgggccggttctaaaagaattcccctcaaggggccccaaggttttacgcgtacccccgtgtttttttgggaaaagggggggtc

SEQ ID NO: 354796 - DNA, 1150 bp, Homo Sapiens
  misc_feature (932)..(996): n is a, c, g, or t
agcggggtccttcagtgttttcagacgccctgggaacgcggctgcagggtccggtcttcggttgcacagctagaggccgcgcagcagcaaaggatgagcggaaccttggaaaaggtgctgtgcctgaggaacaataccatttttaagcaagccttttctctcttaaggtggaattctactaagtatcagtcggccctacaagacaaagcccacccacggcattggaaagtacaagcacttaattaaagcagaagagcccaagaagaagaagggaaaagtggaagtgagagccattaatttggggacagattatgaatatggggttttaaatattcatctgactgcatatgatatgaccctggcagagagttatgcccagtatgttcacaacctctgcaactctctctccattaaagtcgaggaaagttatgcaatgccaaccaaaaccatagaagtgttgcagttgcaggaccaaggcagcaaaatgctcctggactcagtgcttaccacccatgagcgagtggttcagatcagcggtttgagtgctacgtttgcagaaattttcttggaaataatccaaagcagtcttcctgaaggagtcagactgtcagtgaaggagcacactgaagaagacttcaagggacgattcaaagctcgaccagaactggaagaactgttggccaagttgaagtagctactgtagaccctttcatgccagcagtggtcatattgagtgccaaagagaagagcttactgggtagttagagttcatcaggagacccaacccttagatttcataagtacccattcccatagccagtaatgtcctcactcctctgtggcttggctgtacttgccatttcttaccacttacctatgaggtaatgcttgttatcttccatctaataaaaatctgctgcagatgtgtatannnnnnnnnnnnnnnnnnnnnnnnnnnnnnnnnnnnnnnnnnnnnnnnnnnnnnnnnnnnnnnnnaaaaggcgggccgcctctaaagtactcctcgaggggccccaagtttacccgaacccagtttttttggacaaaggggcccccataggggggcgcattataaactagggcccggccccctcttttaacaaccccggggcttggaaaaatgtttttt

SEQ ID NO: 354797 - DNA, 1470 bp, Homo Sapiens
  misc_feature (5)..(6): n is a, c, g, or t
  misc_feature (94)..(95): n is a, c, g, or t
  misc_feature (99)..(100): n is a, c, g, or t
  misc_feature (116)..(116): n is a, c, g, or t
  misc_feature (142)..(142): n is a, c, g, or t
  misc_feature (144)..(145): n is a, c, g, or t
  misc_feature (157)..(157): n is a, c, g, or t
  misc_feature (198)..(198): n is a, c, g, or t
  misc_feature (208)..(208): n is a, c, g, or t
  misc_feature (242)..(242): n is a, c, g, or t
  misc_feature (281)..(281): n is a, c, g, or t
  misc_feature (283)..(283): n is a, c, g, or t
  misc_feature (302)..(304): n is a, c, g, or t
  misc_feature (308)..(308): n is a, c, g, or t
  misc_feature (321)..(321): n is a, c, g, or t
  misc_feature (478)..(478): n is a, c, g, or t
  misc_feature (1195)..(1267): n is a, c, g, or t
  misc_feature (1396)..(1396): n is a, c, g, or t
tttanntctttgtaaacaagaacatcaaaaagagttcatattatgtatggaacattaaacagctgtgagtcatatctttgaagagttctgtggnnttannatgtatgtatgtgganagaagaatggctgtttgggtgtttcnanncaatatttaganattgcccctttactaggaactagtggagaacttaaggttantaaagaaaantcatgtagaggacctcaagggtgccttaaacatnatccacactttcatccctgtcctctctacctgaacagtnanagggtccgcagaaaaccannnttgntccactgaatgcntcttgctttctccccttcctcaaaagataaaaatctctggcagaagaaatagttacctgctgccatcaataagtaatgcaattaccatgactctaagtgaacttcttgcccaatgtttaatgcacaatggaccgtgcccagggagacctgggcattntctgttgctttgttctacaatgatcccttctgttctagcagcgtgagctcactgatggtcatactctctgaggactgtacgcattttcaccctatatccacctgtaccagaaaacatggacataatttaaagtttatttctacttaatagagtgatattccaacctgtgtgggaaataaccatttgtcactctttaaagaatggtatttaacatttattataatgtaagtagtagcattttagagtcagttagtgacagactttgtgctaatcactttacaagcattgattcattctgtccatggaaactctatcccttttgctcatgtccccatttgacagctaaggaaactaaagcttagagaggttaagtaatttgcctaaagccgtgcaggtcttaagcagaagagcttgaaggagacaaactcagatctgtacaatcctgaactcttataagccacactttccttctatgacaagttacttcattcggtaaatactgttgaaagactattatatctaagccttcttttagatatctctcacatttgtctactcgtatctaccataaacacctcctttagaagctaccttaatttcttgcctatactaccatagtagtctccttttcttgctgcgtgcctgatcttcataacaagaaatgataaagtcttctgattgcttttaaagcctctctgttcttatctaacctccacnnnnnnnnnnnnnnnnnnnnnnnnnnnnnnnnnnnnnnnnnnnnnnnnnnnnnnnnnnnnnnnnnnnnnnnnnggatgaaaagatggagggtggatgaatacaaataagtaatgcacagttcttgcccctaaggggtcaccagacagaaggaaagaagaagactacacacttatccctatacataagctagaacctgaagtncttatgataaactgtattgaaaatgtctctgtgtgaattacactgtacccttgtatctctgccctacagacctg

SEQ ID NO: 354798 - DNA, 730 bp, Homo Sapiens
  misc_feature (76)..(76): n is a, c, g, or t
cccaaggctgtagttcagcatcaacagggcagggagcttggcagggcaagggcagagctggagatcatgcccagtnttccaggtgccctccctcccaatcagcctggggggcacaggacagggatggagaaggggctctctccatggcttgggtaacatgccaaaggcaggtcatagggcagactcagtgggggtgggggcctggctaacaagcaacggagagaacgggggccatccagagaggtgggcagaagagagcccctgggtcaagagaaaactgtggggaagacaagacacgggagaaggagcagggccacatggtaggagagtttgggggagaagctgccagggggtaacaaccgggtgccaagaggtttgggggccagggcccaggaggaccccaggtctgcatgaggggcctggaaggctcagtccagcttggcgaagcccccaatggtgactttcctctcaggcttagtgcccactggctcctggagctgtactgcgccacccccgatgaagcaaaaggcagggcacacaggccctgagcagtccagggggcactccaagagcccacggaaggaaacagcatccaggaaggaaacccggccccgctcatagtccaggcagatgcccaggcggggtggcaggggcactgtgcagccggctgtggggccatccctccctgtcagccctgcgtttgagcttgcccccctcgtccaagctggcg

SEQ ID NO: 354799 - DNA, 804 bp, Homo Sapiens
  misc_feature (50)..(50): n is a, c, g, or t
  misc_feature (103)..(103): n is a, c, g, or t
  misc_feature (148)..(148): n is a, c, g, or t
  misc_feature (250)..(250): n is a, c, g, or t
  misc_feature (418)..(464): n is a, c, g, or t
agtcccattataagcaaatacaacttggggacagtctgagacagcgtttnctgaattttttctgaccacaacccataatgagcaatacatgttataatgtganccagtatgtgaacacatgcacactcacccaaaaaagtctgacacnacaatatttaccctttttgcatccaattcactttacaatttttcattatttttctatcctattccatttacattttgaagaaagctggtgagtagtcagctnaaatggctccacaacctactctgcaaaggagttgcaatctgcacttggaaaaacactggtctatggacagggctctggtcagtgttctcaataacagtttggagactttaagcagtaacacgacagcttttaaaaacaaaacaagggctgggcgcaatggtacgttcnnnnnnnnnnnnnnnnnnnnnnnnnnnnnnnnnnnnnnnnnnnnnnncttggagctggagaccgagctggggcaacatagtgaaaccttgtcttaagaggaaaagatattacaaaatcaggtacacaaaatgaaattctcatccaaaataaaccattctatatccttccttgaaaaaccacaccaacgctggactttgtagcacaaagacttgtaaggaggtcggggctagactagatccagatatgcctaatattcaactaggccaaaagaactgccccctcgcccgccaatgaaatgaaatgcctccaaagtgatcctctggctatgtacatcctgtagcatgcaggtgggtaatgaagagagtggaacaaccagccgatttctc

SEQ ID NO: 354800 - DNA, 1604 bp, Homo Sapiens
  misc_feature (113)..(113): n is a, c, g, or t
  misc_feature (599)..(611): n is a, c, g, or t
  misc_feature (1242)..(1242): n is a, c, g, or t
  misc_feature (1518)..(1530): n is a, c, g, or t
  misc_feature (1542)..(1551): n is a, c, g, or t
gcccttggcacctagaagcagccaggagggaagtactgaccatttaaaagtggcagatctccgggccccatttctgcagccttcattctgcaactccagggagggtatttttnatttgtgggttcaaaaaatctgtatatacagtctatgtgtttagaatttgtgttgtaagtaaactacagctttgagttggaaagaagtcacgggttgtaaaaccatttggatttttttaaaacaaaagtattaataatctggaagacagtgttgcccaggtcaggagtgttttcttggtggttccagcccccatcaattgaactgtttctgggctcagtcagacacagacattcatctgtgtctgaccaaatcaggggacttccccacctgtggtgaagagcacagcttagatgttttgtacacctggtcttttctagaaatccctgcttggagctgcagaagggttgccttctgtaggtcggaggaatggaggcttactaaccaggtaagccttctatgcatccacaccaaaatcctgcagaatgtaagtaagctctgctttataagatggggttcaccttcatcgcagacttgaaagtttcagnnnnnnnnnnnnncagaaagcacgaaaaattatttataatagtctggagaaaaaacacactgtaatatttcaagtgtatgcagtagaatgtactgtaactgagccctttcccacatgtctaggctccaatgtctcctgtaggtccacctaactgtgtgttttcagggacaatgccatccatgtttgtgctgtagacttgctgctgctgaatcctttctggggactttctcatcgggcagggagcagagggcttctcgttcatgcaccctttgcctgaacacccatgtagctgctgtgttgtgtatatattactcttaagaggagtgtgtgtgtctgtgtttgttttaaaagtcacttatttcttacagtgatttcaattgcaccatgacttcttcactaaaaccacaaagtcctgcttaaaactatggaaaacctaacctgattagagccttgactattttgaagattaaatgcacactttttatataatgtgaccagtttaaatgtagtttgtattgtactgggggacctttcgttgttgttggttgcttaaactgggattttttttcccctccctaatttcaggggtgagattgactttgggaagacaggatagttctttgtcaggccaacaagtgatgaantgcgggaaaacaaaacttgggcaccccaatatatcaaactatttccgtgcccggggatgttttcattgcccaacgaggggggtaatgaattgccttctgcaccctgggtctaagggttgggttggggggggtttttggtttggaaaataaacctccactgcctcccctgaaagggcaccggccaaccccagggcttctaaaagggcccgccgaaggatggggccccctcgggaagttttcacttccacaatcccttgaagggaccttcccataatnnnnnnnnnnnnnctttaaaaaggnnnnnnnnnncccccgtgaaattttattttcccttttcacccccccggggggtttctctctat

SEQ ID NO: 354801 - DNA, 1825 bp, Homo Sapiens
  misc_feature (3)..(3): n is a, c, g, or t
  misc_feature (68)..(82): n is a, c, g, or t
  misc_feature (88)..(88): n is a, c, g, or t
  misc_feature (90)..(90): n is a, c, g, or t
  misc_feature (94)..(94): n is a, c, g, or t
  misc_feature (97)..(97): n is a, c, g, or t
  misc_feature (140)..(140): n is a, c, g, or t
  misc_feature (158)..(158): n is a, c, g, or t
  misc_feature (178)..(179): n is a, c, g, or t
  misc_feature (196)..(197): n is a, c, g, or t
  misc_feature (209)..(209): n is a, c, g, or t
  misc_feature (224)..(224): n is a, c, g, or t
canattctaaacacatagacgtgtatatacagattttgttgaacccacaaataaaaaataccctccannnnnnnnnnnnnnngacgantnggtngangcctcgtcattgtctaagtcacaccagctgggcttgccttggngacctgcccctggcgtcngttctgttcgcgtgttctcnngggcgcgcgtgggtggnncctagctcgtcntctgtggtgggtgtnagcatccctttgtcgatcagatgagaccgcggcgtgttgaagatgtggagctgctgatctggccgtaaagtcaggaactgctgaatcagtttgcttgggttagggcctctgataaaactggcgatgtatacattgacaaaggtggccatcagatactggcagtcaaagcgatccatgatgcctccatggccaggaatggtattggcaaagtctttgattttaaaggctcgtttgaatccacttgcgaagaatcctccaaaggggccaatgagcgaggcaaaggtggagagagcgatgctgtgaatctggaaggggtacatccggaccgttttcccctgtgagtggcacatacccagccaatgactgactggatcaccccaggaatgttgttctcctgcaggcgaaacaggtccgagggctcacagtccacagtgaagctgttggtgtcatggttgtactccacagggcagacaaagcatctgtacccggacatcacataggacagcagaaggccaaacaccacagtagcaaagaagcccccaatgaagccttcccaggtcttcttcggggacagcttgatgagtggggtccgaccaaagaaaaagccaaacatataggccatgatgtcattacagatcacacaagatatggggacaatgaaccagatcattccttcaaatagcttgtggataacaagatgtgactgtgttacaacaatcagcaatgtcacatgggtccagccaaacatgtagaactgcagtcgataatgcttcttgaccagactcagtacaaacatgcagaatcctattagatagagagtaaaggaaatgaaccggtggtatttactgagaatccgcaaaggctcttctctctggaccagggtgaagaagtaatccgtcactgtctcaccatagaagaaatagtttacacacaggagaaagtaccagctgagcgtcctgaaccagggcagatcatatgagtggtagacgttgtagccaatagtgattatctcatggaaacacttaatctgaacgcacatcacgattatcatcaaaaccattggtcccaggtaaatgatgatgaagaaaaatgcaatcatggccaaagtcaggatgcctctcacccaccagttcttccatcttgaagacaagttggaaagggccctattgaggacctccggggtatcatctgcagagactggcaggggtgcggattctgcccggctctcactgtccgatgcagtctctccatctacctttgcttctgactctgactccttgtcctcgggtggcgcaaccggctcatgggccaccctctgcctcagctctgtcatcctgggaaaatcggcccgacgtcgccgcgagctagcagcgaagccgccggagcaggcagctcggcgcgggcacgcgcggactcccacggccggccccgccccgcccgggaggcgcgcggctctgagcggctcacagttcccttagcagcccagcagccagccctggagctcggccccacccagtgccgtcaccgccctttcacccgggccgagcggggtcagccttccctagccccgacccgagagctccctctcccgggagcagggc

SEQ ID NO: 354802 - DNA, 1957 bp, Homo Sapiens
  misc_feature (158)..(158): n is a, c, g, or t
  misc_feature (1483)..(1499): n is a, c, g, or t
gccgagctccagggctggctgctgggctgctaagggaactgtgagccgctcagagccgcgcgcctcccgggcggggcggggccggccgtgggagtccgcgcgtgcccgcgccgagctgcctgctccggcggcttcgctgctagctcgcggcgacgtcnggccgattttcccaggatgacagagctgaggcagagggtggcccatgagccggttgcgccacccgaggacaagatggaagaactggtgggtgagaggcatcctgactttggccatgattgcatttttcttcatcatcatttacctgggaccaatggttttgatgataatcgtgatgtgcgttcagattaagtgtttccatgagataatcactattggctacaacgtctaccactcatatgatctgccctggttcaggacgctcagctggtactttctcctgtgtgtaaactatttcttctatggtgagacagtgacggattacttcttcaccctggtccagagagaagagcctttgcggattctcagtaaataccaccggttcatttcctttactctctatctaataggattctgcatgtttgtactgagtctggtcaagaagcattatcgactgcagttctacatgtttggctggacccatgtgacattgctgattgttgtaacacagtcacatcttgttatccacaacctatttgaaggaatgatctggttcattgtccccatatcttgtgtgatctgtaatgacatcatggcctatatgtttggctttttctttggtcggaccccactcatcaagctgtccccgaagaagacctgggaaggcttcattgggggcttctttgctactgtggtgtttggccttctgctgtcctatgtgatgtccgggtacagatgctttgtctgccctgtggagtacaacaatgacaccaacagcttcactgtggactgtgagccctcggacctgtttcgcctgcaggagtacaacattcctggggtgatccagtcagtcattggctggaaaacggtccggatgtaccccttccagattcacagcatcgctctctccacctttgcctcgctcattggcccctttggaggattcttcgcaagtggattcaaacgagcctttaaaatcaaagactttgccaataccattcctggccatggaggcatcatggatcgctttgactgccagtatctgatggccacctttgtcaatgtatacatcgccagttttatcagaggccctaacccaagcaaactgattcagcagttcctgactttacggccagatcagcagctccacatcttcaacacgctgcggtctcatctgatcgacaaagggatgctgacatccaccacagaggacgagtaggggccacccagggccaggagaacaggaacagaactgagcaggggcaggtctccaaggcaagcccagctggtgtgacttagacaatgacgaggcttcaactcactgtcnnnnnnnnnnnnnnnnnggaaggtattttttatttgtggggttcaaaaaatctgtatatacagtctatgtgtttaaaaatttgggttgtaagtaaactacagcctttgagttggaaagaaagcccggggttgtaaaaaccatttggaattttttttaaaaccaaaggaattaataaatctgggaaaaacgtggttgccccagggcccaggaaggggttttcctttggggggttccaccccccccaatcaattggaaactggtttccggggccttttctcaaaacaccgaacatttaatcttgtggtcttgaacataaaccacaggggtccttccccctccctcgtcgggggggacgaggtccaaatctattaatgattttaggaccaccccggtgcccttttcacaaaatcaccccagctttccagaccccgtagaaaaggcgctacgcctctttcataaccgtcgcaaatatat

SEQ ID NO: 354803 - DNA, 1062 bp, Homo Sapiens
  misc_feature (7)..(7): n is a, c, g, or t
  misc_feature (31)..(31): n is a, c, g, or t
  misc_feature (57)..(57): n is a, c, g, or t
  misc_feature (87)..(87): n is a, c, g, or t
  misc_feature (89)..(89): n is a, c, g, or t
  misc_feature (107)..(107): n is a, c, g, or t
  misc_feature (146)..(146): n is a, c, g, or t
  misc_feature (762)..(762): n is a, c, g, or t
  misc_feature (811)..(812): n is a, c, g, or t
  misc_feature (919)..(935): n is a, c, g, or t
  misc_feature (1052)..(1053): n is a, c, g, or t
aggatcngcatgttgtactgagtctgtcaanaagcatatcgactgcagtctacatgnttggctggacccatgtgacattgctgattntntaacacagtcacatcttntatccacaacctatttgaaggaatgatctggttcattgnccccatatcttgtgtgatctgtaatgacatcatggcctatatgtttggctttttctttggtcggaccccactcatcaagctgtccccgaagaagacctgggaaggcttcattgggggcttctttgctactgtggtgtttggccttctgctgtcctatgtgatgtccgggtacagatgctttgtctgccctgtggagtacaacaatgacaccaacagcttcactgtggactgtgagccctcgaacctgtttcgcctgcaggagtacaacattcctggggtgatccagtcagtcattggctggaaaacggtccggatgtaccccttccagattcacagcatcgctctctccacctttgcctcgctcattggcccctttggaggattcttcgcaagtggattcaaacgagcctttaaaatcaaagactttgccaataccattcctggccatggaggcatcatggatcgctttgactgccagtatctgatggccacctttgtcaatgtatacatcgccagttttatcagaggccctaacccaagcaaactgattcagcagttcctgacttaacggccaaaccagcaccccacacatccccaaccaccctgcaatttcaanctgatcgacaaagggatgctgacatccaccacagaggacgagtaggggnnccaccacaaagccaggagaacaaggaacagaactgagcaggggcaggtctccaaggcaagcccagctggtgtgacttagacaatgacgaggcttcaactcactgtcnnnnnnnnnnnnnnnnnggagggtattttttatttgtgggttcaaaaaatctgtatatacagtctatgtgtttagaatttgtgttgtaagtaaactacagctttgagttggaaagaagtcacgggctgtaaccnntttgatttt

SEQ ID NO: 354804 - DNA, 900 bp, Homo Sapiens; identical to SEQ ID NO: 6120

SEQ ID NO: 354805 - DNA, 1241 bp, Homo Sapiens
gggtccggaattcccgggatttgacagcgggtgccagcaggtccaggcctactgacgggcggaagtcggcccggtgccccctcacacgcccacacgccgggcgtgcctcagtttcctctattgtgacagaatagagatgagacgatgcaggttaaaattacctaccggcgcataatgagttctccagcatctagctagttctaccataggattaatacccaaaaccacgtgggtggagctgaaaaacacgatgctgtggggggaagaacccaaaaagccatagtcggtctgatgtccatttataggacattctagaagaagcaacagtggcgatgcaaagcagttgcctgggaaaggagtggaacaggacagaatggaatgcacaggagcgggggaactttggggcagtggtgggacaatttcatatcttaataggagcggcggcaacatgacgtatacagtcgccccaaatcatcaaactgtagtttctaaatgggtacggtttattaacattcaaattataagaaaagtcatttcctcaaaagtttcggggttgggggaagagttaaagaaggtcgtggctaggtggttgttgaggaataagggagaaaatcacagtttacaaaatctgagagctgaatccgtgctgtttctcgattgagaagcagtggacatcagcagtaggaatggctcaagtccaagaaggctatgccctaccagacccggttgatgtgcttccccggatttactctgtcccaccgtccacctccaccccggcctgcacctctcgcttagggtagaggcctggcctccagtgccatctcccgacagcctcccccaggtgaaggtcatgcttcagcactgcctccctgacagaggctctgatgatgggatgctctgactcagactcaggtgagaaatttgaaggaacagaatgctcttgcctagcagttgccgggaggggtcaggtgctgcccccagagaagtgggagagttagaggtccgtgaggcatactttccccaaagggggcagaaagcatgaagtggtcagcatagaaactcgtctccctgccatccacacagtcccaaggcatgctggttctacatggcttgtctggaagctgtccttgaatgtaaagttgttttcagctcaataatgtatttgcctgccttcgcctttcctttcacccttaccaccttggaattgtaccgcctaataaaatcttcgcacttaaaaaaaa

SEQ ID NO: 354806 - DNA, 426 bp, Homo Sapiens
tagccggctccattgggtggacgacgatttgcacgtcaggaccctattttgcttcttctccaaaacactgtctatatcttgttaatgcttgttttgaattatctccatattgttggaggcaattcacagagaacacagttaagatggcagtcagatacataaatgaaatgccaccctttccttctgctttggactgccctgagaattcttgaacttcctcctgtcctaccttcccttatcaacaatcatgtggtcccatgatcagtggcatgaacattttaaagtttttcaaaatttactattttcctacgagacactgaactccctgaaaataggaagtctcaattaaaaaatcaatttgtcatggtccacataaagataatcaatacattttgctctcagtccttcgtccaaccaaatggtagc

SEQ ID NO: 354807 - DNA, 381 bp, Homo Sapiens
aatagagacaaggtcttgctatgttgcccaagcttgtctcaaactcctggtctcaagcaatccttctgccctggccctcccaaagttctgggtattacaggtgtgagccagcactcctggcccatcacagtcttaaaaccaaaagttctgtgtccgaggaaaaccaggagtgattggtcactctatttatgactcatagcacttacaggctacttcggcagggacttggggtacccctgttcttggatggcacatcattatcagcaacaggaacagtttctctgagccctggcccctggagaatctctagcttagctattttagacttggggtcaaagaagagaagcctcttgcccaaatcagcaacaccagacaggggct

SEQ ID NO: 354808 - DNA, 1405 bp, Homo Sapiens
  misc_feature (1041)..(1096): n is a, c, g, or t
  misc_feature (1111)..(1168): n is a, c, g, or t
aggctggtaccggtccggaattcccgggatgtgggaaggtactcccccggtcctccgggtcatctttgctccccaggagcggcatatttcgcatctgcctgaggtgtgcccgagggtcgttgggagagtgacgggatgaatccctgcagagagcccggactgggagggaaggtgtcggggagacgtcgtttcctggcgacgtggtcccggcaggcgacttagacctgagccgaatctgttgaccccaaattgtgcttttcccaccaagaagaaaagggagagaaacagtacaagttcggcagtaaaatatagtagacaagcaaatataacctctgaaatcacacagctattcagtttcaaagcgttcctagtgcccagctctcctaactcccggccagtgttccttgacatatggtgatatataaagactttgtttccgctcgtgtgtgtgtctgtgggaagcctttgactcacttctgtgctccagtagcaccctctgcagccttgcaatgtagctcttattgcatggcacggaagatactagtttggatttcctctgtcaatcagaccatagctatatccattttctggcacagtggctagcacatcatagacagacacaaacgtttattaaacggaatgaatacaggaccttaactgaatgaaatggcaccctgccccgctttttctcaatcaagctgtcagattttatgcagcccgatattccaaaaaaactcacagattcagtgactaccaatttattggccacagattcccaggtacctcagaaatcactggaagggtctctgtaagtccatggggcctccaggcatcatctagaaccagtcatatctcacacatacagatattgctatttttcaattgtatgtagatgagctgtaatttagaagttttagagtcaacaggtactaaaagtaatactgcgatcctattggaagttcataaaaacgttttaaattttttattgaaatttaagttctggtttaagttaggaaaccacttcgttagtccagtcgatgnnnnnnnnnnnnnnnnnnnnnnnnnnnnnnnnnnnnnnnnnnnnnnnnnnnnnnnnaaattaattaagaannnnnnnnnnnnnnnnnnnnnnnnnnnnnnnnnnnnnnnnnnnnnnnnnnnnnnnnnnaatggctgaaaagtacagatatagaatatttccatccttgcagaaataggtactggtgatgttgacacttgagacgagtaaaaagtaacttaaccatagaatgtaaccttagcagaggtaactcatctaatttatagcataacagagagaaatgaaattggggatggttaagcagtttctacccttgttcagtgaacaaatacatcatgtctttataaagaaataaattgaatttta

SEQ ID NO: 354809 - DNA, 1491 bp, Homo Sapiens
  misc_feature (44)..(80): n is a, c, g, or t
  misc_feature (972)..(1010): n is a, c, g, or t
  misc_feature (1058)..(1132): n is a, c, g, or t
tatcgactcactatagggcgcctggagttcacgcggggcggcgnnnnnnnnnnnnnnnnnnnnnnnnnnnnnnnnnnnnnatcaggccaaatcggccgagctcgaattcgtcgagagcggagaggtttctgggagccaagagtggtaatggcgtctgtatgatcttcggagcctgctgcatcggacctcggccagtcataaaagatgacaacagcagccaggccaacctttgaacctgccagaggtggaaggggaaaaggagaaggtgatttgagccaactttcaaagcagtattcaagcagagacctaccctctcatacaaagataaaatacagacagactactcaggatgcccctgaagaggttcgtaaccgtgacttcaggagagagttggaagaaagagagagagctgctgcaagagagaaaaatagggatcgtccaacccgagaacatacaacctcctcttcagtgtcaaaaaagccacggttagaccagattcctgccgccaaccttgatgcagatgaccctctaacagatgaggaagatgaagattttgaagaagaaagtgatgatgatgatactgcagctcttcttgcagaactggaaaaaattaaaaaagaaagagctgaagagcaggccaggaaggaacaagaacaaaaagctgaagaagagaggattcgtatggaaaacattctgagcggaaaccctctccttaatctcactggcccatcccagcctcaggccaacttcaaagttaaaagaaggtgggatgatgacgttgtcttcaagaactgtgcaaaaggtgtagatgaccagaagaaagacaaaagatttgtaaatgacacactgcgatctgaatttcacaaaaagttcatggagaaatatattaaatagtacagttttatgtgcttaattaaagactgtaaaacgtaaaggatcacacacaacacaaaaaaaaccaccctcgaggcnnnnnnnnnnnnnnnnnnnnnnnnnnnnnnnnnnnnnnncatggtcatagctgtttcctgacccaccttttcttgtacaaaggggtnnnnnnnnnnnnnnnnnnnnnnnnnnnnnnnnnnnnnnnnnnnnnnnnnnnnnnnnnnnnnnnnnnnnnnnnnnntgcagtacccgggaatttaacccgcctaaggagggggcttttttttggggaccaaagggtcttcttgaagatcctttttttctggaagtaaactgctgcttgcaaacaaaaaacccccgccacccgccggcgctctgtttgcccggatccaaaactaccaactctttttcccgaagggaacttggcttccccccaacgccaaaaaaccaaaaactggttcctctaatggaacccggaagctaagccaccccttccaaaaacttcggaagcctccggctaacaacccccgcttcggataaaccctggttaaccatggcgcggctcgccactggcgaataaccccctggtcttaaccgggg

SEQ ID NO: 354810 - DNA, 897 bp, Homo Sapiens
  misc_feature (885)..(885): n is a, c, g, or t
attggcaaccataatttgtagttcagaatggtcatccatccatcgttgcatcattcaaagtgatgtggcttaagtgtatataatgattattaatagttcatcttcgactttgcctgtggattaattggtgtgctttgtaacaagatagtgctagtttaattttttaacattgtgaatattgtgaccatgttttctaagaggtcagataatgagaatggttataataccaatgcaaccatgaccccatcactgaagaagaaggctaaacgactatgtaattttggatgatggatggaaggacacatactactgaactaggaaggtaaataaccaaaacagagcatactacataatatacagaaaaaaatttgagattggacatggtggagaaggggatgtgcaagcacatatggagggcaaatctcacaagtaagatgggacaggtgaatgcttctaaaccaatcaaaaatacctttgtttccccaaaagacaccaatgctcagtcaaaaatagcagctgctgaattagcatgggcataccaggcaaataagcctgcattgtcatagcgttcccttgattgctctatgaaactgagtaaagtttcatttcctgattcaagaattgcagctaaaatatcctctggacaaagaagaagggaaattttttgataacagatgtgttggctccttacagtataaagccaatttctgtcatatctcaccaacaatcctggtttctacagtacatcaattttaagtaatatgccaaatcatggcagcaaaaatatgttccctctagctgttaggtactttgacttggaaaacagggagtttccaaatccatcttctttcattttctgtggaggggtttttaatggaaactgcnggaaattcataa

SEQ ID NO: 354811 - DNA, 1598 bp, Homo Sapiens
  misc_feature (42)..(42): n is a, c, g, or t
  misc_feature (1277)..(1285): n is a, c, g, or t
agctcagattcatgtcttgagccaaacaagtgaatgtatctnagaagactcagtaccacatggtactgggagatcttactcacttcagctggcgttgctcattagtgaatgtatgacagcaggatgtgaggggatgcccaggagtcagtgttagcattgtcatctgagatcactgctattaatatcatccattaatttattagtgagcttcactatatgcagactgggagataaggagaaaatctgtcacattctctctagctaatcagatcagctaccaattaatgagattctgaatgaaatatcaatatgtgtttttctaatttggacctaggacagagctgttgcttgtcatagagaaaaacaataatgcttaaacatagcacattataattaaagcaggtttctcacatacttttcattttatcctttggataattttgtgaggaacgcaggacaccaacttccctttcatagatacaatccccatgctattgatgaaagtgtttttgaatgaagtcatacaacaaataactgatcaaagtgggcattacaccaaaatttcttaggtaggactcctgcatagaaatgtttagatagacgtggaaagttgttaagaggaacagcaagagagaaactggttctttggaagtctttcgtgctacattatacctccatcagagtaagacagcttaggcactcctaagaggaaaggtctgtggagatgacatgaatccgaattctacacttccaaatcaaataggtaaaagggtggcatacatcacagaaaaacatttcagctgcagtcaccaacttgaaaagcgagtgagtaggagtttgtcacactgccatgtaccagactggaaatgcatttcctaccaattacacatttggtgtgggggaatggtgatgtcattttttgacaggattttattttgtgtgcatgcattctgctccaagtgtcacaattctggttacaataattataatatttggaagtactactaagactttcctgaaagaggtgtattgtaccaaattttgtaacataaaaaaatactaaatgatcttaaagcttcctaaattgtgaaaagggtatgtgctaacatctcagaactttagacctgcttgttgtcatctttaccgatctctgatgataaatgcagaagggatctgagagtttttaaagcaagtagagtcaatcagagttttgaacatcatagtaatacttccgtgattcagagttagatcatataaatcaaagtaacaatttggannnnnnnnnaaacaacaatatccataactgtcataaaacagatggtccaaccccaggagcagataataacttgggcagctctgtggggaacaagacggggaaaacaactgttctaactgcccactagaacagtggtttcaactactacaattctcagtgtttgagaggtacaagggaagaaaggactatgtggatcccttgtggctatgcagatacctacctcacagagttgttgtagaagactggtggtttggttcaaaccttgtgattaaagagtttgtcaagcattttattcttttgaataaaagcaacatatctaaaa

SEQ ID NO: 354812 - DNA, 411 bp, Homo Sapiens
gctcggacccactttccgagtagatttagatgcatggaaaaggcaaaagatatatagccaatgctttgtcttccaaagagatctttagactacaggcaatatctgcagataaagaaaaattacaatatggatgggcctggaaactgcttttttctttctagttctttgtctaggccttcaatatttaaacaaaatgcaaaactgaacgttacctcaaaatgaaacagtgtgtgtactggctgttagaagttgatggcggtctactgtttgatattcactgccatcttcctctgccccactctacctcaactcgggaccgcctcacctaatggtgggctttgccgctttatgccatgtagagaagacactgggtaaccacagcaaatcaacacgagatcctgtactgcctac

SEQ ID NO: 354813 - DNA, 1241 bp, Homo Sapiens
  misc_feature (47)..(47): n is a, c, g, or t
  misc_feature (49)..(49): n is a, c, g, or t
acccttccccactccctggtccccgggagcagctccttctgcccgantnactcacagtgcagggaaaggaggcagggaaaagaccaggattctgtgagttctgaggttcccacacacaaagaagctgtggtttctctgcctcggccactgatgagactaaaactggcttccccttggagacggcagatttcaggctgatccctgcttaagccctctcatccccacgctggtcctggtattgatacaagacccagctggtgacaaagcctccaatcctgggggtccacgagcctgggcctgacattcccagaactaccgccagtggcgccaggcccccacagtctgtggccgtggtcttagcccccagttccactctggatgggcctgtgacaccccaaagagaagaaggggactctggatagggtccccacatccagggcgtggggagaccattggcatttgggaaccattttccttcgaacggcttccccttgagctgagcattctgcttgctgcagtagacgggtcgccttttgcccataccgaaattttctgaaattaaatcgcacacccccaccatttcctctccctgggatctggaggaacatcatacatagtaggtgaatcgttttgtagagtgaagaatgctaatgtaaagcaaatagtcacccacgttccttgtaaatccaaatgtttctatattgtagctttgcttaaaatggggtcggccccaactgcatcctcctctttggcgggctggggagcggcccccagccgggacgggagggcagcgaccccgaggcctcgtggacgtgggagagagtgtggtgggaagtcttgagcggaggaggggatctgcccttctccactcctctcttggatccgcctcggtttcctgtccccccaggcatccgcctgttgcccgcggatggagcgccaggtgtagccatgccccaccttccaggcgccttcgccctggggagtccagcacatgttgttattcggaggtggggccggtgggccagaccgggaactgcatccagttatattgctccgcctaccgcacgtgggccaccaggagcgtccttcaggctcgaattcactaatgccgacgggaggagtcgatgcttcgcgtgggcagggcaggtccttcgtgtcccgcataactcgagaacgccggataccaagagtattgattttacgggaagccaggcttggggtgttttgcccagggggtccca

SEQ ID NO: 354814 - DNA, 1628 bp, Homo Sapiens
gaattttcggatgtgaacttactgtgggattctgagtggggtgcagaggacgaccctgcaaaggcacggactataagagagatctgtgcagctgcgcctcagggggtgtcctgggcccctgggcatgacaggagggggaccacttgcagttctactggaaaatttaccacccttccagaatcctctgaagatatacaggtcgcaactagagtgagacccgagtactgccttgggtcagaatggctagagaaccgagaaaaaacgcagccctggacgcccagtctgcagaagaccagacggggctcctgaccgtgaaggtggagaaggaggaagcctccgccttgacggcggaggtgagagcaccctgcagccctgctcggggccccgaacgctcccgccagcgcttccgaggcttccgctacccggaggctgcaggcccccgcgaggcgctgagtcggctccgagagctctgccgacagtggctgcagcctgagatgcacagcaaggagcagatcctggagctgctggtgctggagcagttcctgaccatcctgccggggaatctgcagagctgggtgcgggagcagcatccagagagcggggaggaggtggtggtgctattggagtatttggagaggcagctggatgagccggcgccgcaggtttcaggtgttgaccaggggcaagaactgctctgttgcaagatggcactattgacaccagccccagggtcacaaagtagccaatttcagctaatgaaggctctgctcaagcatgaatctgtgggatcccagcctttacaagatagagttctccaggtccccgagcttgcccatggaggatgctgcagagaagataaagtggtagcttctaggcttactccagagtcccaggggttgttgaaagtggaagatgtggccctgaccctcacccctgaatggacacagcaggattcatctcaggggaatctctgtagagatgaaaagcaggagaaccatggcagcctggtctccctaggtgatgaaaaacagactaagagcagggacttgcctccagctgaggagcttccagaaaaggagcatgggaagatatcgtgccacctgagagaagacattgcccagattcctacatgtgcagaagctggtgaacaggagggcaggttacaaagaaagcagaaaaatgccatagggagtaggcgacattattgccatgaatgtggaaagagttttgctcaaagttcaggcctgactaaacacaggagaatccacactggtgagaaaccctacgaatgtgaagactgtggcaaagaccttcattgggagctctgcccttgtcattcatcagagagtccacactggtgagaagccatatgagtgtgaagaatgtggtaaggccttcagtcacagctcaaaccttatcaaacaccagagaacccacactggggagaagccctatgagtgtgatgactgtgggaagaccttcagccagagctgcagcctccttgaacatcacaaaattcatactggggagaagccataccagtgcaatatgtgtggcaaagcctttaggcggaattcacactcatatgcttctcaccagtgtggagagagggtaccgagctgagtatt

SEQ ID NO: 354815 - DNA, 455 bp, Homo Sapiens
  misc_feature (128)..(128): n is a, c, g, or t
agcccagccactgccccttggcacatcagcacaaaaggctgaaatcattgctcttacccgagcattaattttgggacaaaataaaaagcttaacatctatacagattctaaatatggcattccttggnggttcacgcttatgctgcaatctagaaagaaaggggactactagctagcaaaaccctcccccataaagcatgggcctgaaattcttcagctattgtaaacaatacacctgccacaggccatagctataatccactgtagggggcatcaaagggacttaactcctatagcacaagggaacagaaaggttgatagagaagccaaagccacatccctcagggtgcaatcccaacagatcctagcactgattcctttctatgattcccagtggatcccaaatacacactacaggaagaacagttaataaaggagcaagtggggcaaaaaaa

SEQ ID NO: 354816 - DNA, 1080 bp, Homo Sapiens
  misc_feature (58)..(58): n is a, c, g, or t
  misc_feature (75)..(75): n is a, c, g, or t
  misc_feature (87)..(87): n is a, c, g, or t
acccccatcaactgtgaatgagttccacaatgggaacaggctcagggcttgcagtttnaggaacagtgaatgganagctggaatgantgtgctgtcggttatcaggatgcaatccttcaagatccatcttctcccaattcgtggcaattccgagctaaaagtgtaaaacctgcgtcagtcaaatgggagcatcgggcagcctccaaaatttgcagtcgcggacagttcaaacccagggctgtaagagaggcatctgtgaggttgctgcaacccgaaaggcagagagcctgtagccggtgacagcccctgcatatctgcaccacaccttcatccgtgatacgtgagcaggactgcaagttgaggctcacaagctcatggcagtaattctgaatgtgtttcagagcttcatcttctaactgtgtgcagcccctcaggagcagggctttcaggcctcgacaacctcgcaccagtgcctcgatgccatccttcgtgatctgatcacaccaagagaggttcaggtactccaggtttcggcagccctcactgatccccttcaaggagctgtttgtaatagacacacaggaggtcagatccagatgtttcagcttggaacagaatctgctaaggctataacacgtgctgtcagtgatttttgtgcatccattgaggttcaaatgttcaatgtttcggcagttctgtgcaaaggtcttcaaggaggaatccccaacaccaatgcagcctcgcaagctgagcttcctcaggaatccaccgcatcgcttcgagatattttccaccactcgaccctctacatctgtttgaaagttaaaaagatctattctttgccagttgcttccatccagggctaagatgttccaagccttggaaatctgtgcacatcggcacaaagttactatatccaagaaggaaaatattcttaacagaagttctttgggtaactttttgttaataaggccttcatcattgtttgagaaaaccatggccgaagagccgcgagcgagcccacagcccgaagtcacacggcgccggcgacgcccgatcccgggaattccggaccggtac

SEQ ID NO: 354817 - DNA, 1073 bp, Homo Sapiens
  misc_feature (6)..(6): n is a, c, g, or t
  misc_feature (8)..(8): n is a, c, g, or t
  misc_feature (11)..(11): n is a, c, g, or t
  misc_feature (16)..(16): n is a, c, g, or t
  misc_feature (29)..(29): n is a, c, g, or t
  misc_feature (33)..(33): n is a, c, g, or t
  misc_feature (39)..(39): n is a, c, g, or t
  misc_feature (42)..(42): n is a, c, g, or t
  misc_feature (49)..(50): n is a, c, g, or t
  misc_feature (57)..(57): n is a, c, g, or t
  misc_feature (71)..(71): n is a, c, g, or t
  misc_feature (74)..(75): n is a, c, g, or t
  misc_feature (77)..(77): n is a, c, g, or t
  misc_feature (82)..(83): n is a, c, g, or t
  misc_feature (102)..(102): n is a, c, g, or t
  misc_feature (116)..(116): n is a, c, g, or t
  misc_feature (129)..(130): n is a, c, g, or t
  misc_feature (139)..(139): n is a, c, g, or t
  misc_feature (141)..(141): n is a, c, g, or t
  misc_feature (339)..(339): n is a, c, g, or t
ggggcncntcntgggnacctggtgtgccngtancttggnggngccctgnnggactgncatggggcgggaanaanntnttgtnngccattgtggaagcctttncccaccaagagcangcgggaccgcacnngaacatgcncntcaatgtcgcccgtttcactcccccgtgtgcaacaaaaaagttcaagatgaagcaccatctgactgagcacatgaagacgcacacaggtctcaagccctacgagtgcggagtctgcgccaagaagttcatgtggcgagacagcttcatgcgccaccgaggacactgtgagcgccggcaccgcctgggcggggtcgggnccgtacctgggcctgggactcccacggggccatccttgccgtccaagagagagtctcccggagtgggcgggggcagcggcgacgaagcgagtgcggccacgcccccgtccagcagacgtgtctggtccccacccagagtccacaaggtggagatgggcttcggtggaggtggaggagcaaactgaaggggcaggctactggggtggggtagctttcgggaaagggaataaggagcacgatgcaagggcgctgtggcccccgggtgatctcccaccacacttactgtcttcctttatctctgtggacttgtatatattctggaaggggaaccacagtttcaccatcacccgcccattctactactcaacccctcccccccaaggtatttccagaactaaacccttcctttccctctgatgggtacactgaagcccctgctccacagagtagattgcacatggagggagggagagggggcgtgttgaacatcctgcagtcacagggtcaggggtcaggtggttgtagtctgtgcctgaagtctgtgtttgtgttgtcgtggagacaaggcctttgagccccacccttgtcctagaacctaccccctctcaaggatgcgctctttatttctaccctgtttctccccgccacccccgacttcccgtggaaattcccaactcggttctcatggaggagtgggtggagacaaggagggagtaagtcgtaggagtacaagg

SEQ ID NO: 354818 - DNA, 347 bp, Homo Sapiens
  misc_feature (54)..(54): n is a, c, g, or t
ctacaatagaaggcaaactatgtccctcctttgctcagaaacttttaatatctncctatttccccatgtaaaagccaatcctcaaccacagtgtagaagggctatccatttctagctacacatctcctcagtcactgcccccagccccagtacttggggactttgcccttgcagttccctgtgccagcaaactcttcctcaagatgtccacatgactcaacccccctccttcaggggtcttctcaaatgtcactttaccagaggtggcttctcctgaccatcctgtataaatagcatcaccctacctcctatctctctctctaatgtctcaggaattcgatatcaag

SEQ ID NO: 354819 - DNA, 678 bp, Homo Sapiens
  misc_feature (30)..(30): n is a, c, g, or t
  misc_feature (61)..(61): n is a, c, g, or t
gtattattacaactaatagctcttgaatcnctttgctaaagggtaaacagcaacacttccnagaggcttctaaaacactactgttttgcagggcaggagtattctggaatccttttacttagatataaaataaacctcgaatattaaaaagttgtagccatctgagagaggaaagtttaagtgactgaaaatgtagaatacttcaacgtgcatgttactacttaaaactagtctttctgctggaatctaaggagtatatatatatatgcccccttgtggttaattattgctcctttaataatttttacttgaaatgatccacaattatttcataactttagcagtgtgttttggaactactgtacttaaaggtttgtttgtttgtttttgccatactgtataatttgggtgaggtctacaaaattgggtgtgacttgcctttgcaaatggatttctcctggggaattttcttggctgttctggaaatgctttcccacagctgggtaactgttctaaatggctttgataatgctcacacatcttggagtttcagaaggaaattattctgcatcacaaatactaaattttatatttctaaattactataagtcatttaatattggtttatggtgcttttatttccttaacttgaaaacatctttctgagatttcaggtcc

SEQ ID NO: 354820 - DNA, 927 bp, Homo Sapiens
gaccccctgctgctctgaggacaccatcccttcccaagtttcagattatgattatgtctctgtaagtggtgaccaggaggcagatcagcaggaagttcgacaagtcctccaccattccaagaaacagcgacatcagccagtcctaccgacggatgttccaagccaagcgtccagcctcaactgctggcctccccaccaccctgggacctgctatggtcactccagggttgcaactatccgacggaccccttccaccaagccttctgtccgccggggaaccattggagctggtcccatccccatcaagacacccgtgatccctgtcaagaccccaaccgtcccagacctcccaggggtgttgccagcccctccagatgggccagaagagcggggggagcacacccctgagtcgccatctgtgggtgagggcccccaaggtgtcaccagcatgccctcctcaatgtggagcggccaagcttccgttaaccctccacttccaggcccgaagcccagtatccctgaggagcacagacaggcaattccagaaagtgaagctgaagaccaggaacgggaacccccaagtgccactgtctccccaggccagattccagagagtgaccctgcagacctgagcccaagggatactccacaaggagaagacatgctgaacgccatccgaaggggcgtgaaactgaagaagaccacgacaaacgatcgctcagcccctcgcttttcttaggttcacaagaaatgcgccggtggggaatgaactgtttcattaataaaacctaatttgtcttgatccattccactctataataaaacaaaagattttgtaggcaactcggaatatagctcttttgaaagtactcgacacctttagataagaattaaaaccaacctatgtaactgacataatcttgatct

SEQ ID NO: 354821 - DNA, 1681 bp, Homo Sapiens
tggtcaattgtcaacaagcaggttgtaaaacgacggcagtactataacggtctaaggtagcgaggcctgggtggcgccctgagcgccaaacccccgcttgcccccaagccgggaaccacagtggcctcagagagtgagctgcgacggagtgcatcaggacaagtgacaggtgggcatggagctgccgcagcaacatcagcatcagcaggacaggctcctgaggacccctcaggccctggcacaggcccctctgggacttgtgaggctccggtagctgtcgtgaccgtgaccccagctccggagcctgctgaaaactctcaagacctgggctccacgtccagcctgggacctggcatctctgggcctcgagggcaggccccggacacgctgagttacttggactccgtgagcctcatgtctgggaccttggagtccttggcggatgatgtgagctccatgggctcagattcagagataaacgggctggccctgcgcaagacggacaagtatggcttccttgggggcagccagtactcgggcagcctagagagctccattcccgtggacgtggctcggcagcgggagctcaaatggctggacatgttcagtaactggggataagtggctgtcaccggcgattccagaaggtgaagctgcgctgccggaaggggatcccctcctctctcagagccaaggcctggcagtacctgtctaatagcaaggaacttctggagcagaacccaggaaagtttgaggagctggaacgggctcctggggaccccaagtggctggatgtgattgagaaggacctgcaccgccagttccctttccacgagatgtttgctgctcgaggggggcatgggcaacaggacctgtaccgaatcctgaaggcctacaccatctaccggcctgacgagggttactgccaggcccaggcccccgtggctgcggtcctgctcatgcacatgcctgcggagcaagccttttggtgcctggtgcagatctgcgacaagtacctcccaggttactacagtgcagggctggaggccattcagctggacggggagatcttttttgcactcctgcgccgggcctccccgctggcgcatcgccacctgcggcggcagcgcattgaccctgtgctctacatgacggagtggttcatgtgcatcttcgcccgcaccctgccctgggcgtcggtgctgcgtgtctgggacatgtttttctgtgaaggcgttaagatcatcttccgggtggccctggtcctgctgcgccacacgctgggctcagtggagaagctgcgctcctgccaaggcatgtatgagaccatggagcagctgcgtaacctgccccagcagtgcatgcagggaagacttcctggtgcatgaggtgaccaatctgccggtgacagaaacactgaattgagcgggagaatgcagccccagctccaaaaaatggcgggaaaacccgggggggagctgcagtatccgcccctcaacggcgactgcatggggtcccgggcccatcccacaaggagcgcccggcggcaaacaggccaacccctgggccccctcctccagacttccttaagccttccctggccctcaaaaaacccaaggctccccgggggcaacttggaagggggctcctttcccctgcccgcccccctatttcccctaaa

SEQ ID NO: 354822 - DNA, 932 bp, Homo Sapiens
gctgggtggcgaattcggcacgagggatctgcgacaagtacctcccaggttactacagtgcagggctggaggccattcagctggacggggagatcttttttgcactcctgcgccgggcctccccgctggcgcatcgccacctgcggcggcagcgcattgaccctgtgctctacatgacggagtggttcatgtgcatcttcgcccgcaccctgccctgggcgtcggtgctgcgtgtctgggacatgtttttctgtgaaggcgttaagatcatcttccgggtggccctggtcctgctgcgccacacgctgggctcagtggagaagctgcgctcctgccaaggcatgtatgagaccatggagcagctgcgtaacctgccccagcagtgcatgcaggaagacttcctggtgcatgaggtgaccaatctgccggtgacagaagcactgattgagcgggagaatgcagcccagctcaagaagtggcgggaaacgcggggggagctgcagtatcggccctcacggcgactgcatgggtcccgggccatccacgaggagcgccggcggcaacagccacccctgggcccctcctccagcctcctcagcctccctggcctcaagagccgaagctcccgggcagctggcaggggccccgtcccccgccgccccccgtccgcagagccagtgctgggccctgccccagggcctgctggtcacctgctgagcggactgcatccatcccttccctcacccactgggcaatacaccccccttggttccagccaggagacccggaagcaggagaagggagcgccgaaaacaggagaaggagcgggagaaaccaggaaaagggaccgggaaaaggagcggccacagcccaggagaaagagccgagaggaacaggaaaagggaaccgagaaaaacaggaaaaaggagcgg

SEQ ID NO: 354823 - DNA, 1013 bp, Homo Sapiens
  misc_feature (68)..(68): n is a, c, g, or t
  misc_feature (158)..(158): n is a, c, g, or t
  misc_feature (200)..(200): n is a, c, g, or t
  misc_feature (208)..(208): n is a, c, g, or t
  misc_feature (353)..(353): n is a, c, g, or t
cccaggctgaggagtgcagaatagaaggatccccaggaggaaacaatacccactaatggaaggttatnatttatatatatgtcacacaccttctcatagaaatccaaaataaagtgcagcaagaaagtattgttgctctccaagcgcattgcagtagntggatagccaccctaccataggtgaatcagtttagacacagnagttcatnggatccacccaaaagttgtctctagaggactgtttgtaacaggtttcatgtgaatgtccatagaaagccacaacagccaattctgcaatagctctttcagactctgaagaacactacacttgaaataaatggttgatgtaaaganagagctgcgctagatggtcaaaaagaagtggtttcacctcagagaagctactaaaaggaatccagctcacaagctgaaggaactgtgaccgacaacaaaggccatcccagagaggaaggctcttatacaggaatgcttcacaggaataaaacccctcttgtaagaagcactctgccctgatgatggtatccaggaagttggtaaattcttttccatgttcataattattcaccttgtaccaaatacattcttcttgtaatgtttgactcaaccagtaataaaacctcagcaagactggctcatctctgacacagttaatgtagtgaagcagcagagagttgtttagcactgagcccatctgagaaggcagctctaagcaatggatgttctgtaaaagttgggggaagctttgaagttgttctagtggaaatgatccacttctattcagacaatcagaaagactcatctctttttttccacattctttagtgtagctactggaattgagcactggtataactgagagagaattccactttctttttagaggacgaacattagctggacctaacatcaacttcagaggttctggagaaggtccccggtttctttgcttcacggcaagcagagccgtcttccatagattctctgaattcttaa

SEQ ID NO: 354824 - DNA, 388 bp, Homo Sapiens
  misc_feature (310)..(310): n is a, c, g, or t
aatattagaaaccctggttttgctagatgggaagcttgaacgtggggccaagacatacaagagtagagcagcaggacatttcaaaagaagattaatctcaaagattagagatggaagaacttgcaaagagaaagtctgtaccggaagaaatctggaaatctagaggccagtttaagaatcagcagctaaacaaggagaataatctagggcaagagatagctacctgcacaaaaattcctaccagaaaaagagacatagaatctaatgaatttgtgaaaaattttactgtaagatcaatacttgttgcagnacagatagatcctatggaagagaattgtcataaatatggtacatgttgaaagatgctcaaacaaaactcagatttaat

SEQ ID NO: 354825 - DNA, 388 bp, Homo Sapiens
  misc_feature (247)..(256): n is a, c, g, or t
  misc_feature (362)..(362): n is a, c, g, or t
agagtttggaaagagggagaggcaaggaaagagagctttaaattgaaaggttaatttcctaagaggaacctgggctgaatgactacagtgttataccctccaatctttgcaggtgggcatggaacactgcttgtatcactctgtgcacggtataaatccatatatccacaaaaacacacatccatccatcaacatatacatggtttgggatgagcaggtcaatagttttgagagggagtttgttccnnnnnnnnnnctcattatactcttaaatggttgtcagttatcaaacaaacaaacagaaaaatggtttggaaaaaccttgcatacgccttttcctatcaagtgctttaaaatatagnctaaatacacacaggcttgaggcaga

SEQ ID NO: 354826 - DNA, 1469 bp, Homo Sapiens
  misc_feature (569)..(580): n is a, c, g, or t
aggaaggtagtgtaaacaaacctaatggaaacctattaataaacaataggatttacataagattcatactgtattgtagaaaaaatctgcattttacaaagatattcagaaaatatcctagataaacacaaatttgtggatataaataattaaaaacattctctgtttgtaccagtccgatgcacactccctctcctttgagaaccagctgcagccgataccgtctctttacatttatttttgacggcctcctttcgaaaactcagccttctgacacgggaccactgaagcgcggggagcatgcatcaagggtccgtggcagtgagaagtccccactcacgctcgctctgtgactaggcttagatgcttctctgtagccccattggttgccaagcgccgaagaacctaggttcgggtaaaaatttcaggtcctccaacgcctcccccaaggataattggggtgattgtagaaaagaataattaataaaaaagaatgtaagttacatccaaagggtcaaactgcatctattgcccagactggattaatttcaagggagaaggggagatcnnnnnnnnnnnnttagctgttgttacagggcttgtgaagaaggggcattatgtctgtttcttattacaataaaggctcctcggtctttactgacccctaaagtcctgaatcacaccagaaagacgagaaggcacttaccacagggggcagcttgagtctccggctagggtcgttgacgcaacaaaggaaaaaagaatttacagggccagggtggatgtaagacagggggtggggaattctactccatggtatcttcagagctaggataatgctccttatgcaatcccactgcatatgaccatggcagtagaacaagttcaattactacactggatgcgttaagtgtgctttcctagcagaaagcaccagggtggagtcaacagttcacatgctaatacttggaagtatttctagaagggggtgctcaatagagggcagacatgatgcaagttcttcatactagaaaggtgtcctgtgtgtgcatgcacagctggatgggggcacacaggagcaagcgcagaatttggttttctccagtcaagtctaccctgatgttatctgtgcactgccacaatattatcttgctgcctttctagaagatgctgtagcagggtaagaaatccaaagttaatgttttggccagctgactgggataagaaccttttgtctgaaaggccctatgacatggcctgaatcgccaatcactaataaggagggactaagtctagccaagaggctcatctagagctgcttccggccaatgtagatttgtctcggccatgtattgagtgatctgcagctgatatcaaagcttctgttaaaaaacaaaacaaaataaattcaatacttttagtttaacagtgtgtagttcaaacaaaaaaggaaaaataaacatatcctg

SEQ ID NO: 354827 - DNA, 480 bp, Homo Sapiens
ttgtcctcctgtgtgcctgagctcctcccttttcaataagattattagtcgtgcatgtctgtgagctgcctttcatcaccatttttcctgagtagggcttagttttattctggaaagacatctccaaggtgaggtccacccccacagcagacctccaagtagaaattgcccaattttttaccagctggagggacacccttgggtttttgtacgaagctatttaatgaagcctgggtcttgggaactcagcaggctggagcttggggcctggtggaccatcacctggtgtctgtaggtggacccggtctcccacaggtgacatcaacctgagggtggcgtctttagagacaggcacatgggcagccctgttcccttcgcctctactgcgaggcctggggagatgttgttttcatgctgcttccaccatcacactggggtttctggatgggaaataaaaaaataaaggcagttcatttcccc

SEQ ID NO: 354828 - DNA, 598 bp, Homo Sapiens
agcggggcttcctctctcacccccacgcagaggagagaacttgcttctggacccgggtgggtgccggctcggctctccttgtcttccagagcggtggcccggaagcacagtcctcccagacgccagcgccagaagctcggatcgcggctgcaccgggagagcgccgatctgggtgcgaggcaggtgcggggccatgaatgggaccgcaaacccgctgctggaccgcgaggaacattgcctgaggctcggggagagcttcgagaagcggccgcgggcctccttccacactattcgtgatgattttaaaccagcatctatagacacttcctgtgaaggagagcttcaagttggcaaaggagatgaagtcacaattacactgccacatatccctagctggagggcagcagtaaaatccaggcccgaatggaacagacagcccactcgtcctccacagacgtcacagcaaagcgacaactccaccacctatgccattcagagctccaacgaagcctccagtaggacccaaaacttctcccttgcaaagataacccctcaacctgaacctcagttggatgacatcaaaagagagctgagggca

SEQ ID NO: 354829 - DNA, 2096 bp, Homo Sapiens
  misc_feature (1839)..(1839): n is a, c, g, or t
  misc_feature (1845)..(1964): n is a, c, g, or t
  misc_feature (1969)..(1969): n is a, c, g, or t
  misc_feature (2009)..(2009): n is a, c, g, or t
  misc_feature (2076)..(2076): n is a, c, g, or t
ggtccggaattcccgggatcccgggcacatcctccggctgcccgcgcacctctccacgccggccccgttccgcggctcgccctcggctgcgctcggctcccgcgggcgctcggccccgagcccctcctccccctacccgccggccggacagggaggagccaatggctgggcctgccatccacaccgctcccatgctgttcctcgtcctcctgctgcccctggagctgagcctggcaggcgcccttgcacctgggacccctgcccggaacctccctgagaatcacattgacctcccaggcccagcgctgtggacgcctcaggccagccaccaccgccggcggggcccgggcaagaaggagtggggcccaggcctgcccagccaggcccaggatggggctgtggtcaccgccaccaggcaggcctccaggctgccagaggctgaggggctgctgcctgagcagagtcctgcaggcctgctgcaggacaaggacctgctcctgggactggcattgccctaccccgagaaggagaaccgacctccaggttgggagaggaccaggaaacgcagcagggagcacaagagacgcagggacaggttgaggctgcaccaaggccgagccttggtccgaggtcccagctccctgatgaagaaggcagagctctccgaagcccaggtgctggatgcagccatggaggaatcctccaccagcctggcgcccaccatgttctttctcaccacctttgaggcagcacctgccacagaagagtccctgatcctgcccgtcacctccctgcggccccagcaggcacagcccaggtctgacggggaggtgatgcccacgctggacatggccttgttcgactggaccgattatgaagacttaaaacctgatggttggccctctgcaaagaagaaagagaaacaccgcggtaaactctccagtgatggtaacgaaacatcaccagccgaaggggaaccatgcgaccatcaccaagactgcctgccagggacttgctgcgacctgcgggagcatctctgcacaccccacaaccgaggcctcaacaacaaatgcttcgatgactgcatgtgtgtggaagggctgcgctgctatgccaaattccaccggaaccgcagggttacacggaggaaagggcgctgtgtggagcccgagacggccaacggcgaccagggatccttcatcaacgtctagcggccccgcgggactggggactgagcccaggaggtttgcacaagccgggcgatttgtttgtaactagcagtgggagatcaagttggggaacagatggctgaggctgcagactcaggcccaggacactcaaccccaggaggggagccgctcggcgaatgagctgggtgggtgcccaggagccggcccgcagcacctgcacacacgaagtccggacccacgcagcctccatcccgcgtatcttgctctccgcgatggcaatgccgagagtgccctctactgtccgactccagcactgcaacagcttcaagttcaaaaccaagaggcgtttttgagagtggaaaaaaaatttaaacttcccgaaagaaggtccaccatcaggagatgaatatggaacatctcctatgtaccaggcactgtgctaagtgctggaatacattatctcattgaattatcacaacgaccttttcaagtaggcattatcaccatgcgacaggttgaggaccgtgaggcacgctggagttatttgactcgacttgcccagggtcccaggtcagtgctcctcaaacctaaacatgctaagagtcacctggaggtccagttaaaaatgtacatctggccgggcgcggcngctcannnnnnnnnnnnnnnnnnnnnnnnnnnnnnnnnnnnnnnnnnnnnnnnnnnnnnnnnnnnnnnnnnnnnnnnnnnnnnnnnnnnnnnnnnnnnnnnnnnnnnnnnnnnnnnnnnnnnnnncaggngcggtggtgcacacctgtaatcccagctactcggaggctnaggcaccagaatcgcttgaacttgggaggcagaggttgcagtgagcagagatcgtgccaatgcactnccagcctggggacaagagtg

SEQ ID NO: 354830 - DNA, 444 bp, Homo Sapiens
  misc_feature (44)..(54): n is a, c, g, or t
gctcaatgggaagagaggagagggagaaaaatacaatgaaaggnnnnnnnnnnngtttgcaaattcagacaggaaacaggtgagtggtttgaattggatgcagtgtgggccatcctggaatgatactgactgattaattattcctgataacatctcaagaaaaggagaaggaaagtgtttctggagaatgttctttcacatcactggaatctgcaattcaagaagtgacaagggagaattcttgctttacctatggactggcttaagccgtgtggcatccgaggaatgtttcaaatgtgtctgtgtttctctttacattccttattgtacctcattgttcaattcacttttgtaaattccacctaacatttaattattttaaatttctccttttaccttaatctccttgctaattttatctgtctaattaaaaagagcagaagc

SEQ ID NO: 354831 - DNA, 1137 bp, Homo Sapiens
gttttctttcggagctgaaccaaagaatgtgcaccctctttctctagtgctgtggtgtctgcttatttttgtatttgtgctttccatccatcttctgtgatcacaaggcattcttaaggttttctagcacgacttgcggacatccagactcgtggggggcccacccatggctcggtaagccagcagcccagggcactggcactaccatgaggcactgcattaattgctgcatacagctgttacccgacggcgcacacaagcagcaggtcaactgccaagggggcccccatcacggtcaccaggcgtgccccacgttgcaaaggagaaaacaaaattctgtttcgtgtggacagtaagcagatgaacttgcttgctgttctcgaagtgaggactgaagggaacgaaaactggggtgggtttttgcgcttcaaaaaggggaagcgatgtagcctcgtttttggactgataataatgaccttggtaatggcttcttacatcctttctggggcccaccaagagcttctgatctcatcacctttccattacggaggcttccccagcaaccccagcttgatggacagcgaaaacccaagtgacacaaaggagcatcaccaccaatcctctgtaaataatatttcatacatgaaggactatccaagcattaaattaattatcaacagcatcacaactaggattgagttcacgaccagacagctcccagacttagaagaccttaagaagcaggagttgcatatgttttcagtcatccccaacaaattccttccaaacagtaagagccccctgttggtacgaggagttcttcggggcagaacacccaccgacccctaccttcaccaactcctaacgtgcttctactcccaagcgctttccgcctccacccttccaacgcccctgcggcaagggcccttcctgggggcccaccttgggcgccacagcgccacgggggaaagcaactttccggccctggcgcttggcccggcccgcaacttttcttaacattcctaagggggccaaaccccaaaggtggcgggggaacccaacaagaaacccttccttatttgaaaccgccccttggccgggtacttggcaccccccccgtgagaaggggtccaaaaa

SEQ ID NO: 354832 - DNA, 1116 bp, Homo Sapiens
  misc_feature (1105)..(1105): n is a, c, g, or t
ccgtggaggcctatacgcgagcactggagattcagccaggattcatccggtccagatacaacctaggaataagctgcatcaacctgggcgcctacagagaagcggtcagaaattttctcactgccctcagtttgcaaagaaagagcaggaatcagcagcaagttcctcatcctgcaatctctgggaatatctgggctgccctcagaattgcgctctctctgatggaccaaccagaactcttccaggcggctaatcttggtgacctggatgtcctcttaagagctttcaacttggatccttgaagaaagaataataccagtactaataatccctgatctgtgtgattgtactgaaaaatcaaaaactattttattatgaatttcaaaaggataaatcaaatattcaaaaggccatggtcatatagcccaaggaaattaattcctgtggacaatgcccagtctctgttcagatccaaaagcacaaaatgttgtatatagagtcaaagtcaggctcaaaagaagaattaagagactcaagacaaaccaagataaagtaactgtgtgttgaatactctttccacaagttgcaagcatattgcaacacatgttctttgggttttttgtctccccttgcagctgatgacacatctgaggaacttgttcatgggaaacatggaaaaagcactgcctcagattgggaaattctgactgtttctgaactgtcttcttttgcaagactgaacatagtttgggccattggtgcatgcacatatattaacttgtgactaaagacagacattgcttaaacctgttccaattttaacttttactgtagccctttgattccagagagggagctttgctggcaaaagcagtttttgcactagaaatttttgctgttcccaatctaaacttttctggtattgtatatatgcactttaatatcttatttatgccttgctggagttttgttttgttgctccaatttttaacttgggggtgaaagatttaagaactcagcctcactagatcaacggaccaaataaacaattcctgaagacagtttttcatagtgtaggattttgaagaagtgtttttcttaaagnagatacgatgc

SEQ ID NO: 354833 - DNA, 423 bp, Homo Sapiens
taccttagtaaatgcaattttcgaacaggcccccatcttcaactggtatagcatcttccacaccctgtagccttcaaacatcacctgttaaaatactgcccattccatgtcatgtatatctgcccatttatgggagcagtgagtggaaccctgacagtgacggactttaagctgtacttcaaaaatgtcgagagggacccgcattttatccttgatgttccccttggagtgatcagcagagtggagaagattgtgagcacagagccatggagacaattcctgtggtatagagatagtgtgcaaggatatgaggaacttgcggcttgcttataaacaggaagaacagagtaaactagggatatttgaaaacctcaacaaacatgcatttcctctttctaacggacatcgtgatgggtaccgagc

SEQ ID NO: 354834 - DNA, 817 bp, Homo Sapiens
  misc_feature (13)..(13): n is a, c, g, or t
  misc_feature (23)..(23): n is a, c, g, or t
  misc_feature (165)..(221): n is a, c, g, or t
  misc_feature (501)..(628): n is a, c, g, or t
  misc_feature (659)..(774): n is a, c, g, or t
ccagctggtacgncccggcgtantggatatcgtcgaccagcgcgtcgcgctgctcaggacccagcaggtcagcaccccagagcagactgataggtccgtgggacccatgttagagcagaaaatttgggctcagcacattttactgttagtagagagccaggaaannnnnnnnnnnnnnnnnnnnnnnnnnnnnnnnnnnnnnnnnnnnnnnnnnnnnnnnnaacctctgtgcagtttgtatgaatgaattgctatacatttataaggagccagggtctggagggttgctatcactttgtccagcccaaataccttcctgggcaactcctaccatttgtttgcagttgcctctactagctgatggcagtatgctggaaagaggttgtactataaagagagttctttccttctactccagagttgttgtgtagctttgccattgaaccgatcaatttttaaactctttaaagaagcagcagctatttttttgacattaacagnnnnnnnnnnnnnnnnnnnnnnnnnnnnnnnnnnnnnnnnnnnnnnnnnnnnnnnnnnnnnnnnnnnnnnnnnnnnnnnnnnnnnnnnnnnnnnnnnnnnnnnnnnnnnnnnnnnnnnnnnnnnnnnnttttttatgtttcttttgagacggagtttcnnnnnnnnnnnnnnnnnnnnnnnnnnnnnnnnnnnnnnnnnnnnnnnnnnnnnnnnnnnnnnnnnnnnnnnnnnnnnnnnnnnnnnnnnnnnnnnnnnnnnnnnnnnnnnnnnnnngcatgtgcaccatgccgggcgaatttgtattcttaatacgaga

SEQ ID NO: 354835 - DNA, 864 bp, Homo Sapiens
  misc_feature (47)..(83): n is a, c, g, or t
tgttacgactcctataggggacctggagtttaccgcggggcggccgnnnnnnnnnnnnnnnnnnnnnnnnnnnnnnnnnnnnnatcaggccaaatcggccgagctcgaattcgtcgagagcggaaggggtggcgcgacgttggagaccggggcagcgccatgtaccacagtggatggaaggatgcgcggtgcggcggggcagctgtcctcttctccccggacccagcgcctggagagccagccctgcagggtgggctgggcgagccaaactgcgttcctggtgcagggcttcgggtctccctaacagaccttatacgctgaccggcggccgccatggcagtgtctctttgctcagacatccagggacgaccacattcgtccaacagcggtcgctccaccaatcctgggagaagcgaatcgttttctccgcgtgccctgtcagccgctcatggtgcccagagaggaattttagtggcagcattccggctgtcacgccaccgaaattgccaggccactccaagtcagaaggaccaccaggaaaagtcaggaagagaaccaccatcaggtcccagcctctttttgtgacaaggactagagggttcgggtcagcagtgggctggctcccgctgggctcacctgtcctatagagcaggctgcctcaaggaagaagctcacaggggacatctgacatctgaaacagcaagtgctaaatgctttaaataagccaaaactaaaccaatcgttatgttaactaaaaatacatgaatgctaccgaaagatagtcgaatattagaggaagagattaaactctgattttgagcactttgtgctttattcggaaaatgataagatgcagttctgaaa

SEQ ID NO: 354836 - DNA, 1390 bp, Homo Sapiens
  misc_feature (72)..(270): n is a, c, g, or t
  misc_feature (295)..(546): n is a, c, g, or t
tggatcctatccgtttcagttgctgctcaggtaaatactcagaaagtggaatgcctgggtcatatagtaccnnnnnnnnnnnnnnnnnnnnnnnnnnnnnnnnnnnnnnnnnnnnnnnnnnnnnnnnnnnnnnnnnnnnnnnnnnnnnnnnnnnnnnnnnnnnnnnnnnnnnnnnnnnnnnnnnnnnnnnnnnnnnnnnnnnnnnnnnnnnnnnnnnnnnnnnnnnnnnnnnnnnnnnnnnnnnnnnnnnnnnnnnnnnnnnnnnnnnnnaggggacctggcatggtggctcatnnnnnnnnnnnnnnnnnnnnnnnnnnnnnnnnnnnnnnnnnnnnnnnnnnnnnnnnnnnnnnnnnnnnnnnnnnnnnnnnnnnnnnnnnnnnnnnnnnnnnnnnnnnnnnnnnnnnnnnnnnnnnnnnnnnnnnnnnnnnnnnnnnnnnnnnnnnnnnnnnnnnnnnnnnnnnnnnnnnnnnnnnnnnnnnnnnnnnnnnnnnnnnnnnnnnnnnnnnnnnnnnnnnnnnnnnnnnnnnnnnnnnnnnnnnnagacccctctgaagccggtcactgtgccggtggtgttggccagatccagaaggatggaggggaacgcaggatgcaggaggtaaaggtggtgaaggctgggcggctcagttcctaggatgatatcggaattgggagatgcagctgacagcccttcggccccagaagaggaagacagacttctggtctgaagtaactgctgaggtggctggcgtttctttcatgtgacacggagcacggtaactccaaacaatggagccagagtcaccatccacaaccatcatctttttcatcccaactccatcctgtatctgcagaaggaagtctaatgtctgatcatcagtgaaatatccaggagtaggctggctgcgcaggccttgaagtctcaatgcccagtaaggtgtcagattttgcccccgaagcagcacaaggctttgtctggttgtaatcagaaggttgctgcagttggaatctggtgccttcaccatctggagtagttcaacaccatcactgtaaacatcaatgagctcagacaggttgatggatcttcgcttttcccattctggctcttctatctgcagagaaggtggtgagctgtctcgattttgggcctgaacaaaaatgtcccgcagtgcgacagcttgtatatttccaaagccaaacaggatgtagacagccccatttgtggtgatgtaaacctgaggaccaatcagattcccaactccaacgatgttgtacttcacaggtcgacccactggatttccggtccggccagacaccagcagaaagcacagatctggctgcaattcccccaatggcccctcgtgccgaattcgccacccaggcc

SEQ ID NO: 354837 - DNA, 288 bp, Homo Sapiens
  misc_feature (250)..(250): n is a, c, g, or t
ataatatattaccagtaagcaggaggagtttctagcatattaagagatttccttttatcaaactcctttcataattttctactgttactacttcaatttaccatcttcatcaacggtaaggtccacaacttctgctgcattctgcctcaagggctgtataacagtagaaatcctactgcggttccgtggctcctgtggccgacttgcatgagaactggaaccctggctccaatgagatctggagtgtccnagggttgaacgagaccgatagctttctccaactgttac

SEQ ID NO: 354838 - DNA, 1914 bp, Homo Sapiens
  misc_feature (523)..(523): n is a, c, g, or t
  misc_feature (1850)..(1850): n is a, c, g, or t
gtcttggtctaaatggaggctatcaagatgagttggtagatcatcgtttgacagaaagggaatgggctgatgaatggaaacatcttgaccatgcgctgaattgcattatggaaatggtagagaaaacaaggcgctctatggcagttctgcggcgctgtcaggaatcagatcgtgaagaactcaactactggaaaagacggtacaatgaaaacacagagctgaggaaaacggggaccgagttggtctccaggcagcacagccctgggagtgcagattctctcagcaatgattctcagagagagttcaacagcaggccaggtacaggatacgtacctgtggagttttggaaaaaaacagaagaagctgtgaataaggtgaaaattcaggccatgtcagaagtacagaaggccgtcgctgaggcagagcagaaagcctttgaagtgattgcaacagagagagcacgaatggagcaaaccatagcggatgtcaagcggcaggccgcaggagggatgctttcctcgtncattcaatgaggcaagaggagtccacggagaactgctggaactgtggccgcaaagccagcgagacatgcagtggctgcaatatcgcgcgatactgtggctctttctgccagcacaaggactgggagcggcaccaccgcctctgtggtcagaacctgcatggccagagcccccacggccagggccggccgctgcttcctgtaggcaggggctcctctgccaggtccgccgactgcagcgtgcccagcccagccctcgacaagacctcggcaaccacatcgcgttcctcaacacctgcttctgtgacagctatcgacaccaacggactctgagccccggactctgcttaccctgatggctgctcagcaccacagagtgcttgggctgagggactgactgttggaacccgtgcatgtagctgccgggtcatcagcaagaaatgaattggaggcaggaagagtccaagcctgaataataacaccccacagcctctctgtgcacttgctgtctgcggagccagtgtgccattctctgcacatgggcagccagcctgagctgcctcctccatggctttcctggtttgttcctctctccactgaagctgacttagccggccccttttcagtgtagaccaccagctcccctccccatctccttgagtcagcagactgtccaatgtgctcagccaggctggaggcggcaggcggcaggcagcaggctgtggaggaggcccctcggtcagggagcggcctgcctcacccctgaatagctccttcggccccatctccatcctcagcagatgacactgattggcctcacggggacttgggtaagcaacaggcggcattcaggactcttctcaaccctgctgttcagacttgataagatctcagagtccacaggaaagaagtcactgttgcaataaaagcacccgtagtagcaaaaacataaaacaaataaaacttcccccacatcacagatgattttggacaagattttccaaccttgctggctactttagtttgggacctgttttttttctcatttgattttgcttgtgcagaaaatagtttccagcacatggattgatctgagagagaatgaggctcagttgtggatagtctgttttctctgagcatgttggccaactagtatcgtcaaattattgagtggatcatctcttggaaatgcagaacttctgccaccacttggctatttgcacagtcatcttgttctgtgtccttttatctctcagaccacacacatctggaacgctgtgggcatcttctgcccatgggctccatttggcacctgctgagccacagttgncctgctggatgtgctgtgcaggttggtaggacttgcccccactgtcaaggcctggtctcatctg

SEQ ID NO: 354839 - DNA, 425 bp, Homo Sapiens
  misc_feature (293)..(383): n is a, c, g, or t
ggccgccttggcctctgccctccgtgcccgggccgctgccgacttggtgttctcaccctggaacttcttgggcatccctcagaaggctgcggcgaagaggatggggatgggggagcaggggccggaggggacatcggcactcagcaacccaagaatcacacttgggcagccatgaccctcttggggcctctgtggccttctctgtataaaacaagggctttggacttagcgctctccttgtaaaagtttattaaggcaaaattcacatcatgacaccaaatgagctcatttannnnnnnnnnnnnnnnnnnnnnnnnnnnnnnnnnnnnnnnnnnnnnnnnnnnnnnnnnnnnnnnnnnnnnnnnnnnnnnnnnnnnnnnnnnctcaaagtgcctggatcacaggtgtgagccacagtgcctggc

SEQ ID NO: 354840 - DNA, 1168 bp, Homo Sapiens
  misc_feature (56)..(88): n is a, c, g, or t
  misc_feature (1109)..(1126): n is a, c, g, or t
agatgtatacgatcactatagggcgaacctggagctcatcgcggtggcggcgcatnnnnnnnnnnnnnnnnnnnnnnnnnnnnnnnnnatcaggccaaatcggccgagctcgaattcgtcgagagcgggcgaccgggccggcgctggggtaagaagcctgctgagggatgcccaagaagttccagggtgagaacaccaagtcggcagcggcccgggcacgtagggcagaggccaaggcggccgctgatgccaagaagcagaaggagctggaggatgcctactggaaggacgacgacaaacacgtcatgaggaaggagcagcgcaaggaggagaaggagaagcggcgcctcgaccagctggaacgtaagaaggagacgcagcgcctactggaggaggaggactccaagctcaagggcggcaaggcgccgcgggtggccacgtccagcaaggtcacccgggcccagatcgaggacacgctgcgccgagaccatcagctcagggaggccccggacacagccgagaaagccaagagccatctggaggtgccgctggaggagaacgtgaaccgccgcgtgctggaggagggcagcgtggaggcgcgcaccatcgaggacgccattgcagtgctcagcgtggcggaggaggcggccgaccggcacccagaaagacgcatgcgggcagccttcacagcctttgaggaagcccagctgccgcggctcaaacaagagaaccccaacatgcggctgtcgcagctgaaacagctgctcaagaaggagtggctccgctctcctgacaaccccatgaaccagcgggccgtgcccttcaatgcccccaagtgagcccagaacttggggagccagttcacccacgggtggtccaggtcacgactctgcacgcccttaggccaggtcagctgcgagggtcacagagcgttccgggggccaaggcgccgggccctggggccatgctcttatcaccagccacccgtcctcccgccagagggtccctgccccgagtgacaccccatcccctcccatcccccggcgcgtgtgtgtagagcctcagggctgagtgcccaataaaggtggcggcaaggctgcggtgaggcnnnnnnnnnnnnnnnnnnctcgcctcgtgccgaattcgccacccaggcctcgctaccttg

SEQ ID NO: 354841 - DNA, 1420 bp, Homo Sapiens
  misc_feature (68)..(128): n is a, c, g, or t
agcgggttctgctctggcggcagcggcagcggcggcgggacgcggaggctcccccgggattcggcctnnnnnnnnnnnnnnnnnnnnnnnnnnnnnnnnnnnnnnnnnnnnnnnnnnnnnnnnnnnnntcaggtgcagccgctgctcaaagaaaatgaacggcaccctggaccacccagaccaaccagatcttgatgctatcaagatgtttgtgggccaggttccaaggacctggtctgaaaaggacttgcgggaactcttcgaacagtatggtgctgtgtatgaaatcaacgtcctaagggataggagccaaaacccgcctcagagcaaagggtgctgtgttgttacattttacacccgtaaagctgcattagaagctcagaatgctcttcacaacatgaaagtcctcccagggatgcatcaccctatacagatgaaacctgctgacagtgagaagaacaatgcagtggaagacaggaagctgtttatgggtatgatttccaagaagtgcactgaaaatgacatccgagtcatgttctcttcgtttggacagatggaagaatgccggatattgcggggacctgatggcctgagccgaggttgtgcatttgtgacttttacaacaagagccatggcacagacggctatcaaggcaatgcaccaagcacagaccatggagggttgctcatcacccatggtggtaaaattggctgatacacagaaggacaaagaacagaagagaatggcccagcagctccagcagcagatgcagcaaatcagcgcagcatctgtgtggggaaaccttgctggtctaaatactcttggaccccagtatttagcactttatttgcagctccttcagcagactgcctcctctgggaacctcaacaccctgagcagcctccacccaatgggagggttgaatgcaatgcagttacagaatttggctgcactagctgctgcagctagtgcagctcagaacacaccaagtggtaccaatgctctcactacatccagcagtcccctcagcgtgctcactagttcagggtcctcacctagctctagcagcagtaattctgtcaaccccatagcctcacttggagccctgcagacattagctggagcaacggctggcctcaatgttggctcttctggcacggaatggctgctttaacatggtggcctgggcagcagtgggctttccaactggcaccgccgagcaccatggatggcctcactcaccgcctactcgggtatccagcaatatgctgctgctgcgctcccactctgtaaaccacgaatcttctgacaccgcacagtatgcctcctgctggacgcccacgacggcacgctccagagggagccaacctgttcatctaaccactgcccaggagtcggtgatcacgacctgctgcagatg

SEQ ID NO: 354842 - DNA, 472 bp, Homo Sapiens
  misc_feature (111)..(111): n is a, c, g, or t
  misc_feature (431)..(431): n is a, c, g, or t
atatgaagcacccttatctgctggctaatctcttgctttggatgttgtagggttgaatgcaatgcagttacagaatttggctgcactagctgctgcagctagtcagttcangaacacaccaagtggtaccaatgctctcactacatccagcagtcccctcagcgtgctcactagttcagggtcctcacctagctctagcagcagtaattctgtcaaccccatagcctcacttggagccctgcagacattagctggagcaacggctggcctcaatgttggctctttggcaggaatggctgctttaaatggtggcctggggcagcagtggcctttccaatgggcaccggggagcaccatgggaggcccctcactcagggcctaattcgggtattccaggcaatatgcttgcttgctggcggttcccccacttntgttacaaccaggatttttctggacacaggcaggagttttt

SEQ ID NO: 354843 - DNA, 848 bp, Homo Sapiens
  misc_feature (424)..(435): n is a, c, g, or t
gggtgcattgattcctccaggtgtgtaattgtgacaactgcagtgatttggaaagtctctttgtcttgggcaaatagaaggggttcctgttgttctgctcttgtccttcgtctcctccccttttcccccagacctcccccttctttttgtcaacttgctgggagctttgctttattggttggcagtgacctaagaacaggatatggtgaggatgtcatggaagagaagagctctttccgtggtattctttggcaagagccatgtctactaagaggttaggtgacttcagtatacttataaaattcagtgagagtgccttcttctcttctaccacactctggcatagatacaggcttgctggtcacctctcattacatagatttattttaaaaacattttgattatgttaatttgagctttcccnnnnnnnnnnnnaactactttttaaaacacttgattactagtggcttagaggtgtgtacatctcctgaacatcacaaacttggtttctacctaccacacgagtagccaaaagaaaagaagcactaatagagaaaggggtgtctcacaccagacagaggacctctgctgtcaattagatccagtatcatgacctaactttaagtgtggaaaagagttcagatctctgagacactgtgaagaaatggatggctcatgtaacatctctgatccctcagtccccaaccctggacgtgtttcatttacaacattcataggagttaaccttagcagtgttgcaaggttaaggttccaaacccaaattattttaatcagggtccccccaataaaatcacttatcccattttattgctagtttagtttttatt

SEQ ID NO: 354844 - DNA, 2658 bp, Homo Sapiens
  misc_feature (1485)..(1485): n is a, c, g, or t
  misc_feature (2028)..(2028): n is a, c, g, or t
aaggcagaactacggctaggtacgaggctgggttgaaatcggcacgagggagactcctgcgtcctccgacttttcatggaagagatgtcaggagaaagtgtggtgagctcagcggtgccagcggctgctacccgcaccacttccttcaagggcacgagccccagctccaaatacgtgaagctgaatgtgggtggagccctctactataccaccatgcagacgctgaccaagcaggacaccatgctgaaggccatgttcagcgggcgcatggaagtgctcaccgacagtgaaggctggatcctcattgaccgctgtgggaagcactttggtacgatactcaactaccttcgagacggggcggtgcctttacccgagagccgccgggagatcgaggagctgctagcagaagccaagtactacctagtccaaggcctggtggaagagtgccaggcggccctacaaaacaaagatacttatgagcctttctgcaaggtccctgtgatcacctcatccaaggaagaacaaaaacttatagcgacttcaaataagccagccgtgaagttgctctacaacagaagtaacaacaaatactcatataccagcaattctgacgacaatatgttgaaaaacattgaactgtttgataagctgtctctgcgctttaacggaagggtcctgttcataaaggatgttattggggatgaaatctgctgctggtccttttatggtcagggccggaagattgctgaagtctgttgtacctccatcgtctatgccactgagaagaaacagaccaaggtggagtttcccgaagcccggatttatgaggagaccctgaacattttgctgtatgaggcccaggatggccggggacctgacaatgcgctcctggaggccacaggcggggcggcggggcgcttcccaccacctggacgaggacgaggagcgggaggagatcgagcgcgtgcggaggatccacatcaagcgccctgatgaccgggcccacctccaccagtgagcaggcaagagaccgagccgccctcctctcaccgcccccactccctgccgtgctacacccagattcctgttgcaggctgccgggccccttctgcttcccttggagcctggagatacttttgtaacaagccagatgattattttggtattgcttgacaaggcaaattgattgtcttgacccaggcgtatgacccctgtcgttgaacaagctgtgtctaagatctctacttttcatgagaatctgagactctttggagccaggctttctcggttctcagaggaaaagtatgaatgagtgtgaagtgtatgtgagaacttttgtttgcaatatttatttttgtgggtgtcgacttcctatgtggggctttttggggtgacactcccttaagggttcagtttgacaattctggagagttgtcctgcagttggaggccaccagaggtatctaagctccctgcttcctatttnataatcctccagccccagcaggtccactcctggttcctgtgtgtttggcccgggcacaatccccactgctttgctagacgtgctttctgccatgtggctttgggcctagagcttgttgataattgcagcttgtggcagtggaaatatggctgaatgagcgtctaaatcgttgagaccagtgcaactttgggtgcaaggctttgtttagggatcaagccttttgccaccttgggctggtctttggcctggtgctcactgggaccccatatgtctgcgtaggagcagaactttccatggcagtaagtgtccagctctgtttctggttctttccccaactccagccccgtccagttgttctcctgattgacccgactccactccaggaaggccatctgaccctgtgacaggcatagctcataaactacccctccctgggatcccgctcctcttcagcctccttccccatgaagctgggctaactttctaagtcattttgcttagaaattcagtgtggcccataccctttgtcctcccagcctggcnatccaggcagggacacccttcacaccaccagccccaggggagcttccctgctataaacacagacccccttgtctttgcctctgatttttacacagtgtagagtggccagcagtgaacaggttgaggatgtgcgggtagatagataactttgggtctggtttgtgtctgtgttcatgtttgtttaagggatatgtgtgactgtgggtggggacgtgtgcttgtggggcacaggtggcccctgctggagcccggctgggcgcagcgcctatgtaggacgggtgttctcagtgacctacctcccaggctcctctgcacctgcaaaggaacaggagtgagtcgtgactgacaggggtggttgagactagactaggtagagtagttaccaggagatgtgaatgtgcgtcaggtgatggatgggtttgtcaagggaatcgttaccgttttataccaaaggtattaacatgggcagcctttgacacatgtattccaaaaacgagtttatattttcaaacggtttttacagcttagactttgtacttactgccctgcctgtgacagttgtatgccttcattttgtatccaacagcaaagtctacaataaaactttaaaacaatcatgactgaatgtca

SEQ ID NO: 354845 - DNA, 562 bp, Homo Sapiens
  misc_feature (21)..(21): n is a, c, g, or t
  misc_feature (489)..(489): n is a, c, g, or t
  misc_feature (499)..(499): n is a, c, g, or t
tgatctaaggatccccgggtnatcgatgccacactgtgatgtcatgtgcagtggttgcagacaaagtattactggtggaggggccagtcttgaagagctgcctttctctccctgggacttcttgatctccctgtagtcgtcttcgttgtcacacttgcgtttcctcttggattttggcaaagccttttctgcaggtgtgtccgaggtgtggctgggcggtgcgctctcagagtccttggtggcaggggcgctcaatacccctggctcctggggcaggtgttctgggatcctggacaggagggtcaggtcgattttaacccagagagacctgatctcatcactgtcctttagaggggagagaagttcgttccggccaaaggggaccagtgtgtagaactgctcctccagctccttggcgatgtcactggtggtcctggcgttgatggagcctacaggggccctaggaccactgcccccgttggcagcggnctccttcagnctctgatcattcccggaggaggcagaggcagtcacggtctgtgctttggacagagggtactcc

SEQ ID NO: 354846 - DNA, 811 bp, Homo Sapiens
  misc_feature (77)..(77): n is a, c, g, or t
attcacacctggcctgagcacacggtgatctaaatgcagcctaggtatcactacatgtgtatgcagtttaaggttanagcatacatggcatatggtttttaagcagaatgttttagaaagtctggaagttacaaaagtagtactgtaaacaccatatgaattaaatttccataacaaatgcacaagttattcttaggcagggatacatatttttatcccatggtaacatattactgagcttatctgacagtgttttcaaagccaataaagcagcaccccaagtaaaaatatacagacagccatcatatgggagagacagacggctccaagatgtttaggaattctgtctttatggtatgtaagtttgctgtggaatacacgagattttattattcttcctagaattctcagatggtataggttagtagaaacagaatgaaatggtttcctaaaagaattattctgcctcctgtttaaagtaagcttttataattctgttttggggaagaaaattcttcctgcagattagatcaaatgccttatttaggctgtgttcttaatacccatgcaaacttcttgcatactgaaggctttctattgcaaattggtacagattcaatgctctgtaaatagcagactttaagacttaccattgtgtttaaacctcagtgactcaactaaggatagtcaatatctagcgttacagattttaagtaaaatttttatgaagaaacagaatgtgtctgaaatccaagatacctgtattcttgtttgtggctgtcaaaaaaattctggttctccttgagctaag

SEQ ID NO: 354847 - DNA, 912 bp, Homo Sapiens
tgggaaagttcaccatgaatcctgctggccaatcttcgcagccagcccctcggtccacacagcccatatcggcactgggaatggaccattattccatcgggtcaaaagtttccaggatgctgttttgtacttctaatgtgtaaaagcgtccccctctaccccacccactttgcctctgaaaagacagagtattaagtcaaagtctgttattacttttttaatcctaaaagtaataagcacttctagttgatggggcttgactgtaaggaaatgttacgcccctcgttgagacaaaggctgagttcatgaccgttcctggggtggaatctgctggcctgcagtggtggcctgatgccgtgcgatgcggccccttggcaattgaggaagggggtgttctgtaggaaactgctgtattgtaacttggaaaaactagacatctttgaggtgagcctaaacttctgcagttaactggacgctgaaaggcaggcgggtctgcggggtttttgtctccctcagcctggttcagtgcacggccacctggacagctgcactgtcacctgaaggcggcctcttccccaaagccaggtggctgttgagtggagaataaggttgtgggaacaatatcacattcaccctgtgcttgaccaaaatgggggctttgtttatacagctgtttgcttatgaaaagagtcagatgctactgaggaaagagaagggaaagagagggcttcttccagcactagaagccagagaaccaaaaccagaagccagtcaacccaagcgcgtgtcccagctccttctatcaccagctgtgatctcagagaagtcacaaacttcccaagctttggtttcttcagctgtgaaaaataaggacagtatctccccagctaatttcatagaattgttgtgagg

SEQ ID NO: 354848 - DNA, 762 bp, Homo Sapiens
  misc_feature (449)..(449): n is a, c, g, or t
gggaaggtaaaaatacagcaaatacgatctttgtcagaagatgtgcgattttactataaacgattacggggcaataaggaagacttggagccaggaaaaaaatcaaagattgcaaacatttattttgatcctggactacagtgtggggatcattgctatgttggcttgccttttctatccaaatctgaacccaaagtgcagcctggtgtagccatgcaggaagatatgtgggatgctgactgggatttgcatcaaagcctgttcaagggatggacaggaataaaggaaaattcaggtcatagattgagtgctatatttgaagtaaatacagaccttcaaaaaaatataatatcaaaaatcactgctgagctctcctggccttccatacttagctcaccccggcacttgaaatttccacttactaatacaaactgctcctcaggaagaangagattactttagaaaatccttgcaggatgttcctgtctatgttcagtttattcctctggctttatattccaacccttcagtgtttgtagataagttagtatcaaggtttaacttgagtaaggtggcaaagatagatttgagaacactagaatttcaagtcttcagaaacagtgctcatccactgcagagttcaacaggatttatggagggcctctctcgacatttaattttaaacctaattttaaaaacctggagaaaagaaatctgtcaaagtaaagttttactccccagttcacaaacagaaactggttt

SEQ ID NO: 354849 - DNA, 1062 bp, Homo Sapiens
  misc_feature (994)..(994): n is a, c, g, or t
atgccgggtctataaagtgtgattaagggttcagaaacaaataaataaggcgaaatgggttaatcccccttttaaccattagttcaataagccaattttcttttcggcaatataatttccaaaacgggaaaaaagtggggcttttatgtcctttcttacgtaagcaatagttttttcttctatagcaaccaaaattcaggacttgtgttcccttttaaggatcgaaaacattaattctaattggtcttataaaacaaacatttattgtaaatatagcatctataaagataaaaaatccacacccatatatattattgttttccacaaataattcgagccctgcaaagaacaaaatgaaaaattcagggagaatagccaatagaaacagtgaaaccacaaccaactcagggatggaatctgcgactctggaggattcaagaagctcacaacttggtaaagtaataactcaaacaatttcatgctgaggagtttagcttttgtgtgcaaaggaggtaagtccatttttggaggagaaacagatttttgtttggtcctccaagaacgtgaaaatcacgagtacttttacaaggtctctataagtagccccagtagtctgactatgtagtaaaaaaatgcccatggcaagcgagaagtctgtctgacttggaagagaaggcaaaggtcaatggggcagtccttcctgagagaaaacccatctgcttttctataagccttagttcttttaagacatggggatttcatgtctcgaaacaaacaagactttttatccagcaaggcaaaacctttgctcaacaattgcacagagcataattacaattctgcagttgtaaagccctggatagttctcattcttcaggaagcaccctgggtcaaagtcatttctgtttttgttaactgaaagttgggcctaaggatttcctttcacgaatggtggagttttactttgtatacaaaggatattaaatatattagnccactcagcattaattgatgcaatttcactcctctcagtatattatttcccaatccagttggtgtttt

SEQ ID NO: 354850 - DNA, 1501 bp, Homo Sapiens
  misc_feature (908)..(908): n is a, c, g, or t
  misc_feature (910)..(910): n is a, c, g, or t
gccttattgcatatagaaccgttgttgtaaaagcaggctgtccggtccggaattccccgggatatcgtcgacccacgcgtccggggagaaagatctaagtagcattgttaatttcttcaatttcttctaagggattttattgtttgttttagaagcttatcacagccttctttcatgattttgcagtttagacttgatacaaggaaaaattcagcttggggatggttaagagtgtttatagcagattctgacataggagagaaaacaaattctcatccaagaaggtagctagtaaaatatagggaaggtgagccatattcctatgcagcatcaatttattgacaatcaggtatttctcttaacagtttggtcttcttagttcaagaataaagggtatcatctttaataataagcattccccaaaaattgaagaggcagtcacacacttaagtgtgtggctttagaaaagcgcatgctaatttaaagatatacaggaagagaaaagtaggagttaagttggatgttgttagaagttggatgttagtattaccttcaggaacagatccccatggcatgtcacaggccttaattatatacctggctttcttattgtctccactttatcatgaggacaaggtcttggtttcatgggaggaacttctccattgaaataaatgtctgccatgtcagcaccgtttgttccctcagttttaatataatggaccatatattaaacataattaaacatatatttaaatgtggtgtttgcctgtgtctctagcaggatcttgaaattttaaaaatttgctttctggttcctgtttcagagaaaacattgtccccagaaatctcataggattgaaagtgttccctaagcagtgtgaacaatggaggaaaatatagtttananaaaagtcagggaaaggtagggccagaggactgacaccaagaaatcattgaatctcaacataagacttcttggaatttagttaatcatattggaataaattccttcaagaatcttgtcccttggtaatcaaagtttgaaaccccgcactgaaaagcaccaactggttggaaataatatactgagaggagtgaaattcatcaattaatctgagtggctaatatatttaatatcctttgtatacaaagtaaaactccaccattcgtaaaaggaaatccttagacccaactttcagttaacaaaaacagaaatgactttgacccagggtgcttcctgaagaatgagaactatccagggctttacaactgcagaattgtaattatgctctgtgcaattgttgagcaaaggttttgccttgctggataaaaagtcttgtttgtttcgagacatgaaatccccatgtcttaaaaggaactaaggcttataggaaaagcaggatggggttttctcttcagggaagggactgccccatttgacctttggcctttcttctttccaagttcaggacaggacttcttcgctttgccatggggc

SEQ ID NO: 354851 - DNA, 853 bp, Homo Sapiens
  misc_feature (762)..(804): n is a, c, g, or t
ggctggaccggtccggaattcttgggatctattgcgcagctcgctgccgtgcgtttaacccaggcgaggaggaggaggagaaaattcccccagattcgggcaggcccgcaccccacattccgtcctgttttgagaggaggagggaagagaaataaacgtggcagcgcatagaaggccagcagggagactgctttccagacacctccggcccacacagccgttcaccccccgtcttttcagtcctggaaaaggaattcggtctgtccttaggatgaagctctaactgaactgaagtaaggagaaacagccttgaatctttggagggtctgtcttccttttgggctctgtgcaactgcagctacagtggaaaaaagcaaactgctcttgatcccaggccctgcctaagcctcagcagaacttgtaagcctaaactgaagagcctcacccggacgagcaggcatcccttaaccttaagcaatccagttccacgccctggatcagtgaataaccccagctgcaccatgagccgcgttcgggatgctggctgtgtagcggcggggatagtgataggggctggtgcctggtactgtgtctacaaatacaccagggggagagaccagaccaagaagagaatggccaagcccaaaaaccgggctgtggctgggactggagccagggctagagctgggctaagagccggattcacaatcgaccttgggtcaggattcagtcccccaacccccagtccgtgcttgaagccgnnnnnnnnnnnnnnnnnnnnnnnnnnnnnnnnnnnnnnnnnnncaatttgggaagctgaaggcaagtgggcccccagactgtgcatcaaggg

SEQ ID NO: 354852 - DNA, 2537 bp, Homo Sapiens
  misc_feature (890)..(890): n is a, c, g, or t
agcggagggtggtgccgtccggttgtttggtgggaggcacgtaagaccgctctgggcacgggggcgctcacctcgctggctcgttcggttctaggagcagatccggggtagagggaaaagagctccgggccagggctgccgtcgccgccgtcggggagtcagcccgccagcccgccagctcgtcagcccgccagccagcgcttcgcgggccctgtcggtcccgatcagaccaaacattgtctggcttgcactgtaaaactagttagctgaagacgacttctcaggtttcttcaggatgcctgcagcacttgtggagaatagccaggttatctgtgaagtgtgggccagtaatctagaagaagagatgaggaagatccgagaaatcgtgctcagttacagttatattgccatggacacagaatttccaggtgttgtggtgcgaccaattggtgaatttcgtagttccatagattaccaatatcagcttctgcggtgcaatgttgaccttttaaaaattatccagctgggccttacattcacaaatgagaagggagagtatccttctggaatcaatacttggcagttcaatttcaaatttaaccttacagaggacatgtactcccaggattccatagatctccttgctaactcaggactacagtttcagaagcatgaagaggaagggattgacacactgcactttgcagagctgcttatgacatcaggagtggttctctgtgacaatgtcaaatggctttcatttcatagtggctatgattttggctatatggtaaagttgcttacagattctcgtttgccagaagaggaacatgaattcttccatattctgaaccttttcttcccatccatttatgatgtgaaatacctgnatgaagagctgcaaaaatcttaagggaggtcttcaggaagttgctgatcagttggatttgcagaggattggaaggcagcaccaggcaggctcagactcactgctgacaggaatggctttctttaggatgaaagagttgttttttgaggacagcattgatgatgccaagtactgtgggcggctctatggcttaggcacaggagtggcccagaagcagaatgaggatgtggactctgcccaggagaagatgagcatcctggcgattatcaacaacatgcagcagtgatggcgccaggctctgcagggtgggcctgatcccagagtggtgcttactgtgctgactgtgtacttatcttccccaagagaaaatgcttcttttgagcacactgtacctaccatctgcattgagcagaaagactttggttttactgaagacaaaagatgttttgagttttagacccagaagagaggagtttgctctgaagttggtaaagtaagtcttccccattcctcatactcgagcctctcctctctggttgcctcctgccaccagcatccatggctcatttgacacctttttaaatatcaggacaagtctgaaacaaagtagtaaaatgtatataactcttacctgttgtcattctttttcttttaaatttgttgctaatctctgataatgaagattcttactctgattctcagctgagctgtgagggcttccagggaaaatggaacaaaatggtgttcttaggtaatgggttgtagatactgagtcttcctttccttttctgacccttctcgaggacatttgctttcctcacacttttgtagtctctctttacatattactatatggaaatgaattgctctgtgctgaaatttgaagaccagataatgaaactgaaaagcaaacaattttactgaatctgtctacccttcattcatgagaactccagaatgagtgttgaccactgaagcatcttttaagtctgtgttccattgtgccattcaggtttgctgtcacatatgcatcatctgaaatcatttgaaatttttgtacaataaaatatcctgggatttgatcctgaaggaaactagtaagatcagatttttgggtcatgtctgttgtattttcagtaatgtgatttcagatggtcatctggattctcccacttctctactccattatttctctacttttccttccagcaaacctgaaacgtgagggagatggattaatgtgagtaacaggaatgtgtctttaaaaagctagagtggttacatttaatcaggcagtaagataatttgggttcttgagttgttttggagtaatatcccacaactggggtaggaagctcaggacttttttctttaaagctagtcatttcaaaagcatattgtatttttttgaatgactacagtatggacaatttcaaaaaccaaaacccactttggattggtggaagtaaaaactggtaactcactcaagtgaatgaatggtcttgcattttaaaagcttatgggaaactcaatttgaaatgattagaaaatgtcaagtattataagctggtatttaagatgcttgtaaatactatttatgtttttaattttgtaaaataaagatttctttttaaccactggcaaaaaa

SEQ ID NO: 354853 - DNA, 1981 bp, Homo Sapiens
  misc_feature (497)..(505): n is a, c, g, or t
  misc_feature (1243)..(1287): n is a, c, g, or t
gggatgcgaccgccaagcagaggcttgggaaaattttgaaaattcatcggaacgggaaactactcctttaagatttggaaagccaggatccttctgctccgctcaggacccccggagccccgcgaaaacatctgcctcccaggagggtgccgagctgcctcaccagggagggccttgcctcttcccggctgccatctccccaacaagcgtctgtcccttcagccggcagagcgagcccagcgtggcccctcaatttgaaaatggacgtcttttctcaagttgctaagagtgatctgtcccagaaaagcggccctgcaagtttgaggaccgcttattccactttaaggacagccttcaggccccctgagcgtgggtgtgattgcagggcctctgcagctctgctgagagcatgagtccttcaaggaagacagagtgagccaatgctcaccagccccagagtcagagctggccacaggctggcagcctccaggggcttnnnnnnnnnggcaaagaacacagaaagaggaggagcaagtgggatgtttatgtccccccttctcttcctgagtgattctcagccaagtccagacagtgctcggcgggtgaggaagggtctgccccgagctttctggttggcaggtggcagcaggatggtgggtgttcagcctgaatgcccaggagcatttctggggggcagctaagactggcagctgggttggtgtgttagcgggcaggggagccattgtggggtcccaggaaagggcaagggctcagccacatcttggggtctgggaggcccaggctaagccatgtggcagggaccgtcttgccctgctggccacactctggagaagcacttctcagccaaggcacccctgccctggggactggcagggcaggggcaggggcagggacagtggccaggcggcccgaggacttacggtcggcacttctctgttctcccgtgtcagcgtgtggtgtcgcctgcatgggtcgtacctggatggtgtgtccaccatcgacacggaggggctggatttgtttctcaggcaatcctgtattttaattttagatgtatttcctgaagcatatttttcatagaatgtagcgtgtaaatagctttttaaataacttcttttttataagagtaaaagtatctttaggaatttctttctatagagttcttcattaacatttatacgagttttttgctgagtcagatggacagttgggttctgatgcnnnnnnnnnnnnnnnnnnnnnnnnnnnnnnnnnnnnnnnnnnnnnagaactaaggtattgcctgaaaaacaagtgatgtctgtgcagccttacactctgtctttacagaagcaaatagtacacaaaagatctatttcagacacattttgaagatgaatcttcaactttaataccagctctttgttttccttgtatgatgaggggattgggggatacagttattttactagcaccttgtgaagtgtttccgtgttttgtgatgctgtaatttattaatgtttgtagctttttatatttgtacatttcttatgagctttgtttatatacccattacctggatgtttttgtccactgggagaggcagcttggtggaggccttatccactcccacttgtcctgtttggagggaacgcagtccctagggcccgagactgggtgggagagggggagtctcacggggccccaggcttattcagaactggtgtttttaaagtttcctttaccctgcccttgttgaacatttatataatctaacctggacatcaagctgttctctctctctcttttttttaattttattattattattttggcaacatgtacatttctaacaaagtttatcgtggctattaaagtgttttatttcccaattcatattactcttgtatcgagtccatgaggtctaaggcaacttagatcaaagttttaaaaaagtaaaaatatttcaggttttgtacaa

SEQ ID NO: 354854 - DNA, 910 bp, Homo Sapiens
  misc_feature (300)..(308): n is a, c, g, or t
  misc_feature (794)..(799): n is a, c, g, or t
  misc_feature (802)..(803): n is a, c, g, or t
  misc_feature (805)..(808): n is a, c, g, or t
  misc_feature (811)..(813): n is a, c, g, or t
  misc_feature (815)..(815): n is a, c, g, or t
  misc_feature (819)..(820): n is a, c, g, or t
  misc_feature (823)..(824): n is a, c, g, or t
  misc_feature (831)..(832): n is a, c, g, or t
  misc_feature (836)..(837): n is a, c, g, or t
ggctggaccggtccggattcccgggatggcagagcgagcccagcgtggcccctcaatttgaaaatggacgtcttttctcaagttgctaagagtgatctgtcccagaaaagcggccctgcaagtttgaggaccgcttattccactttaaggacagccttcaggccccctgagcgtgggtgtgattgcagggcctctgcagctctgctgagagcatgagtccttcaaggaagaaaaagtgagccaatgcgcaccagccccagagtcagagctggccacaggctggcagcctccaggggcttnnnnnnnnnggcaaagaacacagaaagaggaggagcaagtgggatgtttatgtccccccttctcttcctgagtgattctcagccaagtccagacagtgctcggcgggtgaggaagggtctgccccgagctttctggttggcaggtggcagcaggatggtgggtgttcagcctgaatgcccaggagcatttctggggggcagctaagactggcagctgggttggtgtgttagcgggcaggggagccattgtggggtccccaggaaagggcaagggctcagccacatcttggggtctgggaggcccaggctaagccatgtggcagggaccgtcttgccctgctggctacactctggagaagcacttctcagccaaggcacccctgccctgggactggcagggcaggggcaggggcagggacagtggccaggcggcccgagggacttacgggtcgggcacttctctgtcccgactggtccgacaggtcacgtcttttnnnnnnggnncnnnnggnnncnaaannggnnggggggnntttnnagatttcccggttccccaaaggcttccattttcagggccccctccaagtccctccaccagttccgggtttcct

SEQ ID NO: 354855 - DNA, 912 bp, Homo Sapiens
  misc_feature (29)..(29): n is a, c, g, or t
  misc_feature (41)..(41): n is a, c, g, or t
aaaggaggcattcctgaaggcttgcaccncttgctcggagnaatgcagacgtcttcctgaaatacctgcacaggaacaagcgtgaacatgccaggaatggtgacgcacatcaaagctcctgaacagcaagtgaaaaatatcttgaatgaactcttccaacgggagaacagggtattgcattactggaccatgaggaagagacggctggaccagtgtcagcagtacgtggtctttgagaggagtgccaagcaggctttggaatggatccatgacaatggcgagttctacctttccacacacacctccacgggctccagtatacagcacacccaggagctcctgaaagagcacgaggagttccagataactgcaaagcaaaccaaagagagagtgaagctattgatacagctggctgatggcttttgtgaaaaagggcatgcccatgcggcagagataaaaaaatgtgttactgctgtggataagaggtacagagatttctctctgcggatggagaagtacaggacctctttggaaaaagccctggggatttcttcagattccaacaaatcgagtaaaagtctccagctagatatcattccagccagtatccctggctcagaggtgaaacttcgagatgctgctcatgaacttaatgaagagaagcggaaatctgcccgcaggaaagagttcataatggctgagctcattcaaactgaaaaggcttatgtaagagacctccgggaatgtatggatacgtacctgtgggaaattgaccagtggctgtggaagagattccaccgtggcatcgtaaacaaagaactcatcatcttcggaaacatgcaagaaatctacgaatttcataataacatattcctaaaggagctggaaaaactatgaacagttgccagagga

SEQ ID NO: 354856 - DNA, 518 bp, Homo Sapiens
tgtttccacagggctcagaagtggagtcaagtcgccactgtgtttcaggtttctggcagtcggattcatttgcctcacaatactttcctgttgtttttcgcaggcaaaccaaagagagagtgaagctattgatacagctggctgatggctttggtgaaaaagggcatgcccatgcggcagagataaaaaaatgtgttactgctgtggataagaggtacagagatttctctctgcggatggagaagtacaggacctctttggaaaaagccctggggatttcttcagattccaacaaatcgagtaaaagtctccagctagatatcattccagccagtatccctggctcagaggtgaaacttcgagatgctgctcatgaacttaatgaagagaagcggaaatctgcccgcaggaaagagtaagccagtctttcagaatctaccaggattcactggaaaagtgaagagaatgtcatttggacagacatgcttctgtgtgtgctttgaagtcacatggcaccc

SEQ ID NO: 354857 - DNA, 423 bp, Homo Sapiens
cgtcccactcaggaaaaagcgtgtcccccagccttctcacccactgaagtccttcaactgggtgaagctgaatgaggagcgtgtccctggcaccgtatggaatgagatagatgacatgcaggtatttcggatcctggacctagaggattttgaaaaaatgttttcagcctaccagaggcaccagaaagagctgggctccactgaagacatatacctggcttcccgcaaggtcaaagagctgtcggtcattgatggccggagggcccaaaactgcatcatccttctttccaagttgaagctttctaacgaggagatccggcaggccatcttgaagatggatgagcaggaggaccttgctaaggacatgctggagcagctcctcaagttcatcccagagaagagtgacattgacccactggatga

SEQ ID NO: 354858 - DNA, 1029 bp, Homo Sapiens
  misc_feature (57)..(57): n is a, c, g, or t
  misc_feature (71)..(71): n is a, c, g, or t
  misc_feature (73)..(112): n is a, c, g, or t
  misc_feature (551)..(565): n is a, c, g, or t
cttttagctccgtaattgggaacctttgacctgatctaaagtggactttgtagcaanaagaggagcatcancnnnnnnnnnnnnnnnnnnnnnnnnnnnnnnnnnnnnnnnnaccctttgtggattttctttgcctttgtgtttgatgccgtcgtgtgggaaaagtcaactccgatgccaccattgcgggccggacgaaggatgctttcttcctagaggctccgagctgagctgcgaactcgccccccgcccttgggacaagaagacccagtcacatcactgcacccgtcctgtgtcctcaccattgctatgcaaagtgattcttgttgtacataagatttaaataatgcacctatttaagacatgttgacaaattgcgggtctgggacccgcctcttatttatgaagtctttgaccgtcccccccgcccgaccccaccgccctcccgcccccacctggcgtgtagtactgtataaaccagtcagctgtcgggttagtggtagtattattgttatttttttaaaggaaacaaacagacaacaaaaagaagnnnnnnnnnnnnnnncctccttggaaaaattaattgctttttcgtaatggattctctatgctaatgctctctcgtctgtctgtctgtctgcccactcccccacccaccactgtgcgtttctgatttccaaatgtctccaactccctcacgaggtggggctcaggctggaggaggagggattaagatccccttgctccactaaggcccaagctctttctctcggcaccttttagacttgaatgggaggctgctaacccgccctctccagtccaccccggtaaaagagctgttccccacccccagggagctcctgtccctgtcagcctttgctgtcccctgtccccaacggagactctgtcacccctgggctccccctgccatcgtgtgcttcacgtggccccatgcatgcccgcctctctgcatggtctcttgggaaaagagagatgtgtcgcctccgcaccccaagggtggccaggtac

SEQ ID NO: 354859 - DNA, 1092 bp, Homo Sapiens
agcgggaaggtccccggcttcgtggctagccggggtcctagcgctggaaaggtggccgtagcggccgcctgacccatacaaaagtctgggacaggggcagcgacaaaggccttgggaggacgcccatggtcggagggatctcgccccgggagaaaagttgggacaggagcgcgggatcgaagggtggactccgagccggcctgtcaggcaagagccgggcaggtgcggtggcggaagtgcagggacggaggccgaagcggagcggtctagggagccgcggccgcgggtcacccggcgggtagcagttgctgagtgtcagctagacagcagcgactagggctcgggcgccggcgagatgcctttgttcaccgccaaccccttcgagcaagacgtggaaaaagccacgaatgagtacaacactacagaagattggagtcttattatggacatatgtgacaaagttggaagtactcctaatggagcgaaagattgcctaaaagccataatgaaaagggtaaatcataaggttccacatgttgctctgcaagcactaactcttcttggggcttgtgtggcaaactgtggaaagatatttcatttagaagtatgttcccgtgaattttgcaacagaagtacgtgctgtgattaaaaataaggcacatcctaaagtatgtgaaaaactgaaatctttaatggtggagtggtcagaagaatttcagaaggaccctcagtttagtctgatatctgcaactattaaatctatgaaagaagaaggaattacttttcctccagcaggttctcagactgtctcagctgctgccaagaatggtacgtcatcgaacaaaaacaaagaggatgaagacatagctaaagctattgaattatcgctgcaagaacagaaacagcaacacacagaaacaaaatccttatatccatcttcagaaattcagttaaataataaggttgcacggaaagtgagagctttatatgattttgaagctgttgaggacaatgaacttcacctttaaaacatggtgaattattattgttttgggtgacagtgatgccattggtgggaaaggggaaaatcac

SEQ ID NO: 354860 - DNA, 334 bp, Homo Sapiens
  misc_feature (43)..(43): n is a, c, g, or t
atttctgcttctgagcctagccctgaaaattcagattatcatnccttacgtgaattcctcaaaaaaattatttaatccttccatgtcaacttttccctatattatcagccatcctttccttctctaaggtcttaggaaaagagacatccctggatactctccaaggataacctatctggataccacttctttccattttctttggtatcataatgactccttcaatatcttcaactatacctcccctgactttgacccggatcccatctcgttacattttcatttttttctaccattcatgattgaatagttagttcatgtcacctttatttcc

SEQ ID NO: 354861 - DNA, 468 bp, Homo Sapiens
  misc_feature (436)..(436): n is a, c, g, or t
  misc_feature (450)..(450): n is a, c, g, or t
tttttgagtaatgaattcatttaatataaactttagtatagcagaatactacaggttacccacatttaaccctaaaaacaaacaaatgacaggcacttcagtgaaataacaagcccatgttcaaatataaaatgctaaaagtgagaaagaaattatcgaaaatatatacctttaatttgcagacatataaacacttttggtacagtacagatgcatgatgccaaaaagtaaaatgatccagtttaagctaacacattccttgtttatacagattattttgctatagctctcatataaaataatatttccagctcacacaatgaatttgaaagtgataaatcactcgatgaaatagctttcttcattggcaagagattcagtaaaagctaaattatcaaagaaatctgctgcagggcttacaaataaactgttgganttaatccaaaaccnaagaaaggaagccagaaa

SEQ ID NO: 354862 - DNA, 1099 bp, Homo Sapiens
ggcagtgttactgcggtgaccgccagagcagcctcgacgctatggaggagcctggtgctacccctcagccctacctggggctggtcctggaggagctacgcagagttgtggcagcactacctgagagtatgagaccagatgagaatccttatggttttccatcggaactggtggtatgtgcagctgttattggattttttgttgttctcctttttttgtggagaagttttagatcggttaggagtcggctttacgtgggaagagagcaaaaacttggtgcaacgctttctggactaattgaagaaaaatgtaaactacttgaaaagtttagccttattcaaaaagagtatgaaggctatgaagtagagtcatctttagaggatgccagctttgagaaggcggcagcagaagaagcacgaagtttggaggcaacctgtgaaaagctgaacaggtccaattctgaacttgaggatgaaatcctctgtctagaaaaagacttaaaagaagagaaatctaaacattctcaacaagatgaattgatggcggatatttcaaaaagtatacagtctctagaagatgagtcaaaatccctcaaatcacaaatagctgaagccaaaatcatctgcaagacatttaaaatgagtgaagaacgacgggctatagcaataaaagatgctttgaatgaaaattctcaacttcagacaagccataaacagctttttcagcaagaagctgaagtatggaaaggagaagtgagtggacttaataaacagaaaataacatttgaagactccaaagtacacgcagaccaagttctgaatgataaagaaaatcacatcaagaccctgactggacccttgcccatgattgaagatcaggctgctgtgcttgaacaagaaccaccggatgatgataaccttgaatttaaaagtggacagtccaatgggaaaatggtgctaacttaaatgatcctccgaaagggacctttgaagaaactgattccgtgctgcctaagtaaaatgtttcctttaaaaagcttaaaagggaaaagaaacccccttattattcccgtatcctggaagtggcacaacaacaggaa

SEQ ID NO: 354863 - DNA, 1078 bp, Homo Sapiens
taaccaccacgcaagaaaaacaacgaagctggtaccggtccggaattcccgggatttcgggttccggaccgaaggctgtgtgttctccgccgtttattgtggccccgacaggccggggttactgtggcgaccacgagagcagctttggcgctatggaggagcccggggctacccctcaaccgtatttggggctgctcctggaggagctacgcagggttgtggcagcactgcctgaaggtatgagaccagattctaatctttatggttttccatgggaattggtgatatgtgcagctgttgttggattttttgctgttctcttttttttgtggagaagttttagatcggttaggagtcggctttatgtgggacgagagaaaaagcttgctctaatgctttctggactaattgaagaaaaaagtaaactacttgaaaaatttagccttgttcaaaaagagtatgaaggctatgaagtagagtcatctttaaaggatgccagctttgagaaggaggcaacagaagcacaaagtttggaggcaacctgtgaaaagctgaacaggtccaattctgaacttgaggatgaaatactctgtctagaaaaagagttaaaagaagagaaatccaaacattctgaacaagatgaattgatggcggatatttcaaaaaggatacagtctctagaagatgagtcaaaatccctcaaatcacaagtagctgaagccaaaatgaccttcaagatatttcaaatgaatgaagaacgactgaagatagcaataaaagatgccttgaatgaaacattctcaacttcaggaaaagccagaaacaggttgtgcgagaaagctgaagtatgggaaaggaacacgtgagtgaactttaataaaccggaaaggtcaccctttgggagaactcccaagttcgatgcgaacaagttcctaatgatacaggcaaggtccctcagaatctggacggaaggctgtttaaagaatgaaacatgggcgccaatgctgtggaaaaccatacggagtatgataacgggcattgaatgacgggggatggcaaagggcccatagataaccca

SEQ ID NO: 354864 - DNA, 728 bp, Homo Sapiens
gagattacatctagacactaaaggattagctggaccactaaatgagtttcagaactcgtcagtggaagatgatgatgatgttgtttttatcgaacctgtacaacctcccccaccttctgtaccagtggtagctgatcaaagaaccataacatttacatcatcaaaaaatgaagaactacaaggaaatgattccaaaattactccttcctcaaaagagttggcatctcagaagggaagtgtaagtgagacaattgtcattgatgatgaagaggacatggaaacaaatcaagggcaagagaaaaattcctccaattttattgaacgaagacctcctgagactaaaaacagaaccaatgatgtggatttctccacttccagtttttcaagaagtaaggtaaatgcaggaatgggtaatagtggtatcaccacagaaccagactctgaaattcagattgctaatgttacaactttagaaacaggtgtaagctctgtgaatgatggccaattagaaaatactgacgggcgagatatgaacttaatgattacacatgtaacatcactgcagaataccaacttgggagatgtctctaacggactgcagtcaagtaattgtgggtgttaatatacaaacatacaccccatctttaacttcacagaccaagactggagtaggaccttttaatcctggtagaatgaatgtggcaggagacgtttttcagaatggagaa

SEQ ID NO: 354865 - DNA, 584 bp, Homo Sapiens
  misc_feature (54)..(54): n is a, c, g, or t
  misc_feature (493)..(493): n is a, c, g, or t
  misc_feature (498)..(498): n is a, c, g, or t
  misc_feature (522)..(522): n is a, c, g, or t
  misc_feature (530)..(530): n is a, c, g, or t
  misc_feature (559)..(559): n is a, c, g, or t
agtgagttttgaagcctttaagccaaattccttttaaaaaaattccttgtattncctagcattccctagatattaaaagttaagccaaatagattaatgacgtatacataggcatcatttcacaaggtcagtaatgctgcaggaaaagcaaaattgcaatctacgtatctatggtactaaggaagtcctgtttttcaaaaatggaagcccacttctcagatttttctgaagggcatacaatgaaaagtgaaggggaaacacacacacgcaaaaaaacaagtatttggcttgtcacaggaatctgattgcattaagtgaaaggattatttagaatatgttaatgcaaagctaaaataaaattttccttggcaattaaaaatgctgtgcgctaataccctgctttctatcgtgactgcaattcaacaatgtggggcgaatgtttactacatttcccaacttggatgttcaaggcatggggggattacaagttccngtttntgccaaagatttcgttcaactttncttaggcntccaaggggagagggctggaggaattgcnggagagggattaaggacattaaatt

SEQ ID NO: 354866 - DNA, 1727 bp, Homo Sapiens
  misc_feature (638)..(655): n is a, c, g, or t
  misc_feature (1674)..(1674): n is a, c, g, or t
  misc_feature (1684)..(1685): n is a, c, g, or t
taccggtccggaattcccgggataaatgattgatggcgagcccccctacttcaatgagcctcccctccaggcgatgcggaggatccgggacagtttacctccaagagtgaaggacctacacaaggtttcttcagtgctccggggattcctagacttgatgttggtgagggagccctctcagagagcaacagcccaggaactcctcggacatccattcttaaaactagcaggtccaccgtcttgcatcgtccccctcatgagacaatacaggcatcactgagcagaggattcgtgtaggtggcaaagctagatgaggacatgagaataattcaggagaacaaaaggaaacacagaacatgcaaaaggcctgtgcattctagaccagccaattggtgggacagcgtgatgaccggcagggttcaacagaccagggcatcttcttgtgtcttaaacaggcatctctccactgacagccggtgtggtcacttggagcacggctttaataagtcattattatatttttcagcccttcatccagcaaatcagaaggactcagtacaaactccgttatgatatatcctagccacatgcagggtaacatgtaggattttctatattgaaagaatacttttctggcnnnnnnnnnnnnnnnnnngaaagaaaggaaaacaaaaagcacttttttcttaatggtagcagtataatgtattttgcaacgaatttgtaatttttctgtacgatagttttgataatttatagtactttgatgtcatgtagccattgtatcagttgaagtaatacttgtttactagaggagtttgaacaaagcctttcctacttttttatccctttaagagaaccaatgattctttaggaactttgaatactgaatgactctcaatcaccgtcagctttagtaaaatctctttcttatcctaacaagtgtcttatttggtggaagaagaattaagagtgatggtgatggtgtgcacgtttcattaatccaaccaaaaataatgaaataaaatttgagccacagtataccactccttgggataaagttaaatatttttaaagatcacattttccatgaacgcctctagtagcaaaccattcttttgcacaccacaatgtttccctcagtgccctttctcaaatgggtacaatgttcccttgtggccaaatttccctcccagggagcaatttcagtgctaggatcattggattcagttcccaaaatagaatgtttcagtgagaccatgagaattccagggctcacaaagggagaggagagaacagggcaagacgtttggtttcatttgtcaccatttttaaaactctgtatgctagcacaccaaactcttgtctatatttacctttgtaccacagtattaatcgctattgttcatgtatcgtgctggaagtctgaactgactctagaggatgaattagcaagagggtattttaccaggtatgatctgacttcagttgtgcccaatgttataatgtggttccgacataggagagtcgtgctgctgtctagatctttcttgaatgttgataaaaatgaatgactactacaatacatttttgcgttgctttgttgaatgaatttgcatgttaactgtaagccaatataaatttgcctttaaaactctggaagagctacatagncatcattagnntctatttattatgcatcagacacaagccatttgttaccaaat

SEQ ID NO: 354867 - DNA, 292 bp, Homo Sapiens
  misc_feature (176)..(184): n is a, c, g, or t
acttctacatagtcctggttaaattaatacaatctgtctcatgaacatttaggactgccattttctggatttagattgtttttattctcacatatttatattaatactttaatattttacataaaaattgtaagtataggactatgaagaaagccattatgagaattcctgttacnnnnnnnnnggttcatggtacatttgaaaccaaaacatacccaatatctagtcatattaaaattacttttatctctctctctcttaatttggagaaaatagtattttgtgggaaaat

SEQ ID NO: 354868 - DNA, 619 bp, Homo Sapiens
  misc_feature (12)..(12): n is a, c, g, or t
  misc_feature (54)..(54): n is a, c, g, or t
catttccacatncctgtaaacaaatatgaatttaaaatttgtgatagcgcctcnggttgcccctaagccataattaagaatttttgtaattaataggttgcctaattatttatcactgcctaaaaaggaaaaaaggcataaaatgaccttctactgattagattttcagttttctttcaaactggaaatgcctccataaatatgatctatgattttgcttcataaaacagcaaatcaatgttttatgtaaaatattaaagcattaatataaatatgtgagaataaaaaacaatctaaatccagaaaatggcagtccctaaatgttcatgagacagattgtattaatttaacccggactatgtagaagtagaaagaaaagaaaaagaaaatcttttttaaaccagaataaacattaaaaactattgcagaaaatagtggattttggattccaaacattttcgacagtgtaatggaaatttttctgtaattttcttaccatcgggtattttttaaagtattcattgagtttaccaaaagttactgtagcttaaaaggttttgtgagcactaactattggcagaaactgcatttgcaaataaaaataaatgtttgccttttc

SEQ ID NO: 354869 - DNA, 1008 bp, Homo Sapiens
  misc_feature (845)..(846): n is a, c, g, or t
  misc_feature (925)..(925): n is a, c, g, or t
  misc_feature (962)..(962): n is a, c, g, or t
  misc_feature (977)..(977): n is a, c, g, or t
cgagtctccatggcggtggcggcggcagctgcggcgggacccgtgttctggaggcgactgctgggcctcctgcctggccgcccagggctggccgcgctcctgggacgcctgtccgaccgcctcggcaggaaccgggaccgccagcgcaggaggtcaccatggctgttattggctcccttgctgtccccagctgttccccaggtcacctccccaccttgctgcctgtgtccagaaggcgtgcaccggttccagtggatcagaaacctggttccagaatttggagtctccagttctcacgttagggtgctttcttccccggcagagtttttcgagctcatgaaggggcagataagagtagccaagaggcgggtcgtgatggcatccctctacctggggacaggtcctttggaacaggagctggtggactgcctggaaagtactctagaaaagtcactccaagcaaagtttccttcaaatctcaaggtctccattctcttagacttcacgcggggctcacgaggccggaagaactcccgcacaatgctgctcccactcctgcggaggttcccagagcaggtccgagtctccctctttcacacgccgcacctccgtgggctgcttcggctcctcatccctgagcgcttcaacgagaccatcggcctccagcacattaaggtgtacctcttcgacaacagcgtcatcttgagcggtgcaaacctgagtgactcctacttcaaccaaccgccaggaccgctacgtgttcctgcaggactgtgcggagattgccgacttcttcacggagctggtggacgcggtgggggatgtgtccctgcagctgcaggtgnnacgacacggtgcaggtggtggatgggatggttgcatccttaacaaagggggaccggggccgagttacttgcaaggcagnccaattaaggaggggttcatggatgttgattcaactncagccagggacccgnccagcagatggttgcattgcccagacttttt

SEQ ID NO: 354870 - DNA, 682 bp, Homo Sapiens
  misc_feature (82)..(82): n is a, c, g, or t
  misc_feature (209)..(209): n is a, c, g, or t
  misc_feature (229)..(229): n is a, c, g, or t
  misc_feature (259)..(259): n is a, c, g, or t
  misc_feature (413)..(413): n is a, c, g, or t
  misc_feature (418)..(549): n is a, c, g, or t
atgttctaagaagtattatttattctatgctgagcttacatagaatttcttccatgttttctatagctatagtgtatttttnccttttactgttagatctatttcatgtttttattatggataatggaggaggtaaaggttgaattatattttcccccatattattgacccatagtgacaccagttttgggagatgtctttcattttcncccttacgttgttattggcnccttttgcaaaaatcaattatttatcatgngtatacttctgaaatgatctgtttcatcaatctatttgtcttctcagtagttccacattgtcttaattatagctttagaggaagtcttgaaatttggtagtaagtcttccagttttgttattttaacaaatttctctaggctgggcatggtggntcatnnnnnnnnnnnnnnnnnnnnnnnnnnnnnnnnnnnnnnnnnnnnnnnnnnnnnnnnnnnnnnnnnnnnnnnnnnnnnnnnnnnnnnnnnnnnnnnnnnnnnnnnnnnnnnnnnnnnnnnnnnnnnnnnnnnnacccatctgtagtcctaactgctcaggaggctgaggtgggaggattgcttgagtccaggagttcaaggctgcagtgagttgtgatcacaccattgcagtccagccaggatgacagaatgagaccctgtctctt

SEQ ID NO: 354871 - DNA, 837 bp, Homo Sapiens
  misc_feature (169)..(195): n is a, c, g, or t
  misc_feature (679)..(786): n is a, c, g, or t
ggggactctagcagagatccaagctgagatatggcacaaggcaggctggggctgataccagctgagacggtgaaggattccacagccagcctgtattagcagctagagcgatggacaggcgggaggggcctgtctgtccaggtctgctgcagaggtcttaggtgaaggnnnnnnnnnnnnnnnnnnnnnnnnnnnggtcagctcagatcaagagtgctcggcgggcacggccacatcctccggtcagacaccgtctgcacctccagccccgattttaactgagtatacttcaagtcagtgaactctgtgtaaagaacgagacagagcaaaaggatgtttttggccaatgagaacacagtgccccgcagcctgctggtgagaaccacccagtgccccccagcctgcagcaagtccctggactcctttaagttgtgaccgtagcttctgaggcgcgggtgctgtgggtcagaagctattgccgggcctgccatgcacagctgttttcaggtacttctgtctcggtcagtacattaagtgtgaaggggatttttaaaagttcatctccagctgcaaagaacagctggactgctgccatcttgctaaatgacaaatgcgcgcaatagattcacgtgttttccacaatcaactcttagattctatatcccagctgggcacagtnnnnnnnnnnnnnnnnnnnnnnnnnnnnnnnnnnnnnnnnnnnnnnnnnnnnnnnnnnnnnnnnnnnnnnnnnnnnnnnnnnnnnnnnnnnnnnnnnnnnnnnnnnnnatgacggagtgagacctcttctcaaaaaaaagattctatacccaaaagtct

SEQ ID NO: 354872 - DNA, 490 bp, Homo Sapiens
gctccctcccccgagcgcacagcccgcctccttccgcggcgcctgcagtggcaggcttgctctgccctaccgtgacgcgctccggagacgctctgcgggtcctggacaccgggtccgcggcgtggggacgacagacggaggcgaacgccatcggtagccggtccgcgagccatcgttcggggcgcagtcctctccccggctggccctcctttctccggggcattcgccaccgcttccctgggctgagacgaccggttcgtcgcctccttgcccgtgaccgtcgctagaactcagttgtgcgttgcggccagtcgccactgctgtaagtttcccccactgccccggacctgttgcaggcgctgcgggcttcaggggctgcttcggctgcaggggtgtgttcgcgaggggtgagcgtgctccgagcactcgggagcttcgactagagggcaaggggagctcttctcggtgcggagatcacggtgcccgccgc

SEQ ID NO: 354873 - DNA, 693 bp, Homo Sapiens
agcgggctgactgctctggcagccggagaggaggcggtgcggcggtggcgctgcggagacccggtccagacgcctggcggccgccggcacacaaggcgctttctagctccctcccccgagcgcacagcccgcctccttccgcggcgcctgcagtggcaggcttgctctgccctaccgtgacgcgctccggagacgctctgcgggtcctggacaccgggtccgcggcgtggggacgacagacggaggcgaacgccatcggtagccggtccgcgagccatcgttcggggcgcagtcctctccccggctggccctcctttctccggggcattcgccaccgcttccctgggctgagacgaccggttcgtcgcctccttgcccgtgaccgtcgctagaactcagttgtgcgttgcggccagtcgccactgctgagtggaagcaaaatgtcagtcagtgtgcatgagaaccgcaagtccagggccagcagcggctccattaacatctatctgtttcacaagtcctcctacgctgacagcgtcctcactcacctgaatcttttacgccagcagcgtctcttcactgacgtccttctccatgccggaaataggaccttcccttgccaccgggcagtgctggctgcatgcagtcgctactttgaggccatgttcagtggtggcctgaaagagaaggccagga

SEQ ID NO: 354874 - DNA, 430 bp, Homo Sapiens
  misc_feature (212)..(212): n is a, c, g, or t
  misc_feature (376)..(376): n is a, c, g, or t
  misc_feature (394)..(394): n is a, c, g, or t
ggggcattcgccaccgcttccctgggctgagacgaccggttcgtcgcctccttgcccgtgaccgtcgctagaactcagttgtgcgttgcggccagtcgccactgctgagtggaagcaaaatgtcagtcagtgtgcatgagaaccgcaagtccagggccagcagcggctccattaacatctatctgtttcacaagtcctcctacgctgacagntcctcactcacctgaatcttttacgccagcagcgtctcttcactgacgtccttctccatgccggaaatagggaccttcccttgccaccgggcaggtgctgggctgcatgcagtcggtactttgagggccatgtttcagtgggggggcctggaaaggggaggccnggggcagtgagggtcaanttttggacaatttcccttccacccaggagtttttgg

SEQ ID NO: 354875 - DNA, 248 bp, Homo Sapiens
  misc_feature (20)..(20): n is a, c, g, or t
  misc_feature (103)..(103): n is a, c, g, or t
tgaatgtttgcaagttatancctaaaaaaacaaagacaggccacctaaatgtttgaaatgacatgaaaggaattatccagatttttgaacacctactaaaagnctgtttttaatcatccaaaattacatcagtattcagtttatgaaagtatacctacatactgcttgaatctataatccaattttacttgttctggcatctcagcatgtagacttaaaataaatgactattattattatcactatta

SEQ ID NO: 354876 - DNA, 636 bp, Homo Sapiens
aaacgtgtgcttgatgccacagacttcaagcagttaccaacgaactcactgtttaaaagctgttaaatctcattaaaacagtagacgagtgcttaagattctctgaatatcaaataatatatccagatagacactgagacatgacagtaactctgaatcagtgataaaattgttaatttgcaaaagagtacagttttaagcaagaatagagtgaaaataatttttaaatatggcgatttgggggagttctacctaaggttctatgtaaagcttccattcagatgcccaaaagcacaaagagcattcccaatagaaacccgaccataacccggtcccaccttcctggcataattcctttcctcaaacatctgccacctgaggctaagcctacacacggcgtggctgagtaacagggtaagggaatagggagatcgtttcctcaagactggtgcgcatcaatctgtgccataatttaagtagaaatgaacaggtgtataaaaaagtataactgtacacagcctttaaattaaaaacctcaaaatcttcactcaaaatgggatgtaagcttgttcatttaagttgcaggtgatggactcgtcagagagagtaatcagtggaacaagatcagtgtaaccc

SEQ ID NO: 354877 - DNA, 2667 bp, Homo Sapiens
  misc_feature (2603)..(2603): n is a, c, g, or t
  misc_feature (2608)..(2608): n is a, c, g, or t
atcaggccaaatcggccgagctcgaattcgtctgagagcgtgggtgcggtcgcggctggcggcagaagcggccgcaggggtctgggcagggactgggcagtgctgccggagcaaaagcggtagcgggagcccggccggagctgggtctggagacgccgtggcagcctgaacggagtgtgcgacggattgggaggtttgtctacagattttgagcgttcgaagttgacccctgactaagtatactttgctgctccctcagcctttgaaaaaatgtctgtcacatatgatgattccgttggagtagaagtgtccagcgacagcttctgggaggtcgggaactacaagcggactgtgaagcggatcgacgatggccaccgcctgtgcagcgacctcatgaactgcctgcatgagcgggcgcgcatcgagaaggcgtatgcgcagcagctcactgagtgggcccggcgctggaggcagctcgtggagaaagggccccagtacgggaccgtggagaaggcctggatggccttcatgtccgaggcagagagggtgagcgagctgcacctcgaggtgaaggcctcactgatgaacgatgacttcgagaagatcaagaactggcagaaggaagcctttcacaagcagatgatgggcggcttcaaggagaccaaggaagctgaggacggctttcggaaggcacagaagccctgggccaagaagctgaaagaggtagaagcagcaaagaaagcccaccatgcagcgtgcaaagaggagaagctggctatctcacgagaagccaacagcaaggcagacccatccctcaaccctgaacagctcaagaaattgcaagacaaaatagaaaagtgcaagcaagatgttcttaagaccaaagagaagtatgagaagtccctgaaggaactcgaccagggcacaccccagtacatggagaacatggagcaggtgtttgagcagtgccagcagttcgaggagaaacgccttcgcttcttccgggaggttctgctggaggttcagaagcacctagacctgtccaatgtggctggctacaaagccatttaccatgacctggagcagagcatcagagcagctgatgcagtggaggacctgaggtggttccgagccaatcacgggccgggcatggccatgaactggccgcagtttgaggagtggtccgcagacctgaatcgaaccctcagccggagagagaagaagaaggccactgacggcgtcaccctgacgggcatcaaccagacaggcgaccagtctctgccgagtaagcccagcagcacccttaatgtcccgagcaaccccgcccagtctgcgcagtcacagtccagctacaaccccttcgaggatgaggacgacacgggcagcaccgtcagtgagaaggacgacactaaggccaaaaatgtgagcagctacgagaagacccagagctatcccaccgactggtcagacgatgagtctaacaaccccttctcctccacggatgccaatggggactcgaatccattcgacgacgacgccacctcggggacggaagtgcgagtccgggccctgtatgactatgaggggcaggagcatgatgagctgagcttcaaggctggggatgagctgaccaagatggaggacgaggatgagcagggctggtgcaagggacgcttggacaacgggcaagttggcctatacccggcaaattatgtggaggcgatccagtgatgagtcggggacaggccagcggggggacggaggcggcgggcccaggagcctcagccagccacgtgggcatccactccttttcctgcaagagatgatggttccattgctcttggcttcatggtgttcctggaaggcagatgagctggtcatttcgcctgggactcggcacctttccgagtgcagctggagggatctgagcgcaggaagacgcagaacaacagaaatagccgcccctccccgcccactgtgcctgttggcctatcatagatctctatgttcttgactttgtctctcctttccgagtcaatggtgggttacactgatcttgttccactgattactctctctgacgagtccatcacctgcaacttaaatgaacaagcttacatcccattttgagtgaagattttgaggtttttaatttaaaggctgtgtacagttatacttttttatacacctgttcatttctacttaaattatggcacagattgatgcgcaccagtcttgaggaaacgatctccctattcccttaccctgttactcagccacgccgtgtgtaggcttagcctcaggtggcagatgtttgaggaaaggaattatgccaggaaggtgggaccgggttatggtcgggtttctattgggaatgctctttgtgcttttgggcatctgaatggaagctttacatagaaccttaggtagaactcccccaaatcgccatatttaaaaattattttcactctattcttgcttaaaactgtactcttttgcaaattaacaattttatcacttgatttcagagttaaaaaggagaactaaccttttcaaggcaaatgcatcctggtaaaggatgcttttaggattaggactgttcntgttntcagtgttctattccgtattattattattttggatatttcaggggattctaaaggcact

SEQ ID NO: 354878 - DNA, 1787 bp, Homo Sapiens
  misc_feature (1632)..(1640): n is a, c, g, or t
cctgggtggcgatttcggcacgagggttggagagtgcagagtatatctacctccctggaggtgtgaagactaggtttttcttcttccttccaattagattttccttaattatagtgatgtcttccttattcatttttctctccctgcctctcactgccataagaatatcagcctgggggcagtccagacgcagccctttgtcatcctttctgtttgcctagtctcagcagactgtgatcacaaggcattgtctgtgggatttttcctttccctttcttgatctctcttgtggttctaggttgtttggttgttcattgttatggtggctttttattttaacgccccttgagccccatgatggctggtgtcaccctgttcctttacactgttgggccaggtgctgcttgtccttcttagggcatcatcaattgcaaatatttccttttgctccctttatgaagatgttcttatacccttgctttcccatatttttctggccaagcatgccatctcctttactctgggaacttacatcctgaatcccaagagggggtcacagtttggaaaaagtcatcagggattctggaactaagtctgataaaagattccagtgaagccctgttctgagaacgagcagactgcaggggaggccatgggattccccaggccagtgtctgtgctgatccttcaaggggtctgcaggtaatgcaggtggcctgggctgctcggcagatactttgctgattcccagctgaggggagcatggtggcgattgctcagccattttctgacagacacacagacctgccttttctcccccaagtataccgtaccctcctgtgagacagtgtgtgcaggcaccaccaccttaatcctgctgttgcctgacatgctgattctcatttattatgctgcatcaacacattagaggtacaggagcggctcagtcatgaaaaaagaaggtcttttgccccatttctttatttcagagatgtgggctttcagtgggaatttgctgactcctactttataggctgagtcaatgagggaagatgactggcgtttcctctgtctaaatgggaggttgccacagcgctggctgggactaggatgtgtaactaagatttcagtttgaaatcttagatttcagttcacggcgataaagaagtaggtgctgcacacaaatatgtaaagcaattgtaggaaatttgaaaggaaaaaaagaaaccgaagccagtattttaataattgctttttctgtgtattttgtattgggctgggggatagcatcaaaggttgaactttttgagctttctatgaaaaaccccaggaccttctttctttggccatttctatggaaatgcgatgtcagatggatggtaatggtgccctccagtggctgtgagacctcattgcgcattgtctactggagctttagtcttctgagacggaggaaaactgctgaatactctggattcatctatgtctacaatgttgcatttatgaaaaactacactgtgctaggcgcattctaggacatgaatatgaccacaccctctttcaccgggtgtttctgtagcaagttttcatattcttttcaaacaatggtttctctgcgttaattattgaggnnnnnnnnngatggggtaagaaaactacccatgcatgatgtagagagctgttgatttgtttctgtttttttaaaggaaaactatttgtaagatgttgcactaaaacattttatatacacttcagagacctgtagtaaattatgttgaaaataaaaa

SEQ ID NO: 354879 - DNA, 1137 bp, Homo Sapiens
agcccactttgccatttgaagctgtgctcaagaatttgtttccctcccagggcactctcgggcccccaccctgtcagcctcctcctggctatgcccctgtgcccccacagccttttagctcccccttgtcccccctggtcccaccagccaccctcttggtgccgtatcctgtaatcgtccccttgcctgtgccagtccctattcccatccccatcccggtgcctcagagttctgaatccaagttcagctccagtttccccaagccaccatcttccttcggcctgcacccctttaaaggcacccagacccctctggaaaaagatgaactgaagccctttgacatcctccagcctaaggagtacttccagctcagccgccacacggtcattaagatgggaagtgagaacgaggccctggatctctccatgaagtcagtgccctggctcaaggctggtgaagtcagtccaccaatcttccaggaagatgcagccctagacctgtcagtggcagcccaccggaaatccgagcctccccctgagacactgtatgacagtggtgcatcagtggacagctcaggtcacacagtgatggagaaacttcccagtggcatggaaatttcttttgcccctgccacgtcccatgaggccccagccatgatggatagtcacatcagcagcagtgatgctgctaccgagatgctcagccagcccaaccaccccagcggcgaagtcaaggctgaaaataacattgagatggtgggcgagtcccaggcggccaaggtcattgtctctgtcgaagatgctgtgcctaccatattctgtggcaagatcaaaagccctctcagggggtgtccaccaaaaacttctccttcaaaagagaagactccgtgcttcagggctatgacatcaacagccaaggggaagagtccatgggaaatgcagagccccttaggaaacccatcaaaaaccggagcataaagttaaagaaagtgaactcccaggaaatacacatgctcccaatcaaaaaacaacggctggccaccttttttccaagaaagtaaataacggctttttaaaatttgtatgattataatatggggaaaggtgcattggttttataaaaaggcatttaaaacaa

SEQ ID NO: 354880 - DNA, 462 bp, Homo Sapiens
  misc_feature (118)..(162): n is a, c, g, or t
aacagcttctactacaagccctggggcactcacccctgtgatcaagcaatcattgtcaatgcaaattttatttttggctgctcgggtaactttagcccttaaccaagcatatgtgggnnnnnnnnnnnnnnnnnnnnnnnnnnnnnnnnnnnnnnnnnnnnngggtacagctgtaaaatatttggatataggaaatgttgtgttattcttgcagccttgatattcagggtggattgtaaaatataaatttttgtgagatttcaaagattaagattattttgataacattatttacagatttaaaagatgtggttatcacaagtctcgagggggaaactactgcataaaataactaacttggaataaatattttgcatcagtttggattgtcttgtgtaagaagtatattttctttaaaattagatgagtggattcttttttaggggaaatatttttagaagt

SEQ ID NO: 354881 - DNA, 341 bp, Homo Sapiens
  misc_feature (254)..(254): n is a, c, g, or t
  misc_feature (267)..(267): n is a, c, g, or t
tgagctggtccaacctcggacagtgggagtggataggctccacagctgcctctcccagtggacaaaaacatccaggtaatgggtaaaaaaaccaagtcagcagaagaaattagaggagagaccagttaataaatgtagtgatcaaataaagctaaaaaataccactgacaaaaagaataatgaaaatcgagagtctgaaaagaaaggacagagaacaagtacatttcaaataaatggaaaagataataaacccnaaatatatttganaggtgaatgcttgaaagaaatttctgagagtagagtagtaagtggtaatgttgaaccaaaggttaataatataa

SEQ ID NO: 354882 - DNA, 2571 bp, Homo Sapiens
gaggcggctgtggcgcaggcttccagcccccaccatgccgtggcccctgctgctgctgctggccgtgagtggggcccagacaacccggccatgcttccccgggtgccaatgcgaggtggagaccttcggccttttcgacagcttcagcctgactcgggtggattgtagcggcctgggcccccacatcatgccggtgcccatccctctggacacagcccacttggacctgtcctccaaccggctggagatggtgaatgagtcagtgttggcggggccgggctacacgacgttggctggcctggatctcagccacaacctgctcacacagcatctcacccactgccttctcccgccttcgctacctggagtcgcttgacctcagccacaatggcctgacagccctgccagccgagagcttcaccagctcacccctgagcgacgtgaaccttagccacaaccagctccgggaggtctcagtgtctgccttcacgacgcacagtcagggccgggcactacacgtggacctctcccacaacctcattcaccgcctcgtgccccaccccacgagggccggcctgcctgcgcccaccattcagagcctgaacctggcctggaaccggctccatgccgtgcccaacctccgagacttgcccctgcgctacctgagcctggatgggaaccctctagctgtcattggtccgggtgccttcgcggggctgggaggccttacacacctgtctctggccagcctgcagaggctccctgagctggcgcccagtggcttccgtgagctaccgggcctgcaggtcctggacctgtcgggcaaccccaagcttaactgggcaggagctgaggtgttttcaggcctgagctccctgcaggagctgggacctttcgggcaccaacctggtgcccttgcctgaggcgctgctcctccacctcccggcactgcagagcgtcagcgtgggccaggatgtgcggtgccggcgcctggtgcgggagggcacctacccccggaggcctggctccagccccaaggtggccctgcactgcgtagacacccgggaatctgctgccaggggccccaccatcttgtgacaaatggtgtggcccagggccacataacagactgctgtcctgggctgcctcaggtcccgagtaacttatgttcaatgtgccaacaccagtggggagcccgcaggcctatgtggcagcgtcaccacaggagttgtgggcctaggagaggctttggacctgggagccacacctaggagcaaagtctcacccctttgtctacgttgcttccccaaaccatgagcagagggacttcgatgccaaaccagactcgggtcccctcctgcttcccttccccacttatcccccaagtgccttccctcatgcctgggccggcctgacccgcaatgggcagagggtgggtgggaccccctgctgcagggcagagttcaggtccactgggctgagtgtccccttgggcccatggcccagtcactcaggggcgagtttcttttctaacatagccctttctttgccatgaggccatgaggcccgcttcatccttttctatttccctagaaccttaatggtagaaggaattgcaaagaatcaagtccacccttctcatgtgacagatggggaaactgaggccttgagaaagaaaaaggctaatctaagttcctgcgggcagtggcatgactggagcacagcctcctgcctcccagcccggacccaatgcactttcttgtctcctctaataagccccaccctccccgcctgggctccccttgctgcccttgcctgttccccattagcacaggagtagcagcagcaggacaggcaagagcctcacaagtgggactctgggcctctgaccagctgtgcggcatgggctaagtcactctgcccttcggagcctctggaagcttagggcacattggttccagcctagccagtttctcaccctgggttggggtcccccagcatccagactggaaacctacccattttcccctgagcatcctctagatgctgccccaaggagttgctgcagttctggagcctcatctggctgggatctccaaggggcctcctggattcagtccccactggccctgagcacgacagcccttcttaccctcccaggaatgccgtgaaaggagacaaggtctgcccgacccatgtctatgcttctacccccagggtagcatctcagcttccgaaccctgggctgtttccttagtcttcattttataaaagttgttgcctttttaacggagtgtcactttcaaccggcctcccctacccctgctggccggggatggagacatgtcatttgtaaaagcagaaaaaggttgcatttgttcacttttgtaatattgtcctgggcctgtgttggggtgttgggggaagctgggcatcagtggccacatgggcatcaggggctggccccacagagaccccacagggcagtgagctctgtcttcccccacctgcctagcccatcatctatctaaccggtccttgatttaataaacactataaaaagtaaaaaaa

SEQ ID NO: 354883 - DNA, 627 bp, Homo Sapiens
  misc_feature (510)..(510): n is a, c, g, or t
agtcagcctggtgtagctctggcttgatgtcctgttctgccattctgcttcaaaccctggcattctgtgtcaagccctcctgggtctgttggcccactgtgagcatcctcgctaaggacagctacttgcattttcagttgcaccttcccacataacagtgactaattccgtacaaaacggtacaccaaacgagatatattaaagtaacagcatttcagcagctacagtgactctgtgtgctgacttcagcagccctctgaaaggccccttccataagctgggaaagtatgatcatggtttcatcatccttgttggttattacttcaaggttgaccaatctgaaagctctgtgtgaagaaggggactgagtggctgtgaatgatgagaccgttgtttaaaagccaggcttagcctgaggtccgaaagaagcaacctcaatgctgtgcatttaccatagcaccacctgcaggtatccaggaatagagaacccagctgagcgactcatgcttnaccaaaaatacccagagcagtgtgtctctacctttttaagcccatgctcactagtggggaaaacaattttacccccctgtatttaaatatggggatttcaaggcaaacaaaagcatt

SEQ ID NO: 354884 - DNA, 698 bp, Homo Sapiens
tatcagcgagagggatcatcgtggcactacacgtgctacacagtcaatgtcgcctgcatccatctcatcagcagtaaacgtacgggcctcttctacgtgtgggacgaggagagcatcttccctcacgccacgagccagaccttgctggccagttcaaacagcaacatgaggacaataagtacttcatgggcaccccggtcatggagccagctttcatcatccagcacttcgcagggaaggtgaaatatcagatcaaggacttccgggagaagaacatggactacatgcggccagacatcgtggccctgctgcggggcagtgacagctcctacgtgcgggagctcatcggcatggaccccgtggccgtgttccgatgaggccgtgctccgggctgctatccgggccatggcagtgcttcgggaggccggacgcctgcgggccgagagggccgaaaaggctgcaggtatgagcagccctggtgcccaaagtcacccagaagagctgccaagaggagccagcaccccttcggaaaaactttaccgcgatttgcataaccaaatgatcaagagcatcaaaggattgccctggcagggcgaggacccccgtagccttctccagtccctcagtcggatccagaaaccccgcgccttcatcctgaaaagtaaaggtatcaaaaaaaagcagatcaatccaaaggt

SEQ ID NO: 354885 - DNA, 855 bp, Homo Sapiens
  misc_feature (662)..(703): n is a, c, g, or t
ggcctgagtggcgaattcggcacgaggcggacgccggcattcgccgcgtggttcccagcgacctgtatcccctcgtgctcggcttcctgcgcgataaccaactctcagaggtggccaataagttcgccaaagcgacaggagctacacagcaggatgccaatgcctcttccctcttagacatctatagcttctggctcaagtctgccaaggtcccagagcgaaagttacaggcaaatggaccagtggctaagaaagctaagaagaaggcctcatccagtgacagtgaggacagcagcgaggaggaggaggaagttcaagggcctccagcaaagaaggctgctgtacctgccaagcgagtcggtctgcctcctgggaaggctgcagccaaagcatcagagagtagcagcagtgaagagtccagtgatgatgatgatgaggaggaccaaaagaaacagcctgtccagaagggagttaagccccaagccaaggcagccaaagctcctcctaagaaggccaagagctctgattctgattctgactcaagctccgaggatgagccaccaaagaaccagaagccaaagataacacctgtgacagttaaagctcagactaaagcccctcccaaaccagctcgagcagcacctaaaatagccaatggtaannnnnnnnnnnnnnnnnnnnnnnnnnnnnnnnnnnnnnnnnntgatgactcagaggaagagaaggcagcagccacccccaagaagactgtacctaaaaagcaagttgtggccaaggccccagtgaaagcagctaccacccctacccggaagagttctagcagtgaggattcctccagtgacgaggaagaggagc

SEQ ID NO: 354886 - DNA, 861 bp, Homo Sapiens
  misc_feature (668)..(709): n is a, c, g, or t
agcgggtagtgacgcgtattgcctggaggatggcggacgccggcattcgccgcgtggttcccagcgacctgtatcccctcgtgctcggcttcctgcgcgataaccaactctcagaggtggccaataagttcgccaaagcgacaggagctacacagcaggatgccaatgcctcttccctcttagacatctatagcttctggctcaagtctgccaaggtcccagagcgaaagttacaggcaaatggaccagtggctaagaaagctaagaagaaggcctcatccagtgacagtgaggacagcagcgaggaggaggaggaagttcaagggcctccagcaaagaaggctgctgtacctgccaagcgagtcggtctgcctcctgggaaggctgcagccaaagcatcagagagtagcagcagtgaagagtccagtgatgatgatgatgaggaggaccaaaagaaacagcctgtccagaagggagttaagccccaagccaaggcagccaaagctcctcctaagaaggccaagagctctgattctgattctgactcaagctccgaggatgagccaccaaagaaccagaagccaaagataacacctgtgacagttaaagctcagactaaagcccctcccaaaccagctcgagcagcacctaaaatagccaatggtaannnnnnnnnnnnnnnnnnnnnnnnnnnnnnnnnnnnnnnnnntgatgactcagaggaggagaaggcagcagccacccccaagaagactgtacctaaaaagcaagttgtggccaaggccccagtgaaagcagctaccacccctacccggaagagttctagcagtgaggattcctccagtgacgaggaagaggagc

SEQ ID NO: 354887 - DNA, 958 bp, Homo Sapiens
ggagcgaggcctgggtggcgaattcggcacgagggagcggctctcggtgcagcgggacagggcgaagcggcctgcgcccacggagcgcgcgacactgcccggaagggaccgccacccttgccccctcagctgcccactcgtgatttccagcggcctccgcgcgcgcacgatgccctcggccaccagccacagcgggagcggcagcaagtcgtccggaccgccaccgccgtcgggttcctccgggagtgaggcggccgcgggagccggggccgccgcgccggcttctcagcaccccgcaaccggcaccggcgctgtccagaccgaggccatgaagcagattctcggggtgatcgacaagaaacttcggaacctggagaagaaaaagggtaagcttgatgattaccaggaacgaatgaacaaaggggaaaggcttaatcaagatcagctggatgccgtttctaagtaccaggaagtcacaaataatttggagtttgcaaaagaattacagaggagtttcatggcactaagtcaagatattcagaaaacaataaagaagacagcacgtcgggagcagcttatgagagaagaagctgaacagaaacgtttaaaaactgtacttgagctacagtatgttttggacaaattgggagatgatgaagtgcggactgacctgaaacaaggtttgaatggagtgccaatattgtccgaagaggagttgtcattgttggatgaattctataagctagtagaccctgaacgggacatgagcttgaggttgaatgaacagtatgaacatgcctccattcacctgtgggacctgctggaagggaaagaaaaacctgtatgtggaaacaccctataaagttctaaagggaaattgttgaagcgtgttttttccagtcaaactaactttgacagcaccccacaaaccaccaaaaatggggcctgttggtgaaag

SEQ ID NO: 354888 - DNA, 1906 bp, Homo Sapiens
  misc_feature (33)..(33): n is a, c, g, or t
  misc_feature (35)..(35): n is a, c, g, or t
  misc_feature (1209)..(1299): n is a, c, g, or t
  misc_feature (1331)..(1489): n is a, c, g, or t
  misc_feature (1530)..(1845): n is a, c, g, or t
cgtagtcgcacagggacatgcatggtcagagcngnagaatagcggggcactcggacgctcctaccgacggctgtgctggactgtgatcacgactgtataacatacatttatatcgaatgttactggaatcagtgccaacagtcggccgaggctcgaagtacgtcgaagatgcggggcgtctcggccgctcgtcctgtcatccttgactggccgtcgttttacaatcctcccgctttcttctctctccttgcggtctgaagatgccctcggccaccagccacagcgggagcggcagcaagtcgtccggaccgccaccgccgtcgggttcctccgggagtgaggcggccgcgggagccggggccgccgcgccggcttctcagcaccccgcaaccggcaccggcgctgtccagaccgaggccatgaagcagattctcggggtgatcgacaagaaacttcggaacctggagaagaaaaagggtaagcttgatgattaccaggaacgaatgaacaaaggggaaaggcttaatcaagatcagctggatgccgtttctaagtaccaggaagtcacaaataatttggagtttgcaaaagaattacagaggagtttcatggcactaagtcaagatattcagaaaacaataaagaagacagcacgtcgggagcagcttatgagagaagaagctgaacagaaacgtttaaaaactgtacttgagctacagtatgttttggacaaattgggagatgatgaagtgcggactgacctgaaacaaggtttgaatggagtgccaatattgtccgaagaggagttgtcattgttggatgaattctataagctagtagaccctgaacgggacatgagcttgaggttgaatgaacagtatgaacatgcctccattcacctgtgggacctgctggaagggaaggaaaaacctgtatgtggaaccacctataaagttctaaaggaaattgttgagcgtgtttttcagtcaaactactttgacagcacccacaaccaccagaatgggctgtgtgaggaagaagaggcagcctcagcacctgcagttgaagaccaggtacctgaagctgaaacctgagccagcagaagagtacactgagcaacagcgaagctgaatcaaccgagcatgtaaatagaccgcccatgccacaaacacccttcaccagcggcgaaaaggagcacgccgatgagtnnnnnnnnnnnnnnnnnnnnnnnnnnnnnnnnnnnnnnnnnnnnnnnnnnnnnnnnnnnnnnnnnnnnnnnnnnnnnnnnnnnnnnnnnnntttcgactccggctcggtttccgcgacctatnnnnnnnnnnnnnnnnnnnnnnnnnnnnnnnnnnnnnnnnnnnnnnnnnnnnnnnnnnnnnnnnnnnnnnnnnnnnnnnnnnnnnnnnnnnnnnnnnnnnnnnnnnnnnnnnnnnnnnnnnnnnnnnnnnnnnnnnnnnnnnnnnnnnnnnnnnnnnnngcctgttcccccgccacccgcctccgctcgtcctcacccgnnnnnnnnnnnnnnnnnnnnnnnnnnnnnnnnnnnnnnnnnnnnnnnnnnnnnnnnnnnnnnnnnnnnnnnnnnnnnnnnnnnnnnnnnnnnnnnnnnnnnnnnnnnnnnnnnnnnnnnnnnnnnnnnnnnnnnnnnnnnnnnnnnnnnnnnnnnnnnnnnnnnnnnnnnnnnnnnnnnnnnnnnnnnnnnnnnnnnnnnnnnnnnnnnnnnnnnnnnnnnnnnnnnnnnnnnnnnnnnnnnnnnnnnnnnnnnnnnnnnnnnnnnnnnnnnnnnnnnnnnnnnnnnnnnnnnnnnnnnnnnnnnnnnnnnnnnnngcgccgccttaactcgccccgccgcgcctcccaatcctcgtccccaccggcgccgccgcgc

SEQ ID NO: 354889 - DNA, 618 bp, Homo Sapiens
gggtgcttaaatatacgtactatactgacaaaatacatggaagtgagttataatgaggcagaaacaaaatcctcggtaacattgatgatactctaccgatcaccgtggttttggaaagtcagtcaacagttgtattattgcacctcaatttcattgtgacattttatttaacttcttcatcttggtggtccttgcccagttattttgcctcattagacatcaagaaatggagaaagactgaaagttaatatcttaagtgcttgttcttcatgtttccttcttgttatttatgctattctctttgtggctccattcttctttcaatcttctcagcttataaccgtctttcccttatgctaaggatagcccttacactcatcccatctatgctgtcaagggctgctggttggtgctggtacaaggagcccactcagcagttttcttacctttgcctgccctgcctttcatggaataagaaaggcaacgttttgcagcttccaaatttctgaagaaactaatctcagattggcagttaaagtcaaaatgttgccaaatatttattccttttgcctaagtttggctacccggttcaattgctttttattttaaatgtctgac

SEQ ID NO: 354890 - DNA, 563 bp, Homo Sapiens
ggatggcaattaatcgctacagttgtgtctgctcaccaggatttcacaggccagagatgtaacattgacattgatgagtgtgcccccaatccctgtcgcaagggtgcaactatgtatcaacggtgtgaatggtttccgctgtatatgccccgagggaccccatcaccccagctgctacccacaggtgaacgaatgcctgagcaatccctgcatccatggaaactgtactggaggtctcagtggatataagtgtctctgtgatgcaggctgggttggcatcaactgtgaagtggacaaaaatgattgcctttcgaatccatgccagaatggaggaacttgtgacaatctggtgaatggatacaggtgtacttgcaagaagggctttaaaggctataactgccaggtgaatattgatgaatgtgcctcaaatccatgcctgaaccaaggaacctgctttgatgacataagtggctacacttgccactgtgtgctgccatacacaggcaagaattgtcagacagtattggctccctgttccccaaacccttgtgagaatgctgctg

SEQ ID NO: 354891 - DNA, 496 bp, Homo Sapiens
ggaccttgtacaccttccttcacagaggcaacgaccttgtcacttaatttttcgatctgatcatgaagtaatctgttttgtttctccagatcttcacagcgacatacacatttggaaacttcatcctttaacattctctctctttcctcccaagatgctttacactccaacaactgtgattctgctttctgtgttgtttcttccaaatgctgacggactgatgccatttttgaaacctgctccttcgcagcttgtagagcttcaacatcagcagcatgcagcatcaattctctctcatacttattctgagcttccacagctattttagcttgttcctgacagtcacgtctggcttgctgctcattacttaaagctgtgcttgctctctgaagagcttcttggactttattctgaacactagaaagtgttttcttcaattcagaaaactgttgttccatgctctctaggaagggctcttctttgcactttagtgtct

SEQ ID NO: 354892 - DNA, 1588 bp, Homo Sapiens
  misc_feature (720)..(766): n is a, c, g, or t
gaacatctgctgcagcagtgccgcctggtggagcggatcctgacgtcctgggaggagaacgaccgtgtacagtgtgcgggaggccctcggaaaggctacatgggtcacctgacaagagtggccggtgccctggtgcagaacacggagaaggggcccaatgcagagcagctgcggcagctgctgaaggagctgcccagcgagcagcaggagcagtgggaagccttcgtatcggggcccctggcggagaccaacaagaagaacatggtggacctggtgaacacccaccacctacactcctccagtgacgatgaggacgaccggctcaaggagttcaacttccctgaggaggctgtgctgcagcaggccttcatggacttccagatgcagcgcatgacctctgccttcattgaccacttcggcttcaatgatgaggagtttggggagcaggaggagagtgtgaacgcaccttttgacaagacagccaacatcaccttctccctcaatgctgacgatgagaaccccaacgccaacctacttgagatatgctacaaggaccgcatccagcagtttgatgatgatgaggaagaggaggacgaggaagaggcccagggctcaggggagtctgatggagaagatggcgcctgccagggcaaccagctggccaggggggcccgtctgggccagccacctggtgtccggagtggaggcagcacagacagnnnnnnnnnnnnnnnnnnnnnnnnnnnnnnnnnnnnnnnnnnnnnnngcattggctgtgcagcccgtggaggggccacccctctgtcctaccccagccctggccctcagcctccaggccccagctggacagccacctttgacccagtgcctacagatgccccgaccagcccccgagtctccggggaggaagagctgcacactgggcctccagccccacaggggcccctcagtgtgccccagggcctccccactcagagcctggccagccctcctgcccgtgacgccctgcagctcaggtctcaggaccccacacccccctcagcacctcaggaagccacagaaggcagcaaagtcacggagccctcagccccttgccaggccttggttagcatcggggaccttcaggccaccttccacgggatccgttctgcccccagctcctcggacagtgcaaccagagacccctctacctctgtcccagcctccggggcccaccagcccccccagaccacagaaggggagaagagcccagagcccttggggcttccccaaagccagagtgcccaggccctcacgcctcctccgatacccaatggctctgccccggaagggcctgcatccccaggctcccaatagctgcctggtgcggcagcggcggccaaatcttccgtcctcccgtggattcccggggtggggggcagggcgggtcccacgatggcccccattgccctcatcagccctgacacccccacattctctcctctggacccccaagaggctggtgcacagggagacaggcccaacccacccccatttgcactggagaagagaagcatgtggggagaagctgtgcgccgagaagcttacg

SEQ ID NO: 354893 - DNA, 441 bp, Homo Sapiens
  misc_feature (427)..(427): n is a, c, g, or t
cgcaggcagggctgtcttggtcctctattcggattagtctaattaattatgtccagatgacatcacagaccatgctagagaagcacaactcctcgcactgacagcagccactatgctgcctaggctaacaggacttctctgctccaagacgaggggtgggtaggggcacccgcagaagccacccagtgggcaatgtaacacatttgccgtgaaggaaacaagagcaagctaattctaatacaaatattaaagaaataagggcaaagatgaaatacaagtaacaggaaaataactttggggaaaaggtcagtggatataaatcttagaaataaatgctttttgtgattttcagatgagtgggaaatggcaaacaaagtaactttattatgccatttgatactaatacaactaacaagtagaaaaaaanacaaaagtatacca

SEQ ID NO: 354894 - DNA, 935 bp, Homo Sapiens
  misc_feature (846)..(846): n is a, c, g, or t
  misc_feature (880)..(880): n is a, c, g, or t
  misc_feature (895)..(895): n is a, c, g, or t
cccccgccgcctcgccaccgccgcggctagggctggaggcgccgctgtcattcctgtgccggaggaaccggcgctgccggtgcctgggggtcggggcgcgggcgaagccgggccgcggaggacacaacaggtagagccgggggtgcccggccgcgcgccccccgcgcatcatgcagctctttgtcacctctctcgcccccaggccaaaatcctgagcatgatggaagacaataagcagctcgcgctccgcatcgatggggcggtccagtcggccagccaggaggtgaccaacctgcgagccgaactcacggccaccaaccggagactggcggaactgagcggcggcggcggccccggcccgggcccgggagccgcggccagcgcctcggcggcgggggactcggcggcgacgaacatggagaacccccagcttggagcgcaagtgctcctgcgggaagaagtgtcgcggctccaggaggaagttcaccttctccggcagatgaaggagatgttggcgaaggacctggaggagtcgcagggcggcaagtcctctgaggtcctctcggccaccgagctcagggtccagctggcccagaaggagcaggagctagccagagccaaagaagccttgcaggccatgaaagctgatcggaagcgcttaaagggcgagaagacagacctggtgagccagatgcagcagctgtatgccacactggagagccgcgaggagcagctccgagacttcatccgcaactatgagcagcaccgcaaggagagcgaggatgcggtcaaagcgctggccaaggagaaggacctgctggagcgtgagaagtgggagctgcggcncaagcaaggaggcacagaccacgcacggcactgngtcccagctggactnaaggacaaccggatgaagagctggaggcgagctggcatgg

SEQ ID NO: 354895 - DNA, 1062 bp, Homo Sapiens
  misc_feature (737)..(737): n is a, c, g, or t
  misc_feature (841)..(841): n is a, c, g, or t
cggtccggaattcccgggatctcttctgggacccagccatgagtgtggagctgagcaactgaacctgaaactcttccactgtgagtcaaggaggcttttccgcacatgaaggacgctgagcgggaaggactcctctctgcctgcagttgtagcgagtggaccagcaccaggggctctctagactgcccctcctccatcgccttccctgcctctccaggacagagcagccacgtctgcacacctcgccctctttacactcagttttcagagcacgtttctcctatttcctgcgggttgcagcgcctacttgaacttactcagaccacctacttctctagcagcactgggcgtccctttcagcaagacgatggctgtgctcaggcagctggcgctcctcctctggaagaactacaccctgcagaagcggaaggtcctggtgacggtcctggaactcttacctgccatatgcttgttttcttgggatcctcatcgtggctccgcgttgaagattcagtctggaaaatgtgcccaacgccaccatctacccgggccagtccatccaggagctgcctctgttcttcaccttccctccgccaggagacacctgggagcttgcctacatcccttctcacagtgactgctgccaagaccgtcactgagacagtgcgcagggcacttgtgatcaacatgcgagtgcgcggctttccctccgagaaggactttgaggactacattangtacgacaactgctcgtccagcgtgctggccgccgtggtcttcgagcaccccttccaacacagcaaggagcccctgccgctgggcggggaatatcacctacggntcagttaccacacgaggaattacatgttggaccccaacagggctccttttttcctgaaaagagacagaaaggttggaccacctactttccctttttcccggcttttttcccaaaacccaggaaccaaggggaaacctaacattcccccctgaatgggcgggaagaaccctggggtggaaaaaaacatcccgggttaaagggggtttccgggggtttaaccc

SEQ ID NO: 354896 - DNA, 1131 bp, Homo Sapiens
  misc_feature (26)..(27): n is a, c, g, or t
  misc_feature (171)..(171): n is a, c, g, or t
  misc_feature (246)..(246): n is a, c, g, or t
ctttggcccggggcccagaatcccannttggccactctccgggggttttttctcataggaggtgggtaataggtgcctgtaaaattagtaggccagcttggttctcccgaaatgaaagaggggtgctcttgggtggcaataggtgtcatagatggggcggggaagcccagnaatgggggcagtagaaggagcccaaccaagcaactgtcaatgctcagctccacgagagagaagtccttgaagctnggtgtcagtcatcaggacgtacttctcattgggaatgctctcccaggataagcacaggtgactggtccacagtgtgccacaagggcctcgatgagacacccacaaagtactggggcatcaggttgaagagctcctctcccacagtgaattggatgttattgtcccggtctctcttcaggaagccgttgatattcatctggaaccttttatctggaatgaaggtccccaggccattgctgctgatgtccacacgcatgaccacactgcctttcttgatgggcatgggcgtgtaccagctcatgctacacacttcttctgccatgcatggctctttgctgcggaagggggcagcctccatctggatctgcagctgctctatcttccagcggtagaagttgactggggactggaaggtgaccagcaccaggggctttagccccgtcaggtggcccatgcgcaccaggtcctcagagggcttttcctcgcaggagtagttgatcttcaggtagtaagggaagcccaggtatttctcgctcgggtcgatgggtgagtccaccagcatgtgaaacaagctgctcactgtgtccacgggctcttgctcaaagaagctgtcgctcacaccactctcgcctaccctcttaaactcgttcaggacaacctgccaggtgcattcctggaaatccttgatcgcccacagcctccacgacgccaggagcactgccagcagggcccacagcacctgcacgactcggactctgggccacggaggaccggcagggaacatggctgggccgcacataacgtggctagaaccagtcacttggttaaaaccggtcaactgtcactcggccgcaccagtcccgcccctcttgcccggtctcaaaa

SEQ ID NO: 354897 - DNA, 863 bp, Homo Sapiens
ccatgtcaactacctggagcacgtcgttgtgcgcatcaccatcacccaccccaggagaggagacctggccatctacctgacctcgccctctggaactaggtctcagcttttggccaacaggctatttgatcactccatggaaggattcaaaaactgggagttcatgaccattcattgctggggagaaagagctgctggtgactgggtccttgaagtttatgatactccctctcagctaaggaactttaagactccaggtaaattgaaagaatggtctttggtcctctacggcacctccgtgcagccatattcaccaaccaatgaatttccgaaagtggaacggttccgctatagccgagttgaagaccccacagacgactatggcacagaggattatgcaggtccctgcgaccctgagtgcagtgaggttggctgtgacgggccaggaccagaccactgcaatgactgtttgcactactactacaagctgaaaaacaataccaggatctgtgtctccagctgcccccctggccactaccacgccgacaagaagcgctgcaggaagtgtgcccccaactgtgagtcctgctttgggagccatggtgaccaatgcatgtcctgcaaatatggatactttctgaatgaagaaaccaacagctgtgttactcactgccctgatgggtcatatcaggataccaagaaaaatctttgccggaaatgcagtgaaaactgcaagacatgtactgaaattccataactgtacagaatgtaagggatgggttaagccctgcaaggaatccccggtgtttctgtcctcctgttgaaagatgggacgggtattttcaacgggcccaggaactgcc

SEQ ID NO: 354898 - DNA, 946 bp, Homo Sapiens
  misc_feature (23)..(23): n is a, c, g, or t
  misc_feature (35)..(35): n is a, c, g, or t
  misc_feature (47)..(47): n is a, c, g, or t
  misc_feature (90)..(91): n is a, c, g, or t
  misc_feature (808)..(845): n is a, c, g, or t
  misc_feature (855)..(898): n is a, c, g, or t
ggccagcgatctgtgtctccagntgcccccctggncactaccacgcncacaagaagcgctgcaggaagtgtgcccccaactgtgagtccnnctttgggagccatggtgaccaatgcatgtcctgcaaatatggatactttctgaatgaagaaaccaacagctgtgttactcactgccctgatgggtcatatcaggataccaagaaaaatctttgccggaaatgcagtgaaaactgaagacatgtactgaattccataactgtacagaatgtagggatgggttaaccctgcagggatcccggtgctctgtctcctgtgaagactggacggtattccaacggccaggactgccagccctgcccaccgcttctgcgccaacttgtgctggggcaggagctgatgggtgcattaactgcacagagggctacttccatgggaggatgggaagatgcgtgcagagctgtagtatcagctattactttgaccactcttcagagaatggatacaaatcctgcaaaaaatgtgatatcagttgtttgaccgtgcaatggcccaggattcaagaactgtacaagctgccctagtgggtatctcttagacttaggaatgtgtcaaatgggagccatttgcaaggatgcaacggaagagtcctgggcggaaggaggcttctgtatgcttgtgaaaaagaacaatctgtgccaacggaaggttcttcaacaactttgctgcaaaacatgtacatttcaaggctgagcagccatcttagatttctttgttcctgtagacttatagattattccatattattnnnnnnnnnnnnnnnnnnnnnnnnnnnnnnnnnnnnnngcaagccacnnnnnnnnnnnnnnnnnnnnnnnnnnnnnnnnnnnnnnnnnnnnaagtttgtgcagggagatggtgaactgttttgtcagaacttaaatgga

SEQ ID NO: 354899 - DNA, 1229 bp, Homo Sapiens
ggccctatgcccacgaggataggccaaagacaagcaggcggtgtcaggccaggctgccaagaaaaagagcgcggagggcccgagtaccaccaagccagacgacaaggagcaaagcaaagagatgaacaataaacaggctgaggcgaaagagagcctggctcaacccgtcagtgattcaagtaagactcaaggtcctgtagccacagagccagacaaggatcaaggttctgtggtcccaggccttctgaaaggtcaaggtcctatggtgcaagagcctctgaagaagcaaggttctgtggtcccagggcctccaaaggatctaggtcccatgatcccattaccagtcaaggatcaagatcacacggtccctgagcctttaaagaatgaaagccctgttatctcagcaccagtcaaggaccaaggtccctcggtcccagttcctccaaagaatcaaagtcctatgcttccagcagaaagtcaaggatcaaggctctgtggtaccagagtctcgtacagaggatcaacggtcctatggattcctgagccgtgtgaaggaatcaaagcgtcctagtggtcccatggcatcctgtcaaggatgaatggtcccatggatctcagcaatctgtcaaggatctagaggtcccatggtctcagcaccttgtcaatggatcaatggtcccaatagtcaccagtcacctgtcaaagggtgaacggtcccatagatccctagcacctgtcaacggatgagaggtccctatggtgctcagcgacctatcaaggagtcaagatcccatggtcccagagtcgatccgcaaggatgaacagtgcgcatgggcacagcacccataaagaatcaaagttccatggtctctgagcctgtaaagaatcgaaagtttacgtggtctcagggcccacgtcacaggatcaacgatgtggtagtcccagagcagtgcgaacaggttcacgattctgctagattgtcggcgacctgtagaggaatcacaggtcctgtggtccccgagtccgtgaagaatctaagacccccatgctcccaagtactagttaaggatcaagggcccccacagtcctacagtcgtccaaggaatcaaggtcgtatagtccctgaacctctgaagaatcgaagtgcctataagtcccagtgcctctgcaggatccacgatcctctgggtgccagtaccagcaaacggaccgagggtcctggcagtcca

SEQ ID NO: 354900 - DNA, 1573 bp, Homo Sapiens
  misc_feature (1123)..(1133): n is a, c, g, or t
ggagcgggggggcctaccggcgagcgcgagccggcggctgggccccggccggagcgggcctgggcccgggcctgggctccgggtccacctccggccccgccggactcggtgatgcggcaggattaccgagcctggaaggtgcagcggcccgagcccagctgccggccgcgcagcgaataccagccctccgacgctcccttcgagcgcgagacccagtaccagaaggacttccgcgcctggccgctgccgcgccgcggggaccacccgtggatccccaagcccgtgcagatctctgcggcctcccaggcgtcggcgcccattctcggggcgcccaagcgccggccgcagagccaggagcgctggccagtgcaggccgccgctgaggcccgggagcaggaggcggcccccggcggagcgggtggcctggcggccggaaaggcgtccggggcggacgagcgcgacacgcgacaggaaggccgggcctgcctggatggtgcgccgcgccgagggcctggggcacgagcagacgccgctgcccgcggcccaggcccaggtccaggccaccggccccgaggctggcagggggcgcgccgcggcggacgccctcaaccggcaaatccgcgaggaggtggcgagtgcagtgagcagctcctacaggaatgaattcagggcatggacggacatcaagcctgtgaaaccaataaaggccaagccccagtacaagcccccagatgataagatggttcatgagaccagctacagtgctcagttcaaaggagaggccagcaagccaacaacagctgacaataaggtcattgatcgcagaagaatacgcagcctctacagcgaacccttcaaggaacccccaaaggtggaaaaacctagtgttcagagttccaaaccaaaaaagacctcagcgagccataagcccacgaggaaggccaaagacaagcaggcggtgtcaggccaggctgccaagaaaaagagcgcggagggcccgagtaccaccaagccagacgacaaggagcaaagcaaagagatgaacaataaactggctgaggcgaaagagtaaatttccctgcactttccttttactcttctctctctctccctccccccaacnnnnnnnnnnnaaaccaacaaaccaaaaaaggccacaaaattaattagaggcttctcatctgccttggtcctgagtgttccaggagctctttggtttggcttcttttgatggaagaatcctgcttcacagactgagtggcaggcctcctcctgagggcagcccctggagcaccaggaagcgttgccgctggctgtgccctcccctggcactctgactgcatgctgatgagcaaggcaggcaggtctgagaggcgaaacgaatctcccggcagtgcttggaagtgtctgtggggtctcctcctcccagatccccaagatctgtgtcactggtcgattttgaactttaggtacatgtgttcttttcaaaaattcagagaatcgtcatgtgccacagaagctcagcctgggcttcagcaattgacaaaatttgaagaaatattaaacaaaaaaa

SEQ ID NO: 354901 - DNA, 330 bp, Homo Sapiens
  misc_feature (223)..(223): n is a, c, g, or t
  misc_feature (228)..(228): n is a, c, g, or t
  misc_feature (291)..(291): n is a, c, g, or t
  misc_feature (306)..(306): n is a, c, g, or t
  misc_feature (312)..(312): n is a, c, g, or t
acttggagaaagaaaaattagagaattccagatccttagaatgcagatcagatccagaatctcctatcaaaaaaacaagtttatctcctacttctaaacttggatactcatatagtagagatctagaccttgctaagaaaaaacatgcttccctgaggcagacggagtctaatccagatgctgatagaaccactttaaatcatgcagatcatttcatcaaaantagtncagcagcaagatgaagagcgacgtcggcagctgagagagagagctcgtcagctaatagcagangctcgatctggagtnaagatntcagaacttcccagctat

SEQ ID NO: 354902 - DNA, 569 bp, Homo Sapiens
  misc_feature (26)..(26): n is a, c, g, or t
  misc_feature (32)..(32): n is a, c, g, or t
ccagcagatggcggatggcagtcgangccaanattcgcatggacttccaggatacaggtattctggcacattcattccaaggtcatagatttttaaaaggacctggatttgaagagatggcaaatgatgagccatcagaaaacttaatttggaaaacatgtatgtagccagtgtggatattgtggcctctctcaagacacattgacactgtagacttcattcagtccagtgtgagtattttggagtaggttggatgtagattttgtttttatcgttgatttgtaccgacagaaatagacatttcatcatgtaaaattcctgttattctggaaaaacctattgttttgatcttcttgttttctgacttggaagtatcctttcaaaaaaactcttaagatatctaggtctaaaaagcacttcatgagatgctaaagctgacccactggttgaaaatgttgaccctatcctgttatttaaatgtgaacatttattgtacattcagtgagttatagtgttaatagtcttgtgctatgcagcaggtgtaaaaattaataaatatattttttaat

SEQ ID NO: 354903 - DNA, 448 bp, Homo Sapiens
  misc_feature (23)..(23): n is a, c, g, or t
  misc_feature (32)..(32): n is a, c, g, or t
  misc_feature (46)..(46): n is a, c, g, or t
gggaaaaacagtatgtaagcccntgtggatantgggggcccccccncaagaacacatggaccaccgtaagacctccattccagtccccagtgtgaagtattttgggaagtaggttggatgtagattttgtttttaaccgttgatttgtacccgacagaaatagacatttccatccatgtaaaattccctgttattctggaaaaaccctattgttttgatccttcttgttttactgacttggaagtatcctttcaaaaaaactcttaagatatctaggtctaaaaagcacttcatgagatgctaaagctgacccactggttgaaaatgttgaccctatcctgttatttaaatgtgaacatttattgtacattcagtgagttatagtgttaatagtcttgtgctatgcagcaggtgtaaaaattaataaatatattttttaataaaaaaa

SEQ ID NO: 354904 - DNA, 1158 bp, Homo Sapiens
  misc_feature (18)..(18): n is a, c, g, or t
  misc_feature (31)..(31): n is a, c, g, or t
  misc_feature (66)..(66): n is a, c, g, or t
cccagcgggttccctaanaccctcaaactgncaaagggccttccctaatttcccctcaaactgagnccctacattggcattggtgcctacaggatccaagtccacatcctctgtgtagatcaagccatatcacctctgtaaagatgacttctgtttggtcagaccagagacaattttatgacctcaaacatgaatatcagctaacaagagctctcaaatacaaacaaaaccacaacaattcaaataataagttatttttcaaatatacaagaatatccttggtattggcagacaatttcaatttgtccttcagcccaagctatggcttggaaataataatgccattatctttaaaatagcttgttaaagaaaaatctatagcaatatacacaaggatcactctgagtttacattttttctgtaactgtggtcccaaggcagttccggcgtgcaaagtggagactggtatccaggcatagcatccattgctcaggaaactatttatctgcagaaattaaatgaaaggaagcataactcaggtctatttcattgctcggagtagagggaataaaacctctggactggttgtagcaatgagctgttcgttagcaatggcctgcagaatcatgaggtggttcttgcccattcctccacgactttcagtggttttcaaataggtcatccaaaggctagactgctgaaacttgttcattttcatcctcttcgctatctgcatcagtcacatctcctagtttaggatggaatggctgcaaattatgcctctgaggctgagttacaatcttcgatggaacacaggccacgaggttgctactgagagaagctggtggcagtctagagaggctgttatgcatcatctttgacctctgcactgccacactataatctggaggttttaggtgtgtgtggggtccttcctttaggtccgctaaagaaatccccaaatatcctggaggagtgggaggtggctccctatacctatcgtccttcttgggtgaggtgacacagtacacaatcaagcccttttctgtacttgaagtgacagttttataaactgggtcagtggcatccttggggtccaagccttcagatgactcagctggggtgctctccaatactctctgtttaactgtcccatag

SEQ ID NO: 354905 - DNA, 628 bp, Homo Sapiens
  misc_feature (463)..(504): n is a, c, g, or t
  misc_feature (581)..(581): n is a, c, g, or t
  misc_feature (611)..(611): n is a, c, g, or t
gcgggtgttcagcgattgtttactacgttgaacgtgacctcaggaaaagcagttctggccgagatcccctgacaacgcaaagcaagaagtaacgtggaaggaggctccccaagctggctggccattttgctgctgtgtgtggaggtgctgtcagtggcatgcccaaacccaaagctggaagaggaataaattacaagtggtcaaggttgcatccttttgagctcaggacctgcttgtaagccgagagggttctctggccctaatctagccaagcaccatggagagaatcagtgccttcttcagctctatctgggacaccatcttgaccaaacaccaagaaggcatctacaacaccatctgcctgggagtcctcctgggcctgccactcttggtgatcatcacactcctcttcatctgttgccattgctgctggagcccaccaggcaagaggggccagcagccnnnnnnnnnnnnnnnnnnnnnnnnnnnnnnnnnnnnnnnnnncctctggttctctgctcaacccaagctttctccagatggagaagagaccatcactgcctgtttagttaggcaggaangcagaggtgtttcctttctggggctaaagnctccttctgaccacaca

SEQ ID NO: 354906 - DNA, 782 bp, Homo Sapiens
  misc_feature (726)..(726): n is a, c, g, or t
gaagagattcagaacaaaatagaggtagaagcagatgggcaaacagaagagattttggattctcaaaacttaaattcaagaaggagccctgtcccagctcaaatagctataactgtaccaaagacatggaagaaaccaaaagatcggacccgaaccactgaagagatgttagaggcagaattggagcttaaagctgaagaggagctttccattgacaaagtacttgaatctgaacaagataaaatgagccaggggtttcatcctgaaagagacccctctgacctaaaaaaagtgaaagctgtggaagaaaatggagaagaagctgagccagtacgtaatggtgctgagagtgtttctgagggtgaaggaatagatgctaattcaggctccacagatagttctggtgatggggttacatttccatttaaaccagaatcctggaagcctactgatactgaaggtaagaagcagtatgacagggagtttctgctggacttccagttcatgcctgcctgtatacaaaaaccagagggcctgcctcctatcagtgatgtggttcttgacaagatcaaccaacccaaattgccaatgcgaactctggatcctcgaattttgcctcgaggaacagactttacacccagcctttgctgattttgaaaggcagacacctgggtggaaagaggcgtaccttttttgaatgttgggtcacgaagatctcaacctggncaaagaagagaacccagaaagatcatcacagttctgtaaaagaaggtgtacacctg

SEQ ID NO: 354907 - DNA, 942 bp, Homo Sapiens
  misc_feature (272)..(322): n is a, c, g, or t
atcagaccctttaccaacaaatgaaaatgatgatgatatatgcaagaaaccctgtagtgtagcacctaatgatattccactggtttctagtactaacctaattaatgaaataaatggagttagcgaaaaattatcagccacggagagcattgtggaaatagtaaaacaggaagtattgccattgactcttgaattggagattctcgaaaatcccccagaagaaatgaaactggagtgtatcccagctcccatcaccccttccacagttcctnnnnnnnnnnnnnnnnnnnnnnnnnnnnnnnnnnnnnnnnnnnnnnnnnnngtcattgttcctgctgctgccactactgttagttctccgagtgctgccatcacagtccagagagtcctagaggaggacgagagcataagaacttgccttagtaaagatgcaaaagagattcagaacaaaatagaggtagaagcagatgggcaaacagaagagattttggattctcaaaacttaaattcaagaaggagacctgtcccagaaacatcgaatgaatgctgaaattcctagtctggtttcttcagtggtgtgtttgtgttctagtacaacctgcaaaagagttactccattgtctaaaaatgcaaatgagaatttccaaatatacaaaatgcctccaagctcaaatagctataactgtaccaaagacatggaagaaaccaaaagatcggacccgaaccactgaagagatgttagaggcagaattggagcttaaagctgaagaggagctttccattgacaaagtacttgaatctgaacaagataaaatgagccaggggtttcatcctgaaagagacccctctgacctaaaaaaagtgaaagctgtggaagaaaatggagaagaagctgagccagtacgtaatggtgctgagagtgtttctgagggtgaaggaata

SEQ ID NO: 354908 - DNA, 1222 bp, Homo Sapiens
  misc_feature (1137)..(1137): n is a, c, g, or t
ttatcgtgatgtgttacatctgcccatgccgtacccagtgccccaggagcctcagtactgtataccacagtaccgtcatagtggccctccttatgttgggcccccccaacaatatccagttcaaccaccggggccaggtcctttttatcctggaccaggacctggggacttccccaatgcttatggaacgcctttttacccaagtcagccggtgtatcagtcagcacctatcatagtgcctacgcagcaacagccgcctccagccaagagagagaaaaaaactataagaattcgggatccaaaccagggaggtaaagacataacagaggagattatgtctggaggtggcagcagaaatcctactccacccataggaagacccacgtccacacctactcctcctcagctgcccagccaggtccccgagcacagccctgtggtttatgggactgtggagagcgctcatcttgctgccagcacccctgtcactgcagctagcgaccagaagcaagaggagaagccaaaaccagatccagtgttaaagtctccttccccagtccttaggctagtcctcagtggagagaagaaagaacaagaaggccagacatctgaaactactgcaatagtatccatagcagagcttcctctgcctccatcacctaccactgtttcttctgttgctcgaagtacaattgcagcccccacctcttctgctcttagtagccaaccaatattcaccactgctatagatgacagatgtgaactctcatccccaagagaagacacaattcctatacccagcctcacatcttgcacagaaacatcagaccctttaccaacaaatgaaaatgatgatgatatatgcaagaaaccctgtagtgtagcacctaatgatattccactggtttctagtactaacctaattaatgaaataaatggagttagcgaaaaattatcagccacggagagcattgtggaaatagtaaaacaggaagtattgccattgactcttgaattggagattctcgaaaatcccccagaagaaatgaaactggagtgtatcccagctcccatcaccccttccacagttccttcctttactacaactcctccaactactccagcttctcctactcnacactccagtcattggtcctgctgctgccactactcttagttctccgagtgctccatcacagtcccagagagtctccgtcgaact

SEQ ID NO: 354909 - DNA, 505 bp, Homo Sapiens
  misc_feature (456)..(456): n is a, c, g, or t
  misc_feature (472)..(472): n is a, c, g, or t
  misc_feature (484)..(484): n is a, c, g, or t
caactgtgggacaaagtgctgttctgagctgtgccattcaaggaaccctgagacctcccattatctggaaaaggaacaatattattctaaataatttagatttggaagacatcaatgactttggagatgatgggtccttgtatattactaaggttaccacaactcacgttggcaattacacctgctatgcagatggctatgaacaagtctatcagactcacatcttccaagtgaatgtccctccagtcatccgggtgtatccagagagtcaggctaggagagccgggggtaactgccagtcttagggtgccatgcaggaggggcataccaaagccttcagcttgggctgggtttgaaggatgggaattggatatttacacccaaagcttttcccaaacaacttcacggttttcaaggcaatggggcagttgagggtttcacattaaggcattgttncgctatggaggttacngggggcttacanttgttttcgcaaggattgagt

SEQ ID NO: 354910 - DNA, 812 bp, Homo Sapiens
gcctgttggcctactggagctctacggcggccgcgcgctccaggccggtcgctccaccccccggctcccgggactgtggactccacgaccctgtcctcggccctgtccgcgccgaagcagcccgggactgcgcagcgccccgcgtgccgacatgggaaagtctctttctcatttgcctttgcattcaagcaaagaagatgcttatgatggagtcacatctgaaaacatgaggaatggactggttaatagtgaagtccataatgaagatggaagaaatggagatgtctctcagtttccatatgtggaatttacaggaagagatagtgtcacctgccctacttgtcagggaacaggaagaattcctagggggcaagaaaaccaactggtggcattgattccatatagtgatcagagattaaggccaagaagaacaaagctgtatgtgatggcttctgtgtttgtctgtctactcctttctggattggctgtgtttttccttttccctcgctctatcgacgtgaaatacattggtgtaaaatcaagcctatgtcagttatgatggtcagaagccgtacaatttatttaaatatcacaaacacactaaatataacaaacaataactattactctgtcgaaagttgaaaacatcactgcccaagttcaattttcaaaaacagttattggaaaggcacgcttaaacaacataagcattattggtccacttgatatgaaacaaattgattacacagtaacctaccgttatagcagagggaaatgagttatatgtatgatttctgtactctgatatccat

SEQ ID NO: 354911 - DNA, 1088 bp, Homo Sapiens
  misc_feature (873)..(873): n is a, c, g, or t
aattcccgggatctcgcgccgaggggctgcgagagtgaccgcggctgctccagcgctgacgccgagccatggcggacgaggagcttgaggcgctgaggagacagaggctggccgagctgcaggccaaacacggggatcctggtgatgcggcccaacaggaagcaaagcacagggaagcagaaatgagaaacagtatcttagcccaagttctggatcagtcggcccgggccaggttaagtaacttagcacttgtaaagcctgaaaaaactaaagcagtagagaattaccttatacagatggcaagatatggacaactaagtgagaaggtaagcttagacagccttgaggaactttactgttacctgctttatcaaaacatggcttcaaaaggtcagctgcatcttcactggattacagaattcttgctgactctcagaagaaattgttggagagaatagtcatacctactttaaaagagaataaattgcctttcctaaattcctctgcttcgctcctttcctggcgttgctctggaaccttgttggtgtctgtgacccaatgactgttagggtcagctagcttcaattgcccctgcactggaagcaaggtttgtcagtaacaccaattaaaatactaccagtgtaagtagaaggtgtgtttttgcagatgagaaggtgctaagatgccttgcttatgttctctgtgttgctgtaataccatgaggggtatgttgtggcaaacctggcctttgagatcaagacgaaccccaccctgccctgagaagccgtctgctaccaacacagcctaccccgaatggtcctgtcccctaaacccctcacactgagaactgcttttgtgtgggaaaaagctggnttgggttgatccttttccgagtgtgaacttaacctccttcaagggggatggttaagccttctcggggcagaaagggggggtggcctatttctggaaaccaaaaccggggggatatatggtgggttggcccccctccacctaggggaggaaaaaagggggtccttaaaataggttaagcctttccagttttccctggaggaaagcaaatttttatg

SEQ ID NO: 354912 - DNA, 800 bp, Homo Sapiens; identical to SEQ ID NO: 15515
  misc_feature (579)..(579): n is a, c, g, or t
  misc_feature (582)..(582): n is a, c, g, or t
  misc_feature (586)..(639): n is a, c, g, or t
  misc_feature (647)..(647): n is a, c, g, or t

SEQ ID NO: 354913 - DNA, 518 bp, Homo Sapiens
aaaacacacagggtgagggaattgggctaaatgacttcttacaggcccctttctgattctttaactttgaaaggcaagccatattgatccagttgttatagtgaactcatggtaatggtttgtgagaacaatagagattttcatttctatgtagatgagttggtatgagaatatatggaatttttaagggactgtttaaatctttgatttgtagactattaaatataccgtatgcataaagtaagcctttagctctaaggtaaagacgacacgttttcggtttgtgactacaaataggttaaaaatagattttaattttattaaaaatataatttaatgcaggttgtttgaagcatctgtcttcatatgatggcattagaacaccttggtataataaaaagttaccgtaatttatgattatttgaatttatccattctgaaaattaataagatctaaaactggcatgacaatcaagatttgtatttagtgaaatttaaaataaatgtaagccatagtt

SEQ ID NO: 354914 - DNA, 1144 bp, Homo Sapiens
  misc_feature (947)..(985): n is a, c, g, or t
attcagagaaaaagacacaggagttggcatttgcaacacatcaggatcccgcagaccccaaaatgcttcagatggtactccagggatctgtaggcaccacagtgaatcaggggcccttggaagttgcccagctcttttctgtctgaaatacctagtgacccaaagctcttcagacatcataataaactgcgactctgctttaaagattttactaaaaggtgtgaagatgccttaagaaaaaataagagcttaattgggccggatcaaaaggagtatcaaagggaactggagagaaactatcatcgccttaaagaggccctacagccactgatcaacagaaagatccctcagttatacaaggcagtattgcctgtcacctgccacagagattccttcagtcgaatgagccttcgcaaaatggatctctaaactgaatgcacttgttttattcatctgcaaagagccatgtattcaacatcgagtgtgaaaagatctattggaaaacaacatggaatggaattctggaaattattattcattgaagaatgcagtggccaagaaaatatcaaatgtagattgttaacgcttgagaatcatggctatggtttctaatgttctggtaacaagctgttatcttttaagacattttaatgactcaaaggtacactatacatttaccattatttataccatagctaaggttaaaaatttattcactttaagttcgtattttttaatttatattaccatttatagattcattttggaaccattttaaatgtagtaatgcttattttaaaggtactattaaatatgtgaatgtttacactaattttaccgagtgggacttcaaaatttttattattgacaatgccagagaaacaattaaaggggttgactcaagaaactagttcccacacctaaccgaattaaaattcctggatagnnnnnnnnnnnnnnnnnnnnnnnnnnnnnnnnnnnnnnnttccagcagattattcccaaaaacataaaaaaaccttttggggcggccctcgggccctccaaaaagcttttctaagaacctttcccttttgggcggcgcgggggccccataagggtaaagtggaacctgggccaaaagcggtgttccccaaagggaaaa

SEQ ID NO: 354915 - DNA, 1693 bp, Homo Sapiens
gtttttcaaactgcaaaacccttttatttttaataaaaggcctcacttccaaggagagcccagcccaggagatccccggtgaatcgtcaagcctgggtcctcggggagccggcgttcctgctgagctgatgttgtacttctgaaggcctgtgatcgctaactgcaccatgaggcaaaatgcagggtgctctcaaccagctgggggttggggttcaggctttttttcatctttcggccaaggcagacaacaacggactcatcatcccacgcgactgagtgacgcgaggcttcaaacgcaagcacgagtgtttagaatcctgcattttcaaaggctcttgcccactgggaactacatggagaggagattaagaacaacaaccaaaagaggcagggggtggggcaggcgtgaggtaggggtggggtggggatgacagtcaacacagcttggaccagaagcccatggcgcctggctccctggaaaggcacagggcacagacggatgccgcctttcttgctgggacactcctgccaccatccacagctcccccgtcactccacgttcttgtacttggtgaacaggttgtaaagaaccctcagggtggatttgaggtccaagttaaccacgtcttcaggacgagccttgggtttcttgaggcctccgtccagcatcagctcaaaggcgaaggacacattgtggaccttctgatcgaagctttccggagtcaggtagaagtggtggagaggaacaaagtagtcttccagaaggcccatgagcagaaccaggtacacgccatctgcaaactgggtctccagttccgtcacctccaaattcagcttgttcaggtgcttgttcacaaaagtgatgagagacttcttcaccacgctgagcttatccggggcgtggtcgaacagcgtgtcgaaggcatcccgctcgaaccggcccatcatcatctctgtagttgtggtcagctcctccgagatgtggctggaatgcagcaggccttcccgtttccgcacgaccaccacctgcaccgttacatgctcaggaaggcggatgggggccctgaagtgcatggccagagagaccagcaggtggaggatggccaccaggttcttcccgtgaattgagtccacgctccaccggagcgcccagcctcggggccgcagcaggtcatgtactgcttccagcaccgtctgcagcttctgtttctgccctatttcggactgtgtcacctcagccacattcagcttgcaccctgccagtttttccaagagcttctgcagcacctggccgtcatacaggtcttcctccagctgcttcacaatgatcctctcctccaccagcacgtcattaatccagtcgaggaggaccttgaccagttccttgaacttggggtcttccttggaagtggggtcaatcatcgtgcgctcctcgttctcctcgagctgggtgtcttcagggtgaacatccgccagggcgggggacatcggtgagttgatggcattcttgccttcttcctgcaggtcactcacctcgcgcgccctccgcttcctggccagggtgccgcccagcttgcccaggaacgactcgtccttcttcatcctgcggggccgcggggtgggcgagcgcggcgcggaggacatgggccgcgagtggggccggcggcgggcgcaatccggagaattccggacc

SEQ ID NO: 354916 - DNA, 950 bp, Homo Sapiens
  misc_feature (116)..(118): n is a, c, g, or t
  misc_feature (122)..(124): n is a, c, g, or t
  misc_feature (127)..(131): n is a, c, g, or t
  misc_feature (142)..(142): n is a, c, g, or t
  misc_feature (198)..(198): n is a, c, g, or t
  misc_feature (230)..(230): n is a, c, g, or t
  misc_feature (233)..(234): n is a, c, g, or t
  misc_feature (238)..(238): n is a, c, g, or t
  misc_feature (251)..(251): n is a, c, g, or t
  misc_feature (254)..(254): n is a, c, g, or t
  misc_feature (266)..(266): n is a, c, g, or t
  misc_feature (283)..(283): n is a, c, g, or t
  misc_feature (305)..(305): n is a, c, g, or t
  misc_feature (326)..(326): n is a, c, g, or t
  misc_feature (329)..(329): n is a, c, g, or t
  misc_feature (338)..(342): n is a, c, g, or t
  misc_feature (345)..(345): n is a, c, g, or t
  misc_feature (350)..(350): n is a, c, g, or t
  misc_feature (356)..(356): n is a, c, g, or t
  misc_feature (358)..(358): n is a, c, g, or t
  misc_feature (367)..(367): n is a, c, g, or t
  misc_feature (385)..(387): n is a, c, g, or t
  misc_feature (397)..(397): n is a, c, g, or t
  misc_feature (399)..(399): n is a, c, g, or t
  misc_feature (423)..(423): n is a, c, g, or t
  misc_feature (437)..(437): n is a, c, g, or t
  misc_feature (454)..(454): n is a, c, g, or t
  misc_feature (458)..(459): n is a, c, g, or t
  misc_feature (484)..(484): n is a, c, g, or t
  misc_feature (488)..(488): n is a, c, g, or t
  misc_feature (490)..(490): n is a, c, g, or t
  misc_feature (492)..(492): n is a, c, g, or t
  misc_feature (494)..(494): n is a, c, g, or t
  misc_feature (496)..(496): n is a, c, g, or t
  misc_feature (501)..(501): n is a, c, g, or t
  misc_feature (513)..(513): n is a, c, g, or t
  misc_feature (515)..(515): n is a, c, g, or t
  misc_feature (517)..(517): n is a, c, g, or t
  misc_feature (524)..(524): n is a, c, g, or t
  misc_feature (528)..(528): n is a, c, g, or t
  misc_feature (917)..(917): n is a, c, g, or t
aaagattttatataacaagacaagaaaagcaatacgcaaatttaactatcaacaagattatgcatagagagaaactgtttctattacccaagggaagagcatgaacccatgtattnnnttgnnntgnnnnngttttaaatanataaccgtacaaagcaccaccatactaaaatgatcagtgcactggccgtgggagantgctccctcagtcattttgtccccttagctcngcnntgtnttccccaatctgngtnacattaaaatanagactcagttgtttttntttttctactgtgcagttaganaaaatattcacaacaaacatnacnatatatcannnnntanttctncacaantnaccttgatncctctttaactgtcactnnnatatcataananaacattttatgacatatacaaacnaaactagccaagtnttacatacttataatanattnncccaaagaaaaaataactttatttntatntntntntnttgtntatacacatacncncncaactgnttgncacaataatatgcttcttcccatagtttaagtaaccaattaagtagtctagcccaatcctagctatatttgatctcggccataggcatcatcacatcggcgattaaataaataagtgtttcaagcaacataaacagtgtttcaaatgtaccaacacagcccaattctatcagcatgggctacaaagtgaatttgaaaatttcttaatgaatttaaagcaaatgtatcttttgttttcctctcctaaacacattacatttaactatgatactaagatatgtaaataattttgtagcacctactgctcaaactaaggaagttttagatcaaaaggaaaattaatctttttaatttttgttctgctgacatcccatactgatgacttaaagnaaaactgtctttcaactcatctccttgcttttg

SEQ ID NO: 354917 - DNA, 539 bp, Homo Sapiens
  misc_feature (25)..(25): n is a, c, g, or t
  misc_feature (355)..(377): n is a, c, g, or t
atatatatatataaagttatttttnccttgggttaatttattataagttgtaacacttggctagttttgtttgtatatgtcttaaaatgttttcttatgatatttaagtgacagttaaagaggtatcaaggtaacttgtgtagaactattctttgatatattgtcatgtttgttgtgaatattttttcttactgcacagtagaaaaataaaaacaactgagtctttattttaatgtaactcagattggggaaaacaaaacagagctaagggaacaaaatgactgagggagcactctcccacgtccagtgcactgatcattttagtatgtttgtgctttgtacggttatatatttnnnnnnnnnnnnnnnnnnnnnnntacaagggttcatgctcttccctgggtaatagaaacagttactcgctatgcataatctagttgatagttaaatttgctattgcttttcttgtcttgttatataaaatcttttcaatacaagtttagtcttaatggtaataaaacgttatggttattctcgtg

SEQ ID NO: 354918 - DNA, 1912 bp, Homo Sapiens
ggcctgggtggcgtactcagaacgaggcgcttttctccggaggtcgcgcgcccgagagcccgcgctgtccgccgccgctgcctgagtcgactctgcgccgcccgccgcgatggaggccgccgcccagttcttcgtcgagagcccggacgtggtctacggccccgaggccatcgaggcgcaatacgagtaccggacgacgcgcgtcagccgcgagggtggcgttctcaaggtgcaccccacgtccacgcgcttcaccttccggaccgcccggcaggtgccccggctcggggtcatgcttgtcggctggggcgggaacaacggctccacactcaccgccgcggtgctggccaatcgactgcgtttgtcctggcccacgcgcagcggccgcaaggaggccaactactacggctcgctgactcaggcgggcaccgtgagcctgggcctggacgccgagggccaggaggtgttcgtacccttcagcgcggtgctgcccatggtggcgcccaacgacctcgtgttcgatggctgggacatctcgtcgctgaacctggccgaggcgatgcggcgcgcgaaggtgctggactgggggctgcaggagcaactgtggccgcacatggaggccctgcggccccggccttctgtttacatccccgaattcatcgcggccaaccagagcgcgcgcgcggacaacctcatcccaggctcgcgtgcgcagcagctggagcagatccgcagggacatccgagacttccggtctagcgcggggctggacaaagtcatagtgctgtggacggcgaacacggagcgcttctgtgaggtgattccaggcctcaacgacacagccgagaacctgctgcgcaccattgagctcggtctggaggtgtcgccctccacgctcttcgccgtggccagcatcctggagggctgtgccttcctcaatgggtctccgcagaacaccctggtgcccggagctcttgagctcgcgtggcagcaccgggtttttgtgggcggagatgacttcaagtcaggccagaccaaagtcaagtccgtgcttgtggacttcctcattggctccggcctcaagaccatgtccatcgtgagttacaaccacctgggcaacaacgatggggagaacctatcggcgccattgcagttccgctctaaggaggtgtccaagagcaacgtggtggacgacatggtgcagagcaacccagtgctctatacgcccggcgaagagcctgaccactgcgtggtcatcaagtatgtgccgtacgtgggtgacagcaagcgcgcgctggatgagtatacctcggagctgatgctgggcggaaccaacacactggtgctgcacaacacgtgtgaggactcgctgctggccgcacccatcatgctggacctagcgctgctgaccgagctgtgccagcgcgtgagcttctgcactgacatggaccccgagccgcagaccttccaccccgtgctgtccctgctcagcttcctcttcaaggcgccactagtgccgcccggcagcccggtggtcaatgcgcttttccgccagcgcagctgcatcgagaacatcctcagggcctgcgtggggctcccgccacagaaccacatgctcctggaacacaaaatggagcgcccagggcccagcctcaagcgagttggacccgtggctgccacctaccctatgttgaacaagaaaggaccggtacccgctgccaccaatggctgcaccggtgatgccaatgggcatctgcaagaggagcccccaatgcccaccacctgaggccccggtcacacagtttctcggctcttcctccccgctgccccccacgaccctaccttgaaggcccccacaaataaaggcgctgccactcagccctccttccacctggggttcttggggcctgtg

SEQ ID NO: 354919 - DNA, 653 bp, Homo Sapiens
agttgctcctgcagcccccagtccagcaccttcgcgcgccgcatcgcctcggccaggttcagcgacgagatgtcccagccctgggtgggacccgtcacacgtcggccctgcccggatcctgggcccctccagaccccatctcccatcccagccccaccccggcccagggctccgcccaccatcgaacacgaggtcgttgggcgccaccatgggcagcaccgcgctgaagggtacgaacacctcctggccctcggcgtccaggcccaggctcacggtgcccgcctgagtcagcgagccgtagtagttggcctccttgcggccgctgcgcgtgggccaggacaaacgcagtcgattggccagcaccgcggcggtgagtgtggagccgttgttcccgccccagccgacaagcatgaccccgagccggggcacctgccgggcggtccggaaggtgaagcgcgtggacgtggggtgcaccttgagaacgccaccctcgcggctgacgcgcgtcgtccggtactcgtattgcgcctcgatggcctcggggccgtagaccacgtccgggctctcgacgaagaactgggcggcggcctccatcgcggcgggcggcgcagagtcgactcaggcagcggcggcggacagcgcgcgcgcccgct

SEQ ID NO: 354920 - DNA, 494 bp, Homo Sapiens
cccaaccccaggcctcctgaaccggcccaaccccttgctggcgttgccccccacccgcccccacggcccagaggacaaggaccaggcagtggagagcgcccaagcggaggattactcgcagctgcccggagaagatcacagcctggagcacctgcccgcccggctcaatgagggtgcgcacctcttttgcatggccgagcggccggcggaggctcagtggtcggtcctccgtgcgtcccagaacttcgcccgcggggagcggagaagccgtctggagctggagctgcagagccgcgagcaggacctggaacgcgcgggcgtccgggcccgcctcccgcccagctcctccgtccttggacgggatgggcccttgctgggctattggcgcccccagggctgcagctcgcccggcctccgcagtgccaggtcgaccctcagcgcctacacccacgcgggttcagacctgccgagcgcccgccgccgcgggagggccc

SEQ ID NO: 354921 - DNA, 2023 bp, Homo Sapiens
agcggagtagcttcttcgcctccgccagcggggaccccgagctagagccgcagcgggacctgcccggcccccggctccagcgagcgagcggcgagcaggcggctcacagaggcctggccgcccacggaacccggggcccggcggccgccgccgcgatgtttccccgcgagaagacgtggaacatctcgttcgcgggctgcggcttcctcggcgtctactacgtcggcgtggcctcctgcctccgcgagcacgcgcccttcctggtggccaacgccacgcacatctacggcgcctcggccggggcgctcacggccacggcgctggtcaccggggtctgcctgggtgaggctggtgccaagttcattgaggtatctaaagaggcccggaagcggttcctgggccccctgcacccctccttcaacctggtaaagatcatccgcagtttcctgctgaaggtcctgcctgctgatagccatgagcatgccagtgggcgcctgggcatctccctgacccgcgtgtcagacggcgagaatgtcattatatcccacttcaactccaaggacgagctcatccaggccaatgtctgcagcggtttcatccccgtgtactgtgggctcatccctccctccctccagggggtgcgctacgtggatggtggcatttcagacaacctgccactctatgagcttaagaacaccatcacagtgtcccccttctcgggcgagagtgacatctgtccgcaggacagctccaccaacatccacgagctgcgggtcaccaacaccagcatccagttcaacctgcgcaacctctaccgcctctccaaggccctcttcccgccggagcccctggtgctgcgagagatgtgcaagcagggataccgggatggcctgcgctttctgcagcggaacggcctcctgaaccggcccaaccccttgctggcgttgccccccgcccgcccccacggcccagaggacaaggaccaggcagtggagagcgcccaagcggaggattactcgcagctgcccggagaagatcacatcctggagcacctgcccgcccggctcaatgaggccctgctggaggcctgcgtggagcccacggacctgctgaccaccctctccaacatgctgcctgtgcgtctggccacggccatgatggtgccctacacgctgccgctggagagcgctctgtccttcaccatccgcttgctggagtggctgcccgacgttcccgaggacatccggtggatgaaggagcagacgggcagcatctgccagtacctggtgatgcgcgccaagaggaagctgggcaggcacctgccctccaggctgccggagcaggtggagctgcgccgcgtccagtcgctgccgtccgtgccgctgtcctgcgccgcctacagagaggcactgcccggctggatgcgcaacaacctctcgctgggggacgcgctggccaagtgggaggagtgccagcgccagctgctgctcggcctcttctgcaccaacgtggccttcccgcccgaagctctgcgcatgcgcgcacccgccgacccggctcccgcccccgcggacccagcatccccgcagcaccagccggccgggcctgcccccttgctgagcacccctgctcccgaggcccggcccgtgatcggggccctggggctgtgagaccccgaccctctcgaggaaccctgcctgagacgcctccattaccactgcgcagtgagatgaggggactcacagttgccaagaggggtctttgccgtgggccccctcgccagccactcaccagctgcactgagaggggaggtttccacacccctcccctgggccgctgaggccccgcgcacctgtgccttaatcttccctcccctgtgctgcccgagcacctcccccgcccctttactcctgggaactttgcagctgcccttccctccccgtttttcatggcctgctgaaatatgtgtgtgaagaattatttattttcgccaaagcacatgtaataaatgctgcagcccaaa

SEQ ID NO: 354922 - DNA, 942 bp, Homo Sapiens
taaggtagcgaggcctgggtggcgaattcggcacgaggggcacagcttttgcaggccttgtttctacctcaactggaaagacagcccatttcttgtccagtgctctgaatgcacaaagtcaacgggcagataaacctcaaaaccaacattcatttcaagaagatggcttctcttgctagaaaagtcagtctctggctattcctgagctctgaggagcaaatgtgtggcactcacagggagacaaagaagatgttctgtgaagtggacaggagcctgctctgtttgctgtgctccagctctcaggagcaccgggatcacagacactgtcccattgagttggctgctgaggaacaccaggagaagcttttacagaaaatgcagtctttatgggaaaaagcttgtgaaaatctcagaaatctgaacatggaaaccacaagaaccagatgctggaaggattatgtgagtttaaggatagaagcaatcagagctgaatatcagaagatgcctgcatttctccatgaagaagagcaacatcacttggaaaggctgcgaaaggagggcgaggacatttttcagcaactcaatgaaagcaaagccagaatggaacattccagggagcttttaagaggaatgtatgaggatctgaagcaaatgtgccataaagcagatgtggagctactccaggcttttggagacatattacacaggtatgagtctctgctgctgcaagtgtctgagcctgtgaatccagagctcagtgcagggcccatcactggactgctggacagcctcagtggattcagagttgattttactctgcagcctgaaagagccaatagtcatatcttcctgtatggagatttgagaagcatgaatgttggatgtgaccctcaagatgatcccgatatcactggaaaatctgaatgttttcttgtatggggg

SEQ ID NO: 354923 - DNA, 324 bp, Homo Sapiens
  misc_feature (302)..(302): n is a, c, g, or t
taataaatagtatatgtagtgaagaaaaagttataacaagtatacattacatttaacacacctagcacataggacaccctcaacaaacagctacagctgctgtaaatcatgtgtatataatataacatgcaagcatatcttcatgtattgattaattactacttcttggaaaaggatctgaggaacatatttaatatatttaatatgcctgctcatatgttcatttagtgcttatcaattatatttagtgcttttctattagcttcatccatttgattaagatagcaacttgtattatttantattatgttactctgtgcctgt

SEQ ID NO: 354924 - DNA, 963 bp, Homo Sapiens
  misc_feature (38)..(38): n is a, c, g, or t
  misc_feature (45)..(45): n is a, c, g, or t
  misc_feature (83)..(83): n is a, c, g, or t
  misc_feature (89)..(89): n is a, c, g, or t
ggaactgggtccaattgtgctagtagatatacactagnagtaaanctataaagtcattagcctgtagaaagttgattatgatnacaatntgataaaaagtttgttttggaatagtctcagctagatgggtctaaatagccattttaatgtaatctaaaaataacactatgcctagcagaaactttggcgctttggaggtccccattgtcgccttttcataaaagtccttaagttttccatatgtcaccaagcaaacatttgtataggcatttacacagaaatataaccattgcaattagaaaatatccaaaatagcctgttatcttccacgtggcctagattattgacaatcccaaatatacaatttttctttaaaagtagtacaatttcctttgtagcttcaattccttatatgacttcagactggagaagcctgttaaaccactgttagtttcagttagaaagtctgagagactattagtacataaattctcaatcttggcatgctgtacacgtgccagagttttacctactgtagtgaccgttgagaagacccttgtttatttacatttgaagcactgtttgtgcaaacaacctttcattgttaagtgcctgtattcctttcatttacttcatgtccaggggtgctatttacctagaaccattgtctactacaattaacatttacattacaaagtgtgtggttttcctttttcaaggaggttcaattaaggcaataagatgtttgctggagaaacctattgtttactgaaagcactcaatgaagtcaaattactgaagcttttgcctacatcttggtcttttatgtaaatatgttaaatataacatctaaggaaaataaacaatattataattatgtgtttgccattgtcatatcaaacttgctttgtatcatactaatgttacataacttatcgatcaataaaaatacatttcaatgtt

SEQ ID NO: 354925 - DNA, 894 bp, Homo Sapiens
gggcttccaagaaatggtggagataaaggattctgtgtccgaggccacaagagatcaagatggcgtgctgaggaggaccacacgcagtttgcaagcacgccctgtctctatgcctgttgacagaaaccttctgggagcttgtcgctgcctgtatctgaaacagcaaaagacattgaaggaaaagaaaactctctagcagaagataaagatggcagaagaaaagggaacagcaagtataacaagatccacattttctaaatttcaacaaaaagttatcatcctcctccagtgctctgctccacaaagataccagccaaggggacaccattgtatctactgcccacatgtcagtcacaggagaacagctgggcatgtcaagtcctaggggtgggagaaccacatcaatatgccacaagcaattgccaggaaaacccctgtcccagcaagtctctctccccaaagcagcatttggctcccgatcctgtagttaaccccacacaagatctgcatggtgtgaaaatcaaggaaacagggtaatcctgaggactttgtggaagggaaaagcatcttgtcaggaagcgtcctttctcatagcaacctagaaattaagaaacctggaacggtaatacggcgtaagggccgacgctgcaacatcacttccactttgctcagaccgtctccatgctcttgtcctgacataacctgacctacattcaactgcaaatctgcaggagagtgtaacttcccatcttattgacaatgtcacctttaaccaaatgagtactgagccgggtattccatcttagacctgatggacagttcgatacaccacacctcaggctctacagctgtcctcattctcatattccaagcctgtcggccatgccctgctac

SEQ ID NO: 354926 - DNA, 431 bp, Homo Sapiens
aagacaggaactgtggaactgtgatgttgtcttttgtgttgttaaaataagaaatgtcttatctgtatatgtatgagtcttcctgtcattgtatttggcacatgaatattgtgtacaaggaattgttaagactggttttccctcaacaacatatattatacttgctactggaaaagtgtttaagacttagctaggtttccatttagatcttcatatctgttgcatggaagaaagttgggttcttggcatagagttgcatgatatgtaagattttgtgcattcataattgttaaaaatctgtgttccaaaagtggacatagcatgtacaggcagttttctgtcctgtgcacaaaaagtttaaaaaagttgtttaatatttgttgttgtatacccaaatacgcaccgaataaactctttatattcattcaaag

SEQ ID NO: 354927 - DNA, 451 bp, Homo Sapiens
  misc_feature (29)..(29): n is a, c, g, or t
  misc_feature (59)..(59): n is a, c, g, or t
  misc_feature (69)..(69): n is a, c, g, or t
aacgggaacgtggaacgtgaagttgtccntttgtgttgttaaaaataagaaaatgtccntaactgtaanatgtaatgaagccctccccgtccattgtaattgggccaccatgaatattgtgtaccaaggaattgttaaagaactggttttcccctcaacaaccatatattataccttgcctactggaaaagtgtttaagacttagcctaggtttcccatttagatccttcatatctgttgccatggaagaaagttgggttccttggcatagagttgcatgatatgtaagattttgtgcattcataattgttaaaaatctgtgttccaaaagtggacatagcatgtacaggcagttttctgtcctgtgcacaaaaagtttaaaaaagttgtttaatatttgttgttgtatacccaaatacgcaccgaataaactctttatattcattcaaag

SEQ ID NO: 354928 - DNA, 328 bp, Homo Sapiens
  misc_feature (20)..(20): n is a, c, g, or t
  misc_feature (39)..(39): n is a, c, g, or t
  misc_feature (42)..(42): n is a, c, g, or t
  misc_feature (59)..(59): n is a, c, g, or t
  misc_feature (91)..(91): n is a, c, g, or t
  misc_feature (308)..(308): n is a, c, g, or t
ggaaattggagcctttcagnaaaaattacagggaaaggnacntatccaggtataaatgncaggaagaccagattcccctaaaacaagtaanagagacatcaaaaattttaacataatcacaatgaaatcattttttaccacttttacagcggtgtttcaagcggactgtcactcagatctgcagagatgaatattactcaaaaaatttttttgttctcttgcatttttttcaactaccgcaaagctatacagatttttttgtacttgtggatcttttgtacttctcataacctaatgtcagactaagnaaaataaaatatctgagagt

SEQ ID NO: 354929 - DNA, 956 bp, Homo Sapiens
agttgacctatgtaacaatgccatcaaacaactgaatctaatttacattcatagaatacttcatgaacaacagcagaatgcacattctttacaaattcacatggtctattcaccaagactatattctggactataaaagacatctcaagaaaattaaaatcatagacatcatataaaatatggtcttgattataatgaaattaaacttcaatggaattaaatttaataacataaagacagctgcaaatctctaaatatttggagaataaaaatacacttccaaataacacataagtcaaagcagaaatctcaagggaaatttaaattatttgtaactaaatgaaaatataacctatcaaaatgtgggatgcaatgaaatcactgcttcacagaaacttataacattgaatgcatagattagaaaagaaaaaagatttgaaatcaatagtcgaagcttccaccttagaaaactggagtaagaagtgcaatatcagcctaaaacaagcagaagaaagaaaataataaaacttagaccagaaatcagctacattgagaccaggaaaccagtaggagaaaatcagcaaaaactaaaatctggttctttaaaaaatgtcactaaaattggtaaacctctaacctggctatcaagccaaaaaagaagacatgaatttattcattattcggaaattaaagagaaactccatcaggaatgctttcatacgatgcttaaaaagggattactaattacagggattattaggggtatgaaaagccctgtagccattaatttgcatacttgcgatgacactaaactaattcgtgaagggcacagactatccagaattggttacagggaacagattttctgaaatgggccatttcactgaagaaattgactccataattattactttccgaaaaggtacctcaggcccatgttggctttgaattctcct

SEQ ID NO: 354930 - DNA, 696 bp, Homo Sapiens
  misc_feature (14)..(14): n is a, c, g, or t
  misc_feature (130)..(130): n is a, c, g, or t
ggaaaacataaatnttgacaagtagttcaagactgttgggataaacttagctagagtgcaggtcataactacccatctttataaggaagctgaaaagggaagtatgaggacagggagaacaatgactttntctctcaagcttgacttaaaccaccaggaaagttcttaaagccaaagcctttctcagactctcaccaaaccattaagagtcagaaaaatggtcgttttcaaaggagtagaaaattctgtacaaagtaaacaacagctgaagcaggaaaggaacatacattttctcacatagtggcacgcaggcaaaacagaacatagacccagcttggttattttctttaatacaaggaaatttctcaaacatgatatatagccatgttcaagtatgagtataattacagagttccctctgtcccctttaatcagcctataaactcaacagcagagtcttgtcagaataggcccaaactggaaaaaccacatgtttctctctctcagaaaagatactaagcttaggatgtgagcagcgcaccatgagagcacaaggtgttccttctctctcaaagtcagtcccagaactgaaaagaaaaatgttctcagttggcatcactgccctgtttttcatccaacaaagaatattcgctatgaattttctcaagcaaaaagtcactgaattcttttaacagg

SEQ ID NO: 354931 - DNA, 368 bp, Homo Sapiens
caacccccaactgattgaatttcccttgccttgaaaaacctgtcactttataatagattccacaatgggtttatccagccacctaacctcctcctcattaagttgccacaatctgggtggaagctctgttttcctgtttttgcttttgagaacgttttacttttgttcaaactgaaaaagagccctttaaagctagctatttaatatgctttctgtgttcttcatgtttgacccaatcttgcttctagttttctctttttgtatgtgttttgagaggatttgtggggagaaaaagaagaaagagaaagcagggagagaaggagagacttgcaacctaataaacagctaaattttgcggtctttgtgac

SEQ ID NO: 354932 - DNA, 1349 bp, Homo Sapiens
  misc_feature (305)..(305): n is a, c, g, or t
  misc_feature (1223)..(1223): n is a, c, g, or t
ggatctctcccgaatcgatagagccacacagtcgttgcagcttctagttgtattcgtgagagcccagtgcgtcaccacttcctcgttctattttcccagcctcataaaaacagagcgggagtattgggaggaggataagctggggaagaggctggccacactggttgctataaccaccaccacttccggtccgttcttctttacggcccacctcagcgctgcccgcgcgaaatttgtatccctctgcttgtgtccactggctcctggggagcagcgcagggaggaggaggaggaagatatcaaanagccctcccattgggggccccagatcgccacttccggtgaccagaggtagggaaggaaacaatcccgacccggagtggacaggtgaggaggggaggacttgcctcgccgaggccgctgcgaggagcgtgcccaagggcgaaggtccagggaacccggctcccgcgcaccgaagacggccgccatgccggcccgttgtgtggccgcccactgcggcaacaccaccaagtctgggaagtcgctgttccgctttcccaaggaccgggccgtgcggctgctctgggaccgcttcgtgcggggttgccgcgccgactggtacggaggcaatgaccgctcggtcatctgctctgaccactttgccccagcctgttttgacgtctcttcggttatccagaagaacctgcgcttctcccagcgcctgaggctggtggcaggcgccgtgcccaccctgcaccgggtgcccgccccggcacctaagaggggagaggagggagaccaagcaggccgcctggacacgcgaggagagctccaggcagccaggcattctgaggctgccccaggtccagtctcctgtacacgcccccgagctgggaagcaggctgcagcttcacagattacgtgtgaaaatgaacttgtgcaaacccaaccccatgctgataatccatctaatactgtcacttcagtacctactcactgtgaagaaggcccagtgcataaaagtacacaaatttctttgaaaaggccccggcaccgtagtgtgggtattcaagccaaagtgaaagcgtttggaaaaagactgtgtaatgcaactactcagacagaggaattgtgggctagaacttcctttctctttgacatttactccagtgattcagaaacagatacagactgggatatcaagagtgaacagagtgatttgncttatatggctggacaggtgaaagaagaaacatggtaaaaactcaacatcaaatgctctgatgtgccatagaatttcaaattttactcacaaaatatcccttgctaatgaaaaccttaacttcagg

SEQ ID NO: 354933 - DNA, 244 bp, Homo Sapiens
  misc_feature (50)..(50): n is a, c, g, or t
  misc_feature (88)..(88): n is a, c, g, or t
atctctcagacacttggtcggtagaaaagatcccgcaccatcctccaggntccaatggccttggagagagggctgcagggcccacggncattgctgactctttagaacgtgctgacatggagccagaccactcggccctgagtgcggcgaggaccctgtttgtggatgtggaggagcgcgggccggagcgcatggacgtgaaggagaggaagccttaccgctcgctgacccggcgccgcgacgc

SEQ ID NO: 354934 - DNA, 488 bp, Homo Sapiens
ccattccattccagcgtacctctctctggtcacagagaggtagtgctggatatgtgtcttacaaatttgcatgcttttctagaaaagatgatgggatccactaaaaactcagtggtgagatgattcccttagcaagattgctgaagttaggtttagacgtgggagggtgggtatgtgagcaatggtgccaatagcggctctttatttgccttgtcctcattactgccatcaggaaggtgctactggcctcgagccaggtgttcataatctggccttgggttaaccagacaaatagaacttcttttcctagactgttggctttgtggaggttggcagcctctatcacaggataaaatttcccaatccatttacccagtatattcactacattttttcctatcctcccatcataaaagctgttacgctggaatggaatggcaattccattccagcgtataggtttggtcctagcctttctattagctctt

SEQ ID NO: 354935 - DNA, 584 bp, Homo Sapiens
ccaggagcgttacaaatcttcagtttcatttgcggaggcctagccgtgaccccgcgcccaccccaaacacggatctgattcccacttgacacactttcccactggtcttagtctcacccacccgaagccagcaaccctctgcggaaaactcacacctacctatatccatccaccctgagcagccctccacccccaaatcgccctccgacgaccgccacccccacagttcagtctccccctcccatccctgccggccctcgcttctcccctccaccgtcgaagtcagtccctctcttcaaccgcccccaccccctagtactggtctcagcttctccagcgggcctcagccccgtccacccccaaccccgacgcccctttctccgcgccagttctggcccttctcccatatttataagtgtccggccgggacgggcggtgggcgcggcgtccccggcgcgtatcgtaggcagtgtaccgtggccgtgccgtcagagtgtgcgtgtgcgtgtgtgccgtgtcgaggctgtgtagagtgcattgtacagcatattttcatgaataaaattgttttaaatattaaaaaa

SEQ ID NO: 354936 - DNA, 907 bp, Homo Sapiens
  misc_feature (835)..(866): n is a, c, g, or t
ggcacccaggcgcacttctgtgagtcactcttcttgtttccaagagaacccttttgtctctccttcgtactttgccctaagtcaagcaaatgtgattcaaccatgttcttgcgtgggtagtttcattatattcctgccactaagatggagttctccactgattctaatcactatgaagttgtcacaaaaatgctccttctaggcatctgttctgattagggctgaagttagtagacacaacctttcctagtgcccttttagtcatcaaaggcataatttcattttgcctaaatacttagtttttgcatttccttcaaatacacattcccttgagtttcttcagtggcatcccctgctcccctgagcacacacagtgttttctatttatgactgtagtgccaagcagaatttccatgttcttgctagctgcccattctcacccctcagggtctcatacttctccctggaagcctcccaagcagtcaatgtgacagggaccaagtatgtacaaggcaacatattgggttcaagtgcaaactaagggaaccagggcctgtttttctagtttggaagtttttctttatcctaagaaaagagacagaccaaaaccaagaagatcaacaataactcttctctttgtcatcacggtgatgacatcaaggtactgatattaaccagaagttacaacaagaaaaccatttattgtccctagatggcatgaacccgtttatttcagggacattacttcccctgacttcggcatttacagattggatatgaacaaaatcaacttctcagtctctcacaagactcttagtaagccaggcataacagnnnnnnnnnnnnnnnnnnnnnnnnnnnnnnnncaaaatatttgaccacctcccacttaatcaagtgatagagc

SEQ ID NO: 354937 - DNA, 1311 bp, Homo Sapiens
cccatgtgcaacaacctgctgcagactggggcccttcctcagttaattgggtttcacaagcaataatttccccccacaacaaaaacccacaacttgaagtgagttgaaaagagatcaatagtggaaacagtcgcctcagtactttttctttctggatttcatctctagaaatttgaagtgtttgagacagagtccaccctttgtgcaaggcgagaaccaatgaatggactccttgtgtgaattattgcatcttcttccaaagcaggttcatcaagactttcacagagattcatttttgttgagaagtaagggttaataggaggatagaatttggatccaaatctagtgataaaagtgtccaagcaatcaaaaagtaagatattttagggacataccaacatcttccctttctgctaatttcatgctccaaagatatagcaaaaaaaaaaatcataaaaagtgcttttgccctacttgtgttctagttttcccatggcagaattttgtaattacatccagaatatagtgtatatttggttcctcaaactttattacattggatggatattgttgaactggggcactggtgcctatattcaaggctctttcctatcaacgtgtctgtccacgatttgttgtgtttaaagcttcattttgaaaaatcactgtccccctgtggggtagtgactgtatggttttggttcatgtctatgtgggacacattgcatcacatggcaaaccaactctctgtggatgtgagataagtacttataaaaccagcttgaaaacatcgtcttatgtattatgtcatcctgcatcataatgcaattatgtgtatcataacatgctcatttacaaaaaagagaaacccagcaaattcatgttggtccatagaagaatgtactcagaacttggtgtggtgaaacgatgagaacagaccacctttaagatacccacctgccacttaaaatgacttagttataattagtagtagtctagacgtagttctaggggtgtgggggtcaattctaacgtcatggtccttttgaactaaatctctcagtcataatttgcaaacaaaaatactgtgggaataaagaaaattttcatcttgtggggcaaatcaagcaggcatctttttacttttcctggaagtttagctccatatacgtggggatgggctcacgagatctgccgggtgaaatacagaacatcttagttacaaaacaggtatcatggttaagcccgaaacgcgcattggatagaggggaattgaatgcaatggatgaatatacaaaccttggtttgccc

SEQ ID NO: 354938 - DNA, 1369 bp, Homo Sapiens
  misc_feature (718)..(748): n is a, c, g, or t
  misc_feature (967)..(975): n is a, c, g, or t
  misc_feature (1166)..(1166): n is a, c, g, or t
  misc_feature (1256)..(1314): n is a, c, g, or t
ggcccccccttggtgagcataccgccgctgacgccgtcttgcttccggtccggaattcccgggataggaaaagaaggtggaacaatggaaagaaaagttctttgaagactactatggacagaagctgggtttgaccaaagaagagtcattgcagcagaacgtgggccaggaggaggctgaaatcaaaagtggcttgtgtgtcccaggagaatcagtgcgtatacagcgtggtccagccacccgacagcgagatgggcattttaagaaacgctctcggccagatctccgaaccagagccagaaggaatctgtacaaaaaacaggagtcagaacaagcaggggttgctaaggatgcaaaatctgtggcctcagatgttcccctctacaaggatggggaggctaagactgacccagcagggctgagcagcccccatctgccaggcacattcctctgcagcaccctgacctggagggtcccgaattcccagttgagtctgtggcttcccggatccaggctgagccagacaacttggcacgtgcctccgcatctccagacagaattcctcagctgccctccgaaacgggggttccggaaccccgggaccagaaagaggaaatccccttgaggaggcgtgcccccgcctcctcttcccctcatagcacaccccggcctgtaccatttcccctccctctccctatacccctatttgacgctggtnnnnnnnnnnnnnnnnnnnnnnnnnnnnnnntttaaggaccctcaaccgctcccgcccaatcgggattcctaccttttcacggtatttttctccccccctggtgtggggttattaggggacagcctttcctttcccatgattttgccctccccgccattttcccccccacccattgggcggacaccttcccctcccgggttcttaacgatgcggcccctgtgcgacactttatttcatatactttaatgnnnnnnnnnggccttctaaaaggatttccagccgtggataccagaagcgattcccccttctggcctattttcgccacggtgaaacaatctctacggtgccctatctacctattgttgtcctcagcctacacttcttccataatttccttatgtgttcacccctcgctagattatgacacagcagcattggcgaccgtttnttgtcgatacccacgtgtaagtcgttccgccccgctgcgagcgcccatccgtggggtttgtgagtatatacgcgctcctccccatttatnnnnnnnnnnnnnnnnnnnnnnnnnnnnnnnnnnnnnnnnnnnnnnnnnnnnnnnnnnntatttcttctttaccagccctcttttgttttttcacctttacgctccttttttgt

SEQ ID NO: 354939 - DNA, 1025 bp, Homo Sapiens
  misc_feature (66)..(66): n is a, c, g, or t
  misc_feature (75)..(75): n is a, c, g, or t
  misc_feature (122)..(122): n is a, c, g, or t
  misc_feature (300)..(300): n is a, c, g, or t
cacgaccacctcgccccaaggcgacctcgaagtgcccccaaccccgccacttctcaggaagaagangggaagaancgggcagaactccccggaggagcaggcccgctcctcaccgcgccccngcagggagaagggaggaccacctctcccccagaccctagccaaacctgacactcgggaccctgggatgggacgatctcccaggtgccagctcagggagtccactgaataatgcttcaacgaatcgaatgagccccttccccagccataatacccagccgccagagatgagggaggctnatcattatttacattgcccgtgcctggaagggaaactgaagtttgcgcaggaacaatccgaggaactgggccttgaacctgaaattccgaactcggacccgaataggcccagacagaactccgacacctgccccctacggtgctggcacgagagggctaaggggcgggggcatgtgcaccggaagctgcctctgcccactaacaagatggctgaggagagggcggcaagtgtccgacacgtcgggccctccgaggccttctctttctcccactggcggtccggctctccgatggtggccgctgcacggacgccccggcacgcgctggcggcacgcagttctcacatcaggaatgcggcaagcaggacacccaaagccccagcagaaaaccacaagtgcccgaggaacgagcgacagccggccccaacagcgtgggccgacactggggaccttgaccatttggtccctcttcgacaatgcaaccctccttttttctctcggttagctcccctgacgctcgcttgcaattttcgacccaacccggcaccggttcatgccacgcgtccgcgacgcgcactgcctcccctaggcataccgcccaataccccaaagtccccaatgttggccccaggaaaagaccccgggacgcccaatgccacactgcccccagcggacgtgacccactgacccaaccggcccctaacaagggcgatgcaccatcctgcc

SEQ ID NO: 354940 - DNA, 2735 bp, Homo Sapiens
  misc_feature (2078)..(2082): n is a, c, g, or t
  misc_feature (2084)..(2084): n is a, c, g, or t
  misc_feature (2087)..(2089): n is a, c, g, or t
  misc_feature (2091)..(2094): n is a, c, g, or t
  misc_feature (2097)..(2098): n is a, c, g, or t
  misc_feature (2101)..(2103): n is a, c, g, or t
  misc_feature (2271)..(2282): n is a, c, g, or t
  misc_feature (2429)..(2443): n is a, c, g, or t
  misc_feature (2550)..(2550): n is a, c, g, or t
  misc_feature (2643)..(2643): n is a, c, g, or t
ggtccggaatttttcaaatttcgggtccgagttcggaattttcgttcaaggcccagttcctcggattgttcctgcgcaacttcagtttcccttccaggcacgggcaatgagtgtttggccgcgacgagttggaaagcccggatgcgtccttcggttgggcggggtgtctcagtgacgtcactgggggtataaaagggcctgggtggcgggcgcctgggcagagcgtcctagcagtgtcactgcgtgggttggtttgtgtagagaggcgtgagcgagcccgttgtccggagtgcacctgctgcctgttctgtccctcccgggagcccccgccgctgtcgccgtcgagtcgccatggaagtgcagaaagaggcacagcgcatcatgaccctgtcggtgtggaagatgtatcactcccgcatgcagcgcggtggcctgcggctgcaccggagtctgcagctgtcgctggtcatgcgcagcgcccgggagctctacctctcggccaaggtggaggccctcgagcccgaggtgtcgttgccggccgccctcccctctgaccctcgcctgcacccgccccgagaagccgagtccacggccgagacagcgacccccgacggtgagcacccgtttccggagccaatggacacgcaggaggcgccgacagccgaggagacctccgcctgctgtgccccgcgccccgccaaagtcagccgcaaacgacgcagcagcagcctgagcgacggcggggacgctggactggtcccgagcaagaaagcccgtctggaagaaaaggaagaagaggagggagcgtcatccgaagtcgccgatcgcctgcagccccctccggcgcaagcggagggcgcctttcccaacctggcccgcgtcctgcagaggcgcttctccggcctcctgaactgcagccccgcggcccctccgacggcgccgcccgcgtgcgaggcaaagcccgcttgccgcccggcggacagcatgctcaacgtgctcgtgcgggccgtggtggccttctgaggaccccgagcggcgctgccggagcccagagcgcgcgtcgaaccgtcggcccgagggcgcagacctgaggcgaggccaaccccctccatcctgggggaagcgcccgcgaaaaacgtggagatgaagccgccgcccgggctgctgaaaggcccggagagggactctgtccccggggaaccatcgccttcagtgtgcagggacggcaccgaggaatctgagccgggggcgcgggcgccttccgcaaagacctgcgcccacaggtgccggtcttagtggcctgggacgtgaacctttcgctctccttctgaactgggagaagggaggcttgggtgtagtgttttacgtttccgtaggctaggtgtttttaacagatctcctcagggtcggacttcattttgtactgtgggctgtgctggccctttcaaggtttttcaagagttggttttgcgtttccaacctcggagaattccaggcactccccttccccctccgctgacatacttgtataagcggtcatcgttgcgtcatggggcaggcgtggggagcttcctgtcgccttgcgtgggttgtggggcctggggaggaggtcctggggcgtgcacccgccctgggcagtggggaggagagtggcctgagttacttcacccccgcgtgctgctggttaatgtcccgcgtctctgcaccttcgggtgggagcggggactgatctactttcacattctcaagtttttctcatctgcattagaggtgcccagtaggttcccaggttccagcgtgcccctccctcagacacacggacacaatcagccgagaagttcctggtctgaatcacgagaatgtggaggggtggggggtgtcagtggaaaggcataaggctgagctgagaccagttgctggtgaaactgggccaatctggggaggggaacatccttgccagggagtttctgagggtctgctttgtttacctttcgtgcggtggattctttttaactccgtctacctggcgttttgttagaaatgtcagataggaaaataaaaaccatttgagtaaaacnnnnnanaannncnnnnaannaannnccttgtccggccgccctcgggccctcgagaaagcttttctaaacccattccttttgggccgcgccgggccccacataagggaaagagggaacctgggccccataacctgggtttcccaaggaaaaacccggggccctggacacaaagggcttgggaattccccccccnnnnnnnnnnnncccccgggggggaaaccacgagaaggttttttgaaaaaaaatccccccaaagggaagttcctctcagggggcatttttacggggaatctttaccacacacggggatttcccctaacccgcgacccccccacaattcaaaaatatttnnnnnnnnnnnnnnnggtgaccattttatttcatgagaaaaaggggggggtcggaatcttctccaaatgcactttcctccttcgcccccccctatgggagcacccaaccctctcccctaaanacaccgccgcctctttgataaaacacatgtgaaagcttcccgccaagggcgaggtattaaatcaccaacctctctttgtttcctactcccctntcgccggtacaaatacaataataattcctttccgcccccctggtgggccaacaaaccacaacccgtgtccttaacaaaataccaatctctcg

SEQ ID NO: 354941 - DNA, 362 bp, Homo Sapiens
ccaggaaggagggcaatgttgtcctcatggtggagagttgaagctcaaggagggagggactgacctaattacatgcacttaaagcacattaactcacattgtattggccaaagcaagttgcatggccaagtccaaagtcataggaaacagttgcaagggctgagagggaatgaatgattcttgatagataactcaatctaggacaaaaaatgaaggttgctgtgagctgcagaatgtgcctttggtttgatttacatatccccaaatcctagggagagaatcatttttgccaaactttatctttactgaatcttttccaacctccaggatcacaagtatacttcatgcattaaaaaccttcc

SEQ ID NO: 354942 - DNA, 660 bp, Homo Sapiens
cagactgatggcgattccctctcacccgggactctccccctttcaaggaaagtgaacctttaaagtaaaggcctcatctcctttattgcagttcaaatcctcaccatccacagcaagatgaattttatcagccatgtttggttgtaaatgctcgtgtgatttcctacagaaatactgctctgaatattttgtaataaaggtctttgcacatgtgaccacatacgtgttaggaggctgcatgctctggaagcctggactctaagctggagctcttggaagagctcttcggtttctgagcataatgctcccatctcctgatttctctgaacagaaaacaaaagagagaatgagggaaattgctattttatttgtattcatgaacttggctgtaatcagttatgccgtataggatgtcagacaataccactggttaaaataaagcctatttttcccaaatcacacccatgcaactcaaatttgaccttgtcgggccgccttcggccctcaaaaaagcttttctaaacccattcgtttgggcgccgcgggcccccagtaagggtaaaggggaacatgggcccgataaccttgttttcccttagggaagaaccccctgggcccttggaacctaagtggcctttggcgaatttccttcccccatat

SEQ ID NO: 354943 - DNA, 268 bp, Homo Sapiens
  misc_feature (42)..(42): n is a, c, g, or t
  misc_feature (61)..(61): n is a, c, g, or t
gttgatgctattacccattgctgaaaaatggcactctaaagntatgggaaggaaggacccnaaggcaaccacctgctgtcctttcagccttcctttggagactgctccatcagtgccgaggtgtgtgggaacaggcttcactgcaccgccatcttactgagttgcttcacgtgaggaaaagggggctttggccctgtgactcagttccacattttggattgcatactggaaaagaagccaatcttcttgctagtaaaccagcataccg

SEQ ID NO: 354944 - DNA, 485 bp, Homo Sapiens
  misc_feature (450)..(450): n is a, c, g, or t
ggccatgactgagagtggaaagaggtgctctgagtgttctcacttcgcctttgggagagagggagagaagtagcccctgctgccgaggaaggagggattggtatgaagccttcaaaagacagcgaggaactccactgtgtccgaagggaggatttagagagctgttcttctgcctatctgatcgcctcctcagacactgatctattagtctagtgctgcaattacttggattgtaatgtttccttgcaatttttgcttttcaaattcttttcaccctaaactgtaaatacgccaggagtaggtaaaaacttacaggtaaacattgccaagaaataaggattttcatgtcttctgctcagtggcataactcaaatcacatgagatagatttctttgcatctgtccattgtatttctctgaggctaatttacagcactttgtcacgttaggnattttttttccccagtgctgctactctccaactgg

SEQ ID NO: 354945 - DNA, 568 bp, Homo Sapiens
  misc_feature (28)..(28): n is a, c, g, or t
  misc_feature (39)..(39): n is a, c, g, or t
  misc_feature (65)..(65): n is a, c, g, or t
  misc_feature (71)..(71): n is a, c, g, or t
  misc_feature (103)..(103): n is a, c, g, or t
agatagaccctccacggaaacccctggnagtgctcctgnacaattgtgcctttcaagcaagtggncagaangcttgggttccgaagtgctgatgagcgacctnaagtgtgagacgccggtgaacttctttagaaaggatttcatgctcctctccaatgacgagatctgccctcagctgtacgctaggatctcgcccacgttaacttcgcacagtaaaaacagcactgggttggcggagaccgggacgcactccaactcctacctagacaccagcagggtgtccatctcggtgttggtcccgggactgctgctggtgtttgtcacctccgccttcaccgtggtgggcatgctcgtgtttatcctgaggaaccgaaagcggtccaagagacgagatgccaactcctccgcgtccgagattaattccctacagacagtctgtgactcttcctactggcacaatgggccttacaacgcagatggggcccacagagtgtatgactgtggctctcactcgctctcagactaagaccccaaccccaataggggagggcagagggaaggcgataca

SEQ ID NO: 354946 - DNA, 1072 bp, Homo Sapiens
  misc_feature (330)..(340): n is a, c, g, or t
  misc_feature (930)..(930): n is a, c, g, or t
cctgggtggcgaattcggcacgaggaaaatgcataggttagagaaatggagagaggcttggaggctgggggtgagtctcaagatatgagatgcctagcctacagagatcccaaaaggatgtcccaaaaagatgcttctaagtgacctcaaaagaccttccttccactggactgccacaacagatcactgaaattctggaggagtatactttcttcttcctccctcctctcctctgtccttctgaaatttccatattgagagaagccaaacattgagctgaaacttgcatctcctgcaaatctaaaagcagtagaaaggaaagcaaatatnnnnnnnnnnngaaataaaagaagaataggggaaacccagaaaataacctgaaaccataggaaagagcagaagcacaagacaacaacagtggtgggccggatcactgtgcatccctccaggaaggacaaagctgatacaggaaataatggtaactgagaaatggaggttgcatccgagaatactactggaagagccctctgatggaggaggtcagcatggtcccttccacccaagctcctttcttaggaggagtggagaacactcaggccccatgctttgaaaacaagagttggaaagggattgaaccaaaccattagagcacacaagataagactggagatttggagatttgtggaaaagtgagactggatctctgattctgtgacaacattatgccttgtttcagaaacacagagaaagtcttgctttttcaactgaaaagtggtagagcctctactttcctatgctcagatcagtagttctcttttggtatggggctgttccaaaggagacacatccggttaatttcaaaagaagacttacatgggggaaaaacaccaggcatggaaaggggattggcaatggtcccctctgcttggnctcaggaacatctaagttggaaaggcaaacctaatagtctttagccaaaagtcccccaggggccaaatcaaacctccatgcgggagaatccttgggccccaatggaaagaacctttacctggaaaaaaggggggctgggcct

SEQ ID NO: 354947 - DNA, 464 bp, Homo Sapiens
tgcaagtttcagctcatgtttggcttctctcaatatggaaatttcagaaggacagaggagaggagggaggaagaagaaagtactactcctccagaatttcagtgatctgttgtggcagtccagtggaaggaaggtcttttgaggtcacttagaagcatctttttgggacatccttttgggatctctgtaggctaggcatctcatatcttgagactcacccccagcctccaagcctctctccatttctctaacctatgcattttagagcgagaggaccgcctcactagtgtcaccatcctgccttttctaaaacatgcaggctcacacattctactcctgcttaatgtctgtgttaaacgttttctaaccatttttgttttatttttctgaaaaagttaacccctcccaactcctcacacattggctcttcctcttgagccacaaagttttgattcttgcggtgg

SEQ ID NO: 354948 - DNA, 549 bp, Homo Sapiens
aaaagaaaaccatgatcaacaagctttgccacgaatttaagagttttatcaagatatatcgaatacttctacccatctgttcatagtttatggactgatgttccaagtttgtatcattcctttgcatataattaaacctggaacaacatgcactagatttatgtcagaaatatctgttggttttccaaaggttgttaacagatgaagtttatgtgcaaaaaagggtaagatataaattcaaggaagaaaaaaagttgatagctaaaaggtagagtgtgtcttcgatataatccaatttgttttatgtcaaaatgtaagtatttgtcttccctagaaatcctcagaatgatttctataataaagttaatttcatttatatttgacaagaatatagatgttttaaacacattttcatgcaatcaaacgtttcttttttggccagcaaaagttaattgtttttagaaatagttgtattactgttcacggtccaatcattttgggcatctagagttcattcctaatcaattaaaagggcttgcaagagtttta

SEQ ID NO: 354949 - DNA, 854 bp, Homo Sapiens
tgagcaagcgaatgtgtcaggacctcaggccatgaacacatcatcatcaccaagaaatcatggagacaagttacctggtttcccatccagagtgtagagttttttgacaaccccggtctccagtttgatggcttctgtgatatcagtgaggacttgctcaaaagagtgggctgtcttcttgttcagaagcacacgcacagccttccgaggcttcaccccactgcggatgatggtaaccagcttggggcgcacaaagtccttgttctccctggcctgtgcactgttgctgctagccaaggactggggggctttcatattggcagatgtttttacgttgacagaccagttgggattgacattcttggtgtactccacctttttaaagaagttgtctgaggaacagacatagctttccccttcctccagttcatccatgcttccgatcttcctggatccatcaatggtgtaaatgtaacgcactccctgaggcaggttgatgttgtcagacagagatcgcgtcaggtcagccagcaaggcgtcaaagctgcgaaaacggtcagaggacacagcgtacacaatccccttgaagtagcggtccccattgcggtagaaacgtaccttcttggctttcttctcattactcagtgcctgcaaggttctggttcggtagaagctacagtgggcgctgtgagtggggctaggcaacccattcatccgggagcctcgcatgttcctggatgtcttatctctttcgtcaaagtgtccaaaatcaagttccatattttggtggaacctcagagaccggttttctgctggttgggtggagatgctgagagaaagaaaacctatctctc

SEQ ID NO: 354950 - DNA, 1122 bp, Homo Sapiens
ggctggaccggtccggaattcccgggatcgccattttgttctgcggtgctggtatttagagcgcagcggctgacgggccggatcgccttcgccgccgcccgcccgcaaaccttcgtgcccggcccgtcctcgcccccgcctccgccaccgcctcggcccgcagagcttgccccctccccacccgcagacatgtccgagtccaagagcggccccgagtatgcttcgtttttcgccgtcatgggcgcctcggccgccatggtcttcagcgccctgggcgctgcctatggcacagccaagagcggtaccggcattgcggccatgtctgtcatgcggccggagcagatcatgaagtccatcatcccagtggtcatggctggcatcatcgccatctacggcctggtggtggcagtcctcatcgccaactccctgaatgacgacatcagcctctacaagagcttcctccagctgggcgccggcctgagcgtgggcctgagcggcctggcagccggctttgccatcggcatcgtgggggacgctggcgtgcggggcaccgcccagcagccccgactattcgtgggcatgatcctgattctcatcttcgccgaggtgctcggcctctacggtctcatcgtcgccctcatcctctccacaaagtagaccctctccgagcccaccagccacagaatattatgtaaagaccacccctcctcattccagaacgaacagcctgacacatacgcacggggccgccgcccccagtagttggtcttgtacatgcgcagtgtcctagtgcccatcgtctgtttccccggccttgcccccgcccgccccgtgccgtggacatctgggcccactcatcgcccctccaggcccccggcgccccaccccctagagtgctctgtgtatgcggatgatttagaattgtcatttctctttactggatgtttatttataaagatctggcctgttcctgcgtctgcggagcggcccttgtctcccagctatctataaccttagctagagtgtcgccttgtgggttcctgttgctgagacttcctggatggagccgccctcaccgccgggcccgggccctgcgcggagcgtgtccaataaagtctggat

SEQ ID NO: 354951 - DNA, 1881 bp, Homo Sapiens
  misc_feature (65)..(126): n is a, c, g, or t
  misc_feature (491)..(491): n is a, c, g, or t
  misc_feature (1105)..(1163): n is a, c, g, or t
  misc_feature (1167)..(1167): n is a, c, g, or t
  misc_feature (1169)..(1169): n is a, c, g, or t
  misc_feature (1679)..(1692): n is a, c, g, or t
agcggcattttgttctgcggtgctggtatttagagcgcagcggctgacgggccggatcgccttcnnnnnnnnnnnnnnnnnnnnnnnnnnnnnnnnnnnnnnnnnnnnnnnnnnnnnnnnnnnnnntcggcccgcagagctggccccctccccacccgcagacatgtccgagtccaagagcggcccgagtatgcttcgtttttcgccgtcatgggcgcctcggccgccatggtcttcagcgccctgggcgctgcctatggcacagccaagagcggtaccggcattgcggccatgtctgtcatgcggccggagcagatcatgaagtccatcatcccagtggtcatggctggcatcatcgccatctacggcctggtggtggcagtcctcatcgccaactccctgaatgacgacatcagcctctacaagagcttcctccagctgggcgccggcctgagcgtgggcctgagcggcctggcagccggctttgccantcggcatcgtgggggacgctggcgtgcggggcaccgaccagcagaacccgactatacgtgggcatgatcctgattctcatcttcgccgaggtgctcggcctctacggtctcatcgtcgccctcatcctctccacaaagtagaccctctccgagcccaccagccacagaatattatgtaaagaccacccctcctcattccagaacgaacagcctgacacatacgcacggggccgccgcccccagtagttggtcttgtacatgcgcagtgtcctagtgcccatcgtctgtttccccggccttgcccccgcccgccccgtgccgtggacatctgggcccactcatcgcccctccaggcccccggcgccccaccccctagagtgctctgtgtatgcggatgatttagaattgtcatttctctttactggatgtttatttataaagatctggcctgttcctgcgtctgcggagcggcccttgtctcccagctatctataaccttagctagagtgtcgccttgtgggttcctgttgctgagacttcctggatggagccgccctcaccgccgggcccgtggccctgcgcggagctgtgtccaataaagttcttggatgtgnnnnnnnnnnnnnnnnnnnnnnnnnnnnnnnnnnnnnnnnnnnnnnnnnnnnnnnnnnngggnanggttattagaatatcacctatatgggtcaaagattacgcgtacaccgggttccttgtataatcgtgcaccctgagtcgcgcgtcgtgttacacccctagagcgctgacccctgggggcctacaacgatcttgggcgggggaaaactgaatttcttgggagaggtgtgataattggaacccacacactcttgtgaagatgagataggttggaccgtttgtacctagcagaggtttaagaggactcaaagggggtcaaaaaataaaatgttttaaaggggtcccaaggggtgaaaaaggtggagcctgccataacgggggtgaatggctttgaagaagttttttacctttcccgggcctcctgggggggtattgcaaaaattattttatcccaccgggggaacctgaaggggattctacaaccatggtttggtgtttattgtggaggaatttaagaaaatccccaggggccttgttgtttgaaaaattctttagggcccctcaccacccctnnnnnnnnnnnnnncctctatccctccttttaccccaaattttccacaaagggttcccccctggcgatttgaaaaaatgtgacaaacagcctcccccccgtgaaggcgggtaaacccttaacacttatgcacccccgtgccattggtgaccataggaaaatttggcgccttttcaaaagtgttcccacgtcacacccattttt

SEQ ID NO: 354952 - DNA, 449 bp, Homo Sapiens
  misc_feature (425)..(425): n is a, c, g, or t
aattcggcatgagggcgccctggggacgctaatggacagccaaggagcggtaccggcattgcggccatgtctgtcatgcggccggagcagatcatgaagtccatcatcccagtggtcatggctggcatcatcgccatctacggcctggtggtggcagtcctcatcgccaactccctgaatgacgacatcagcctctacaagagcttcctccagctgggcgccggcctgagcgtgggcctgagcggcctggcagccggctttgccattcggattcgtgggggacgctggcgtgcggggcaccgccagcagccccgactattcgtgggcatgatcctgattctcatcttcgccgaggtgcttcgccttttacggtctcatcgttcgccctcatccttttccacaaagtagaccttttccgagcccancagccacagattttattttaaaga

SEQ ID NO: 354953 - DNA, 899 bp, Homo Sapiens
  misc_feature (867)..(867): n is a, c, g, or t
ccggtaccggtccggaagtttcgggatatcgtcgacccacgcgtgcgcggacgcgtgggcggagcaggtgtgcaccttcctcaggcgcggtggcttagaagagccggggctgctgaagaacatccgagaaaatgaaatcacaggcgcattactgccttgtcttgatgagtctcgtttggaaaatcttggagtaagttccttgggggagaggaagaagctgcttagttatatccagcgatgggttcaaatccacgttgatacaatgaaggtaattaatgatcctatccatggccacattgagctccaccctctcctcgtccgaatcattgatacacctcaatttcaacgtcttcgatacatcaaacagctgggaggtggttactatgtttttccaggagcttcacacaatcgattcgagcatagtctaggggtggggtatctagcaggatgtctagttcacgcactgggtgaaaaacaaccagagctgcagataagtgaacgagatgttctctgtgttcagattgctggactttgtcatgatctcggtcatgggccattttctcacatgtttgatggacgatttattccacttgctcgcccggaggtgaaatggacgcatgaacaaggctcagttatgatgtttgagcaccttattaattctaatggaattaagcctgtcatggaacaatatggtctcatccctgaagaagatatgcgctttataaaggaacaaattgtaggaccacttgaatcacctgtcgaagattcattgtggccatataaagggcgtcctgaaaacaaaagcttcctttatgaggatagtatctaataaaaggaaatgggccttgatgtgggacaaatgggggntttatttttgcccaggggacttgcccttccat

SEQ ID NO: 354954 - DNA, 382 bp, Homo Sapiens
atagacatggctttatttgctgattgagaagtggtccagccgtgggctagcagtcatttacatatcagtgaccaaatgcaaacatacccgtactaacagtgctttggtccatgacatacccttttgacagcccaaagctgaaacgtcaactctatctggggttacttgcttatacaaagatgttactctagcaattgttgcttgagggcaagaccagatgattgtcactagtaggaagaaagcagaagtgatgcagcttacactgcatagtccctacccttctggattaaatgaaaaagttgctcaaacataaacttgttcttacaaagtggataagattcaaaataagacaaatataaagatgccaaggctaaatacagat

SEQ ID NO: 354955 - DNA, 510 bp, Homo Sapiens
ctctttttatgcagatatttataatcttcatcctatatcagtaggaataactataaggtgccctacaaaaagatgtatgcaaacaaacatgttttaaatcaggtcagatatctgatgaaaaatacgaactaatgttaagagcaagtagtttcaacatactccaggaactgagaaacaaaacaaagcaattgtgggttttgagctccatatactcttagcaagtaagggggcgtcttgcccctatatatcatcttcccggattccactccctgttgtgggaatcgcgcccacccccatccgtgtgttgtagccactcacggtttgcatcaagagtgttttttgtaactgcctctggacttgggacagtgagtaggatcaaaaataaataatgtacatgacggggaagggaaaaacctgttggagttgcttccagccagccacgctccgggccagcatgttggaatccagcgtggagcagatgcagtaaaaatgtggttggttttctgtgtg

SEQ ID NO: 354956 - DNA, 782 bp, Homo Sapiens
  misc_feature (194)..(194): n is a, c, g, or t
  misc_feature (227)..(227): n is a, c, g, or t
ttctcacaaaccagtgttggccgacaggtgcaacctctgcctaaaagaatgcagggttaaccctttcacatgagtgctccattgccgccatgggctttttgtcaggaataaggtgcacccagcaagcatgtccagaaggccaagatagagtcatacaggcgatgtgcgtggctctcaagctcacaagactgctntgcgatcctcccaaggacatcctctaaaactancaatgaggttcaaagaaattaagccagaaataaaacccatgcaagtgttgtccagtaagcattttcaaaagaacatacgagggtatagtattttacacaaagtaggacctggcagtagtttctgaatgtctgcccttttttaacagtgattctccagggacttctgttgcactggagaacctatgttgttaacttctgattaaagctaagaaaagaactcactgactccactttgaaattacgtaattcacagaagggcacagagatattatggttttctgatggctggtattacctgactttagaggtaagacaggtatctctgtaagggcacatccagatcctcttgggcataaggcttaaataaaatgacatgccaaggttcagatgcttacccctgctaccaggtctatcagtttctattggctgggaagaatgttatttcacatgggtggtctgtaatagatttgggagtgcttgagaccctttgttttgtgggcctcagtgaacagactgaaaaagaaaatgacctggccaggaacagtggctcacgcc

SEQ ID NO: 354957 - DNA, 815 bp, Homo Sapiens
  misc_feature (285)..(285): n is a, c, g, or t
caggccctcggggtctcctctggactgctgaaaacacgcccctccttgccagctaggttggaccggtggccattctcagacccagatgttgaagggcagcttcccaggaaaggaggagaacaggggatctgctggctgtataatgtgccagatgttacttgaccacgggactccagccaggtccaatcttacaagtctcaaagtcttctctgcagcttaaccggcaatttaagaaaaatatagatgaacatcagtctctgacggagagtgtcttacagaaggggnagattcttcttcagtgcctgttggagaacaccccagttttagaggatgtccttgggaggatcgcaaagcagtctggtgagctggagagccacgcagatcgcctgtatgactctatcttggcctctctggacatgctggctggctgcacccttatccctgacaaaaagcccatggcggcaatggagcacccatgtgaaggggtttaacctggcatcttctcaggcagaggtgcaacctgtcggccaaacactggctagtgagaaaaaaatccttcaagaagtccttgcaagagccattcaacactgaagtcaagggggaaaccttcaatatactagctttaaaatgcctttctcctccctgaatggagggctgagttactatttttatttacaatgaatccttccaaactaaggttttccttttggtgcttctccacaaagagcgtgtagctttgcaatttttgataaaataagacgtgttgccttcccctctatcccattaaaaaagagcagataaagctcaaactataa

SEQ ID NO: 354958 - DNA, 427 bp, Homo Sapiens
  misc_feature (19)..(19): n is a, c, g, or t
tccccgctcggctgaaaanaggtttctaaccctggtttcgtatctaggatccatttctacccttggttaccctgcccacctggggatatccaaaaggcagagccccttggaagtgtcagacagtgatgggccagcttccttcccttcaagctccagccaaagccagcttcccaggaaaggaggagaacagggaaaagaatcactggtgcaatgtgtgaagacattttgctgtcagctggaagagctgatctgctggctgtataatgttgcagatgttactgaccacgggactgcagccaggtccaatcttacaagtctcaagtcttctctgcagctttaccgggtaatatgcggtcctggctctggcttgttccctcacaagagtgtggctaaattactcgattacaaagtaaaatctcaaataacc

SEQ ID NO: 354959 - DNA, 482 bp, Homo Sapiens
  misc_feature (378)..(378): n is a, c, g, or t
  misc_feature (428)..(428): n is a, c, g, or t
  misc_feature (447)..(447): n is a, c, g, or t
  misc_feature (462)..(462): n is a, c, g, or t
gccaaagtcctaaaaacaaaaacctctattaagggcctctgaatagttatctctgttccttcagttcctctgaagaattattttatactaggattctcaggttatctcctctcaatctctattgggatcactccactctgacttgtacactcattttcccactgatgtagctgttctcaagttagaagttaagttctcagtcttcattttatcagtcatctcagcagcattcattatggttcaggcactccctcctattttcttcgttagcttctatgacaccagtctcctcatttttctcctactctattaggctgttccttcttagtgtctttttctggactccttcattttggaccaggtttctaaatactggangtatgtcagggactctcaggtgtcttccatctgtaggtaaataaactcanggggggaatcttacccagnttcaggattttaagnaccatcttttcatggtggag

SEQ ID NO: 354960 - DNA, 1037 bp, Homo Sapiens
  misc_feature (32)..(32): n is a, c, g, or t
aaccctccctccctcatctggactaccagttnaaatggggaacccccgtcttcctcagtggtgctccacagcaattcccctaatccaccaaactatggtacaaatcccaggaaccccacctgcttctaccagcccgttttcacaactagcagcaaatcctgaagcatccttggccaaccgcaacagcatggtgagcagaggcatgacaggaaacataggaggacagtttggcactggaatcaatcctcagatgcagcagaatgtcttccagtatccaggagcaggaatggttccccaaggtgaggccaactttgctccatctctaagccctgggagctccatggtgccgatgccaatccctcctcctcagagttctcttctccagcaaactccacctgcctccggggtatcagtcaccagacatgaaggcctggcagcaaggagcgataggaaacaacaatgtgttcagtcaagctgtccagaaccagccccacgcctgcacagccaggagtatacaacaacatgagcatcaccgtttccatggcaggtggaaatacgaatgttcagaacatgaacccaatgatggcccagatgcagatgagctctttgcagatgccaggaatgaacactgtgtgccctgagcagataaatgatcccgcactgagacacacaggcctctactgcaaccagctctcatccactgaccttctcaaaacagaagcagatggaacccagcaggtgcaacaggttcaggtgtttgctgacgtccagtgtacagtgaatctggtaggcggggacccttacctgaaccagcctggtccactgggaactcaaaagcccacgtcaggaccacagaccccccaggcccagcagaagagcctccttcagcagctactgactgaataaccacttttaaaggaatgtgaaatttaaataatagacatacagagatatacaaatatattatatatttttctgagatttttgatatctcaatctgcagccattcttcaggtcgtagcatttggagcaaaaaa

SEQ ID NO: 354961 - DNA, 775 bp, Homo Sapiens
tatgctccatgtctaagccctcgtaagtcagtggtgcgatgccatccctcctctgcgaagtttatgctccagcaaactctacttgcttccgggtatcagtcaccagacatgtaggctaggcagcaaggagcgataggaatcagcaatgtgttcagtcaagctgtccagaaccagcccacgcatgcacagccaggagtatacaacaacatgagcatcaccgtttccatggcaggtggacatacgaatgttcagaacatgaacccaatgatggcccagatgcagatgagctctttgcagatgccaggaatgaacactgtgtgccctgagcagataaatgatcccgcactgagacacacaggcctctactgcaaccagctctcatccactgaccttctcaaaacagaagcagatggaacccaggacaagaagacagaagagttcttctctgtggtgactacagactagaggaatgctctacaggtgcaacaggttcaggtgtttgctgacgtccagtgtacagtgaatctggtaggcggggacccttacctgaaccagcctggtccactgggaactcaaaagcccacgtcaggaccacagaccccccaggcccagcagaagagcctccttcagcagctactgactgaataaccacttttaaaggaatgtgaaatttaaataatagacatacagagatatacaaatatattatatatttttctgagatttttgatatctcaatctgcagccattcttcaggtcgtagcatttggagcaa

SEQ ID NO: 354962 - DNA, 1897 bp, Homo Sapiens
ggatccaaactttcctttaaagagagtttttcataaagttgctaatgtaaactgatatgggtgttccaaggtccctcggcagggaagatttgctggtgattttcttcactccattttcctttgggtgagcctgcctgggaagggccatgaagtcagaatctccactctgcaaaaggaagaattccaggcagaagaggttctgacagggtgacatttccgtatattctctaggttcggacaagagccaggaagctggaagacagtttatcttaatatccaaaactaagtgggaatttttaaccttttcatgcacctattcatggccctacctggaaggaacttggcagttgggttgagccatcagccttcccagctattcagctctgttgagtagcccagagacaggcgtcacggtcagagattcagaacggtctgtgtcagtgaggcctgactcccaaagatggtagcaatttcccaggcttgcgctgtgctcagtcagcaagatgtggggcactgtcctatgactgaataaatagtaattcccatctttctatcgccagttaaaaataaacaacctaccaagtattattctttaaaactaagcatggatgttgatggctaacttctgcggcatataagctacagatctcaagttacttctctaactgtaagcatgtaaatgactttaactcctttctataagttatgattttaaattttcagataagaattgcattttaatatggatatgtgtgcccttaaaagctacagataccaaattttcctcgtccaggtctactcggacgaattttcccccttaatctggccttaaactgagactcggcccttgagagccagggcctggcccagcagtagttgctcatagacctggggaagcaggggcctgctggaaggaatcactagattgctgcaaaaactcacataatccacagtttcctctttttctttttaaaataagttatcaaaatgttttaaaaacactttatgagaccatagtactcagtgccttttgtgagacagtggggtcatttagccttcagcttccctgtttttgatgtagagaaaagcttctatttcactggcctcatcccacaagattgtgcgacctttccccgtcatagcctgtcgtgacaatcacgctattgaaagtggctttccagttaaaatgcaattggaaacttgacagtctctaaatgaattaaaagtttcctttggggctatttagcttaacagcagtctacaaataattaaagtgtgagcttaagaaaagtatctttgcggggagaaaaatgtcagatatttttaatgcccagctataaataattttggtgtcttgatatttatacatgcaaaatagaaaaaaaatgttcaacatttattgattgatagactgttaaaatttaatgtttggaataacatttggaagtagtagactttgcattaaaaaatggcttttctttaggaaagtataatcaattattttaatgaccatagcattcatggactcaaatgctgctgccacacacaactcaagtgctggaatatttttctacagtctctctgttctacggattatcttgtaaaccagtgttcaactagttttataactgaaaagctgcacatttttcacagtacaagccgtagtttttacctgtagtttggacttctctgttagaatgtaactgcattaccagcccttttaaaggcatctatctatcaaaggaaaatttgggtgttagattttcttgggaccgtttctgtaacctttgcccttcacaatatagaaaatattggttttgccattacattttaatgccaggtttaaaacctgttgaaagctgcagctttatacagctttcttctccgtggaaaagta

SEQ ID NO: 354963 - DNA, 668 bp, Homo Sapiens
  misc_feature (27)..(27): n is a, c, g, or t
  misc_feature (70)..(70): n is a, c, g, or t
  misc_feature (77)..(77): n is a, c, g, or t
taataaccaataatttaaagacccatnccatccagggactcaaaaggcggctggcccacacacaactcanagtgccnggaaatattttccctacagtcctcctctgttcctacggattatccttgtaaaccagtgttccaactagttttataactgaaaagctgcacatttttcacagtacaagccgtagtttttacctgtagtttggacttctctgttagaatgtaactgcattaccagcccttttaaaggcatctatctatcaaaggaaaatttgggtgttagattttcttgggaccgtttctgtaacctttgcccttcacaatatagaaaatattggttttgccattacattttaatgccaggtttaaaacctgttgaaagctgcagctttatacagctttcttctccctgtgaaatcactttgtttatgtgatggcatttaaaaaatagcatgttctttttaaactgaattttatatctaatcaatgtcttcagtcttgaagaagaatttgcattgttgtgtttgtatatagagtattgcagtgcatgaattagctttatgcattttattaaatgctgtttcaatgtggcattattgttgtggcttaatactactacctaaatgaggtttatactattaaaagtgaattaaagactaaaaaaaa

SEQ ID NO: 354964 - DNA, 511 bp, Homo Sapiens
gggtcttatacataacttaataattgagagtggcaattccgctggagctgtctgccaaaagaaactgcctacagacatcatcacagcagcctcctcacttgggtactacagtgtggaagctgagtgcatatggtatattttattcatttttgtaaagcgttctgttttgtgtttactaattgggatgtcatagtacttggctgccgggtttgtttgtttttggggaaattttgaaaagtggagttgatattaaaaataaatgtgtatgtgtgtacatatatatacacacacatacacatatattatgcatgtggtgaaaagaattggctagataggggattttcctgaacactgcaaaaatagaacgtagcaaaatggcttcagttatcacttttgggtgtctgtatcctaagaagtttctgaaaagatctaaagcctttttatcccatatcccaaattcttatgagccactcacagcaggcagcatatgttgaaataagttattactggt

SEQ ID NO: 354965 - DNA, 461 bp, Homo Sapiens
  misc_feature (445)..(445): n is a, c, g, or t
tgcaggcgggagcgctccctgccggactcttccacgtggcctttgcctggccccacgtgctctcaggaacctggtcccactgggaacagactcagagttatttttgtaaggacactcatctgtgccccacgtccagatccctggaggcagctgaccaatgatgggcggtgacccggtaaccgaggcggcaaggaggccaggtagtcccggcacctctcactctgcagagaccagcggcttcgtgggaggcctgtgggtcacacgtaggggctagagccagcctgcatcctgcccaccgggctccacttggagatcagcaggagggccagtgtgggacccctgctgccacctctcctgggcctgtgtcctttctggaaattaagaaggtgtgctccagagccaagaggagcaataagaaacctcgtgtgccagcttcttaagggtngcagtgcaagacccca

SEQ ID NO: 354966 - DNA, 2157 bp, Homo Sapiens
  misc_feature (18)..(18): n is a, c, g, or t
atgttgatgctgaaattnaagatccaccaattccagaaaaaccatggaaggttcatgtgaaatggattttggacactgatattttcaatgaatggatgaatgaggaggattatgaggtggatgaaaataggaagcctgtgagttttcgtcagcggatttcaaccaagaatgaagagccagtcagaagtccagaaagaagagatagaaaagcatcagctaatgctcgaaagaggaaacattcgccttcgcctccccctccgacaccaacagaatcacgggaagaagagtgggaagaaaggccaagctagcctttatgggaagcgcagaagtcagaaagaggaagatgagcaagaagatctaaccaaggatatggaagacccaacacctgtacccaatatagaagaagtagtacttcccaaaaatgtgaacctaaagaaagatagtgaaaatacacctgttaaaggaggaactgtagcggatctagatgagcaggatgaagaaacagtcacagcaggaggaaaggaagatgaagatcctgccaaaggtgatcagagtcgatcagttgaccttggggaagataatgtgacagagcagaccaatcacattattattcctagttatgcatcatggtttgattataactggattcatgtgattgaacggcgtgctcttcctgagttcttcaatggaaaaaacaaatccaagactccagaaatatacttggcatatcgaaattttatgattgacacgtatcgtctaaacccccaaggagtatttaaactagcactgcttgtcggaggaacttgactggagatgtgtgtgctgtgatgagggtccatgcctttttagagcagtggggactcgttaattaccaagttgacccggaaagtagacccatggcaatgggacctcctcctactcctcattttaatgtattagctgataccccctctgggcttgtgcctctgcatcttcgatcacctcagagtaaaggtgctagtgctggaagagaatggactgaacaggagacccttctactcctggaggccctggagatgtacaaggatgattggaacaaagtgtcggaacatgttggaagtcgtactcaggatgaatgcatcctccactttttgagacttcccattgaggacccataccttgagaattcagatgcttcccttgggcctttggcctaccagcctgtccccttcagtcagtcaggaaatccagttatgagtactgttgcttttttggcatctgtggtggaccctcgcgtggcatctgctgcagcaaaagcggctttggaggagttttctcgggtccgggaggaggtaccactggaattggttgaagctcatgtcaagaaagtacaagaagcagcacgagcctctgggaaagtggatcccacctacggtctggagagcagctgcattgcaggcacagggcccgatgagccagagaagcttgaaggagctgaagaggaaaaaatggaagccgaccctgatggtcagcagcctgaaaaggcagaaaataaagtggaaaatgaaacggatgaaggtgataaagcacaagatggagaaaatgaaaaaaatagtgaaaaggaacaggatagtgaagtgagtgaggataccaaatcagaagaaaaggagactgaagagaacaaagaactcactgatacatgtaaagaaagagaaagtgatactgggaagaagaaagtagaacatgaaatttccgacaggaaatgttgccacagccgcagcagctgctcttgcctcagcggctaccaaagccaagcacctggctgcagtggaacgaaagaaagatcaagtccctggtagctctcttggtcgagacacaaatgaagaaactagagatcaaacttcgacatctctgaacgagctggcaaactatcatggaccagagagaacagaagctctagaaacaacagaggcagcagttgcttactgaacgccaaaacttccacatggaacagctgaagtatgctgaattacgagcacgacagcacatggaacagcagcagcatggccagaaccctcaacaggcacaccagcactcaggaggacctggcctggccccacttggagcagcagggcaccctggcatgatgcctcatcaacagccccctccctaccctcc

SEQ ID NO: 354967 - DNA, 787 bp, Homo Sapiens
cacaaatgaagaaactagagatcaaacttcgacattttgaagagctggaaactatcatggacagagagaaagaagctctagaacaacagaggcagctgttccatgtggaagtttgctgaattacgagcacgacagcaaatggaacagcagcagcatggccagaaccctcaacaggcacaccagcactcaggaggacctggcctggccccacttggagcagcagggcaccctggcatgatgcctcatcaacagccccctccctaccctctgatgcaccaccagatgccaccacctcatccaccccagccaggtcagataccaggcccaggttccatgatgcccgggcagcacatgccaggccgcatgattcccactgttgcagccaacatccacccctctgggagtggccctacccctcctggcatgccaccaatgccaggaaacatcttaggaccccgggtacccctgacagcacctaacggcatgtatccccctccaccacagcagcagccaccgacaacaccacctgcagatggggtccctccgcctcctgctcctggcccgccagcctcagctgctccttagcctggaagatgcagggaacctccacgcccaccaccatgagctggagtggggatgacaagacttgtgttcctcaactttcttgggtttctttcaggatttgtcttctcacagctccaagcacgtgtcccgtgcctccccactcctcttaccacccctctctctgacacttggcgtgtcgggtcctcaggccgacactcaaggg

SEQ ID NO: 354968 - DNA, 952 bp, Homo Sapiens
agatattccaacgtgcaagtggctggaccagtggacagaactagctcaaagatttgcatgccaatataatccatccctgcaaccaagagctcttgttgtctttgggtgtattagcaaacgagtgtctcatgggcagataaagcagataatccgtattcttagcaaggcacttgagagttgcttaaaaggacctgacacttacaacagtcaagttctgatagaagctacagtaatagcactaaccaaattacagccacttcttaataaggactcgcctctgcacaaagccctcttttgggtagctgtggctgtgctgcagcttgatgaggtcaacttgtattcagcaggtaccgcacttcttgaacaaaacctgcatactttagatagtctccgtatattcaatgacaagagtccagaggaagtatttatggcaatccggaatcctctggagtggcactgcaagcaaatggatcattttgttggactcaatttcaactctaactttaactttgcattggttggacaccttttaaaagggtacaggcatccttcacctgctattgttgcaagaacagtcagaattttacatacactactaactctggttaacaaacacagaaattgtgacaaatttgaagtgaatacacagagcgtggcctacttagcagctttacttacagtgtctgaagaagttcgaagtcgctgcagcctaaaacatagaaagtcactttcttcttactgatatttcaatggacaatggtccctatggatacatatcccattcatcatggtgacccttcctatagggacactaaaaggagacttcaggcatgggtcctctcccaaaggttctgaaggataccttgcagcaacctatccacctgtcgggccagaccagtcccgagccaggaaatccatgaaggctggactatgggcaacttctcaagccaac

SEQ ID NO: 354969 - DNA, 476 bp, Homo Sapiens
ctttatcttcccccaaagagaaaacatgggtaatttaggaagataagctgctttatttttaactgcagtgtgttttgaaagagactatgtcatgattcatcttactagcctcaaacatatcttctttgccaggactcgcctctgcacaaagccctcttttgggtagctgtggctgtgctgcagcttgatgaggtcaacttgtattcagcaggtaccgcacttcttgaacaaaacctgcatactttagatagtctccgtatattcaatgacaaggtaagcaaactttgccttgaggttcctagattactcaaatttagtactcttccatcttttcttgttgctattcttttaaaatcacaagaagtccataacttaagtaggaatttgtataatgtaacttattgtgagtatatttccttaccagctcataaagaactatgtaaacttgaatgcatatttcttacataaaaatagca

SEQ ID NO: 354970 - DNA, 1705 bp, Homo Sapiens
ctttgtgaaaggggccggttaaaacccccaataagtctttgatgaaggccggcccaggggtagggttcggcaatcgttgagcatgcaccgagccggagttgggtccttaaacgcggtgtccatccgaggaggaattgtcgttcggggaactgttagacatgtcaaaagctggaggtttttatgatgaagtccttgccagaagttgtgtttgtcccttgtaatattttaataaggtatttccgttaccaaccaaaacttctcccatatttacatcgatagaaaggtaataatgaggtatggtttgcttggattgcattaatcgctgtgcaataacccgacgaatgttgctgattgggatatctggaaagacacctgtaggaactggtgccattccaggacctgtgggaggcacaacaactgccagagcaggagcaacttaactaggcacaaaagagtcgatatccttcttggtgaatctaccatctggtcctgtcccttttacttgtgtaagatcaatccctttctctactgccaacttctttgcaagagggctaacaaacacccttccctttggtccagcaggagtagctgggcagggtgctgaaggtgtaggagctaaaggctggggagttggaggaacagcggccaccgggggtggggtaggtggtggcacttgtggttttaaatctgttacttcggttggcctatagtcagcaaatgctgatatatctgcctctttttctacaatgatacagagtggggttcctagagggacatctcttgtgccttcagggaccaggatttttgccagataaccttcttcctgtacttcaaaacctatagtggctttgtcagtttctatctctgccagtaagtctccttcacttagcttctcacccacttttttttcccatctctgaactgtgcccatggtcatggtgggagagagggcaggaagaagtacctgcatgtgagggggatatgagctaccaggagcctgagcagaaggtgtaggtggcgaagcagtggcagcaggggttggtgctggggccgcttgtggggtaggtgctgctgaggaatcccgtgtataatttttaaaggcctcaatatcctcaggcttgccaactgtgatacagatgatcgctccgatgggaacatccctggtaccttcagcaacaagtatctttgccatataacactcctccaggctctcaaatccaacagtggctttatcagtttcaaccctctgcaaattaggtcaccttcacttgattttgtcccccctcttttttttcccaacgggctatggtgcctgcctgcattgtgggggaaagagaaggcaatggaaccttctgatgcgggggaagactgtaatagcggcggccgggcgaccccaaaagctgcagcagtaagcggttccgcggcgtggccccagaactgggggtccagccgcacagtgcccggaccccgccataccctgtagtcacgctgttgcgacgaacgggagccgggccagatcgcgaggtcactcgtggagttccgggtacctcctgcaaggccgtccaccgagcctcgagtcccgcccatggggctacattctgagcccgtcgcgcacagacgcgccacatagtgccaccaaccccccacaccccaaaaccaacgccgtctccgcctcgcatataaaacgggcgtccctactacgcca

SEQ ID NO: 354971 - DNA, 1132 bp, Homo Sapiens
  misc_feature (971)..(971): n is a, c, g, or t
atcaggccaaatcggccgagctcgaattcgtcgagagcggagtttttacttgaggcagacaggaagacttctgaagaacaaatcagcctggtcaccagcttttcggaacagcagagacacagagggcagtcatgagtgaggtcaccaagaattccctggagaaaatccttccacagctgaaatgccatttcacctggaacttattcaaggaagacagtgtctcaagggatctagaagatagagtgtgtaaccagattgaatttttaaacactgagttcaaagctacaatgtacaacttgttggcctacataaaacacctagatggtaacaacgaggcagccctggaatgcttacggcaagctgaagagttaatccagcaagaacatgctgaccaagcagaaatcagaagtctagtcacttggggaaactacgcctgggtctactatcacttgggcagactctcagatgctcagatttatgtagataaggtgaaacaaacctgcaagaaattttcaaatccatacagtattgagtattctgaacttgactgtgaggaagggtggacacaactgaagtgtggaagaaatgaaagggcgaaggtgtgttttgagaaggctctggaagaaaagcccaacaacccagaattctcctctggactggcaattgcgatgtaccatctggataatcacccagagaaacagttctctactgatgttttgaagcaggccattgagctgagtcctgataaccaatacgtcaaggttctcttgggcctgaaactgcagaagatgaataaagaagctgaaggagagcagtttgttgaagaagccttggaaaagtctccttgccaaacagatgtcctccgcagtgcagccaaattttacagaagaaaaggtgacctagacaaagctattgaactgtttcaacggggtgttgggaatccacaccaaaccaatggctacctctatcanccagattggggtgctgctacaaggcaaaagtaagaccaaatgcagaatacaggagaatctgaaactagtgggaaataagagatggatggaagcactaaagcaatatggctatggactattccaataaagctccttgaaaagggactgaattcttctgaatg

SEQ ID NO: 354972 - DNA, 1042 bp, Homo Sapiens
ttgtgaatacgattcaagccgtgtcacgccattcaattcgttttctcgcctcatgtttttcctcgaaaaaactgggccccgccagtgcgaatgtcacatctgtgttaccaacctggggctttgtcccccaaaggtgttctctccgactgaactctcgtgtgcatgtccacgttgccgtctgtccaccttgcgtgcacgcctaccttaatgaagcttcaagacccaggagaacttaaaggtactggttgtcaggattcagccgaatggcttgcctcagagggtcaatggcgttctgagatggtggccagttgtccagacggtagcttgctattgccagtccagaggtgaattctgggttctttggcttcttttccagagcctgtctcaaagcacaccttcgctctttcattttggtttcctccacactttaaccgtgtccacccttcctcacagtcaagctctggactctcaattctatagggactggaaaacttctcacagacatgtctcaccttgtctacataaatctgaacgtctgagagtcggcccatgtgatagtagacccaggcatagtttccccaggtgaccagacttctgatttctgcctggtcagcatgctcttgctggattaactcttcagctttacgtaagcattccagggctgcctcgttttgccctttgaggtgctttagataggccagtaggttgcacattgtggctttgaattcacgattctgaaactcagtccggtaaaatactttgtcttcaaaatcatccaaggaattttctccctccatcaagttccaggtgaaatggcattttagttgccgtaggctgctctccaaggaattcttattgttctcactcatggttgcagtgcaattctcagctgttcggcagggctcggttcaggcagctgcactcttcagaaatcttcctcttctgccaccaataaatgctgaagagacctatatatacaagtggcctctggttcctttttgtttgtttcccttcagctgacgttacaaagggaaagtccgct

SEQ ID NO: 354973 - DNA, 752 bp, Homo Sapiens
atattttatatgctgagagagttgtctcagacagcaaagattcaaagaacgagatttgaagcataattccaaggacttcaatgataagctcccaaataatgaagatagagtcagaggaagttttgcttttgattcacctcatcagtacacgcctagtgaaggaactccttactgtttttcacgaaatgattctttgagttctctagattttgatgatgatgatgttgacctttccagggaaaaggctgaattaagaaaggcaaaagaaaataaggaatcagaggctaaagttaccagccacacagaactaacctccaaccaacaatcagctaataagacacaagctattgcaaagcagccaataaatcgaggtcagcctaaacccatacttcagaaacaatccacttttccccagtcatccaaagacataccagacagaggggcagcaactgatgaaaagttacagaattttgctattgaaaatactccagtttgcttttctcataattcctctctgagttctctcagtgacattgaccaagaaaacaacaataaagaaaatgaacctatcaaagagactgagccccctgactcacagggagaaccaagtaaacctcaagcatcaggctatgctcctaaatcatttcatgttgaagataccccagtttgtttctcaagaaacagttctctcagttctcttagtattgactctgaagatgacctgttgcaggaatgtataactccgcaatgcc

SEQ ID NO: 354974 - DNA, 670 bp, Homo Sapiens
ggccctttctgtctcccatgcccgtcgcctgcagaaagtgatctttccgagacaggacgatgtgctcatctccttcctgcctctggctcacatgtttgagagagtaatccagtctgtcgtctattgccacggagggcgtgttggcttcttccagggagatatccgccttctctcagatgacatgaaggctctatgccccaccatcttccctgtggtcccacgactgctgaaccggatgtacgacaagatcttcagccaggcaaacacaccattaaagcgctggctcctggagtttgcagcaaagcgtaagcaagccgaggtccggagtggaatcatcaggaatgatagtatctgggatgaactcttctttaataagattcaggccagtcttggtgggtgtgtgcggatgattgttactggagcagccccagcatcaccaacagttctgggaatttctccgggcagctctagggtgccaagtttatgaaaggttatggccaaactgagtgccacagctggaatgtaacctttcaccactccctggcgactgggactcaagggcaagtaaggggcgccactttccctggcaatcatatcaagcctcgtttgaatgtttgaggaaactggaacttctggggccctgcaaaaggaaaaagggaaaaaatttttt

SEQ ID NO: 354975 - DNA, 1099 bp, Homo Sapiens
  misc_feature (3)..(3): n is a, c, g, or t
  misc_feature (5)..(5): n is a, c, g, or t
  misc_feature (10)..(10): n is a, c, g, or t
  misc_feature (12)..(12): n is a, c, g, or t
  misc_feature (15)..(15): n is a, c, g, or t
  misc_feature (24)..(24): n is a, c, g, or t
  misc_feature (32)..(32): n is a, c, g, or t
  misc_feature (63)..(64): n is a, c, g, or t
  misc_feature (68)..(68): n is a, c, g, or t
  misc_feature (73)..(73): n is a, c, g, or t
  misc_feature (920)..(920): n is a, c, g, or t
tcngntttancngtngggtagttnccataagnacctgttagctagcagtgattatgaaggcanntttntgttntgggatggattcacaggacagaggtcaaaggtctatcaggagcatgagaagaggtgttggagtgttgactttaatttgatggatcctaaactcttggcttcaggttctgatgatgcaaaagtgaagctgtggtctaccaatctagacaactcagtggcaagcattgaggcaaaggctaatgtgtgctgtgttaaattcagcccctcttccagataccatttggctttcggctgtgcagatcactgtgtccactactatgatcttcgtaacactaaacagccaatcatggtattcaaaggacaccgtaaagcagtctcttatgcaaagtttgtgagtggtgaggaaattgtctctgcctcaacagacagtcagctaaaactgtggaatgtagggaaaccatactgcctacgttccttcaagggtcatatcaatgaaaaaaactttgtaggcctggcttccaatggagattatatagcttgtggaagtgaaaataactctctctacctgtactataaaggactttctaagactttgctaacttttaagtttgatacagtcaaaagtgttctcgacaaagaccgaaaagaagatgatacaaatgaatttgttagtgctgtgtgctggagggcactaccagatggggagtccaatgtgctgattgctgctaacagtcagggtacaattaaggtgctagaattggtatgaagggttaactcaagtcaaattgtacttgatcctgctgaaatacatctgcagctgacaatgagagaagaaacagaaaatgtcatgtgatgtctctccccaaagtcatcatgggttttggatttgttttgaatatttttttctntttttcttgtccctcctttatgacctttgggacattgggaatacccagccaactctccaccatcaatgtaactccatggacattgctgctcttggtggtgttatctaatttttgtgatagggaaacaaattcttttgaataaaaataaataacaaaacaataaaagtttattgagccac

SEQ ID NO: 354976 - DNA, 370 bp, Homo Sapiens
  misc_feature (346)..(346): n is a, c, g, or t
ctctttgaatcgctgctgttcacagttgcacaaaaaggtcccaaaaagacagctataaaggtgatccaaaattgtaatcaagaatagctcattaaactcgaatgctgaaggaaactgccttgtcatttgccaaacacaatcaacaaactgcagaaatatgggagatcggtcagcatccgcatggttgtcattaccatggcccactcgcagtgcaaacctgtgtccaaagcttatccactccttttctacgagagtttcaaatcctttaatggtcctgtagtaacttgtccaacattagcatagccagagatgtgagctggggctgttcgggtcccaaccgtcgctngcaatgcaccaccacagatgtttt

SEQ ID NO: 354977 - DNA, 1734 bp, Homo Sapiens
  misc_feature (149)..(152): n is a, c, g, or t
  misc_feature (159)..(159): n is a, c, g, or t
  misc_feature (1620)..(1620): n is a, c, g, or t
cgtcacccaggccttgtctcccgagtcattggcgtcgtggttcaaaagaaatggaagaaaaggagcgatgtgaccgattgtgttcggtcctcctgctttgaggcctggcatttgcagagggaaacagcaagaaaatcgtggggattttnnnngggggtnggagggaagggtggggaaacggaaacaaggtcttacattttatgtgtttttttaaattctgcactttgacagtggtagcaaaataaaagtaatccaaaagttatttttctattgagaagagagaagaggtgggttttatttttttccttttgattccaatcttttctcccagtgacaaagcataaatcatggacaccagagaataaggtggacctcaggaatccggaaaagactgagaagcttacattcttcctctagagggaagagtggggtgtttatagccatctctggaacctaaaacaaaaaacatgagttgtgtgccatggaaaggagacaaggccaaatctgaatcattggagctgccccaggcagcacccccacaaatctaccatgagaaacagcgcagggagctttgtgccctccacgccctcaataacgtcttccaggacagcaatgccttcacccgggatacgctgcaagagattttccagaggttgtctccaaacaccatggtgacacctcacaagaagagcatgctgggaaatggcaactacgatgtgaatgtcattatggcagcacttcagaccaaaggctatgaagctgtttggtgggacaagcgcagggatgtcggtgtcattgccctcactaacgtcatgggcttcatcatgaatctgccctccagcctatgctggggtccactgaaactgcccctcaaaaggcagcactggatctgtgttcgagaggtgggaggggcctactacaacctcgactccaaactcaagatgcccgagtggattggaggcgagagcgagctcaggaagtttctaaaacatcatttgcgaggaaagaactgtgaactcctgctggtggtaccagaagaggtagaggctcatcagagttggaggaccgatgtgtaacagttctgcccaacctccctctcgcctcagccccttcagtcctctgtgacgtgctgtggcctctacagtgggtctgcccttgccacttccccaaacatctcatcaagtttttccccttcagatctgacagtgcaataggacagacgtgtggactgttataagaactactcagtgttttgttcctgggcaaggaaggtaggagttctgtgcacttaaggccagtggtcacaaacccttgttttatttaagagacagaggagaaagtggagcggggagggaatcctagcttattttcccttttctatgaggacttgacacaggttctgctgagttgtcactgctgctccagactcacctagagatgctgcctccactttccatcctgtctgggtctgaaaacagtgggtctgcagatagtgcccacaaaccccatgtgactggtttgaaggacccagagcataaaggtctctcaggaaaccatgtccaaaaccctagcagcggtacagcatgctgtctccaaccttattcccaggttaagggtggnttatggcataccgggagggtttttggtggtgtttgaaaatgatttacctctggggccaggctgagggaatggacaattgggtgcgtgaacccaccctgttaaggatttcaggcc

SEQ ID NO: 354978 - DNA, 251 bp, Homo Sapiens
taattactaagaaaaaaattggtgagttcagtagctttggtattatgagtgcaaatcataatagctccaatgtgaaaaacaaaatcaaaagtataacttgtcacttaatgttagaaaattgcctaaaatgcagtgtaataaataatctctgtaccaaatagtaatttaaatggggtaattttctgcaaggaaaatgtactgtttttatgtttccaaccctcttgaattaaaataaaaacaacttcttttct

SEQ ID NO: 354979 - DNA, 1078 bp, Homo Sapiens
gctgggtggcgaattcggcacgaggcacccagtgatgacatggacagcatcatcttcccaaagccagaggaagagcatttggcctgtgatatcaccggatccagttcatccaccgatgacacggcttcactggaccgacattcttctcatggcagtgatgtgtctctctcccagattttaaagccaaacaggtcaagagatcggcaaagccttgatggattctacagccatgggatgggagctgagggtcgagaaagtgacagtgagcctgctgacccaggcgacgtggaggaggaggagatgaacagtatcactgaagtgcctgcaaactgctctgtcctaaggagctccatgcgctctctttctcccttccggaggcacagctgggggcctgggaaaaatgcagccagcgatgcagaaatgaaccaccggagtttcaatgcagaagacttacaggagcactgttgtcagcaaaccgcccagtcataaggagaaccatgagctcgctttaccccttccggagtgcacaactgcgggcctggcaataatgcagcagtcgatgcagaaatgaaccacagaagtttcagtctagaaggcttgacaggaggagctggtgtcggaaacaagccatcctcatctctagaagtaagctctgcaaatgccgaagagctcagacacccattcagtggtgaggaacgggttgactctttggtgtcactttcagaagaggatctggagtcagaccagagagaacataggatgtttgatcagcagatatgtcacagatctaagcagcagggatttaattactgtacatcagccatttcctctccattgacaaaatccatctcattaatgacaatcagccatcctggattggacaattcacggcccttccacagtaccttccacaataccagtgctaatctgactgagagtataacagaagagaactataatttcctgccacatagcccctccaagaaagattctgaatggaagagtggaacaaaagtcagtcgtacattcagctacatcaagaataaaatgtctagcagcaagaagagcaaaaaaaagg

SEQ ID NO: 354980 - DNA, 566 bp, Homo Sapiens
tgtgtgacgggtggcacactttcagccttggatcctgcacattctgatgtgaaaattccacgatagggcaaaagcatgccactccacactaatgctgccctctcactaaattaaaccttggaaaaataagatgtggcttggctttaaaactcagtgaactatctttatggtacagttggtttccatagctgtaaacacaaaagatctatggtttctgcctacccaggatagtcttgtctctagacaatgtattgatgatgcaaatgttctggaactaaatagtggtgatggtggcacaacactgtgaatgtactaaatgtcactgatttgtacgtatttaatatgaattaaatgttaaaatggtgaattatatttatgtatattttaccataataaaaatatgcattggaagatgcattttttgtgaccctgagttgtaactgtatttttatttgtgacatgtatataccacctacctcatagtaagccctgatgtttgaatgcatatatttacatctgctttttgcaaatctcaggtctgagtgttccactctgtagcatttggg

SEQ ID NO: 354981 - DNA, 467 bp, Homo Sapiens
  misc_feature (49)..(49): n is a, c, g, or t
cccccagttgtgtgaagggtggccaacacttccagaactgggaaccccngccacatcctgatgtgtaaaatccccacgatagggcaaaagcatgcccactcccacactaatgccgcccctctcactaaattaaacccttggaaaaataagatgtggccttggcctttaaaactcagtgaactatcctttatggtacagttggtttcccatagcctgtaaacacaaaagatcctatggtttcctgccctaccccaggatagtccttgtctctagacaatgtattgatgatgcaaatgttctggaactaaatagtggtgatggtggcacaacactgtgaatgtactaaatgtcactgatttgtacgtatttaatatgaattaaatgttaaaatggtgaattatatttatgtatattttaccataataaaaatatgcattggaagatgcattttttgtgaccaaaaaaaa

SEQ ID NO: 354982 - DNA, 853 bp, Homo Sapiens
cggggcggagcggctcgagcagcggcgggctggcaggcggtcgtccggccggggacccggcccgggaccggcggcgcgcggcggccgaggccagctccaggacacgcgcgccccgagcctgggaggcatgctgaagccaggcggccggcaggatgagtgtgaaagaggcaggcagctcgggccgccgggagcaggcggcctaccacctgcacatctacccccagctgtccaccaccgagagccaggcctcgtgccgcgtgactgccaccaaggacagcaccacctcggacgtcatcaaggacgccattgccagcctgcggctggacggcaccaaatgttatgtgctggtggaggtcaaagagtcgggaggcgaggaatgggtgctggacgccaacgactcgcctgtgcaccgggtgctgctatggccccggcgggcacaggacgagcaccctcaggaggatggctactacttcctgctgcaggagcgcaacgcagatggaaccatcaagtacgtgcatatgcagctggtggcgcaggccacagccacccggcgcctagtggagcgtggcctcctgccacggcagcaggcggactttgatgacctgtgttaacctccccgagctaaccgagggcaacctcctgaagaacctcaagcaccgcttcctgcaacaaaagaatctacaacgtacgcggggagcatcctggtggccatcaacccctttaagttccctgccatctacaacccaaggtacgtgaagatgtttgagaaccagcggctgggcaagctggagccacacgtcttcgcgctggccgacgtggcctaatacaccatgctcaggaagccgcgtgaaca

SEQ ID NO: 354983 - DNA, 859 bp, Homo Sapiens
  misc_feature (466)..(494): n is a, c, g, or t
  misc_feature (622)..(648): n is a, c, g, or t
agaagggtaaaattccctttcccccataatatccagtagggtataaataaggggaggtaagggtatatatattccatccattcggtcattcaggggagggttttaccccaaaaaggattagaaacggtatgggtaatagagtaaattccaggagtggtgcaggccaggctgtaggaaggcagagccagcattatagccatttttaaactgggcactgtcaaaacacagaaagctttatcttaagggaaaatttatttcttattttgtatcaacaccagtatcactggtttgccattaaatagtggccctggaaaggcttgcttacgcagcctaggtccaaattctttactactaatggctacagctaaagactttgtaagtatacatttactccagttagtaaaagggtaaacttttggagttgagatttcatttcacaatggcatatttaccatttaagaatgtnnnnnnnnnnnnnnnnnnnnnnnnnnnnncccgattttgatacatagaaatgagttctaaactttgaaaccagcccagtaacaaagcaattttgattcttatgtaataaatactacataatttctaggctaaatcttgccaaatactatccaagacnnnnnnnnnnnnnnnnnnnnnnnnnnngtggacaccttttactcacacttaatactagtcaattttccaggaattttttgggcagggaatatccccaaatcagagaacagaaactttaccgaaccgatgacactatccccgactcccgcttgctgccacgtctttcttcttgcttggccgctgccgtccgtcgtcctcccagcagcagcagcactagcagaaaaccaagactgccccc

SEQ ID NO: 354984 - DNA, 1006 bp, Homo Sapiens
  misc_feature (78)..(78): n is a, c, g, or t
  misc_feature (97)..(97): n is a, c, g, or t
  misc_feature (103)..(103): n is a, c, g, or t
ctgtggagggtgggcatttagtggtgacccttgcaccagggttttctaacagatgaccctgtgaatcataatttaaanctgcatatattttatagcnagtcanatttgccctctcaccctatatggccataaactgcctaagcactcaggcctcccactcatcaacccctttgaccagagaaagaagcactctggttctctatccccttgtcacatagagagttggtcatggggcctctggctgtgcccttcacataacagaatgacttgccatctgcctgcaccaaacccaggatgtggaagacatctccccacaactgccactgctcaccaggacaagctgcccttcctgtctccacctctcagtccccctagaatggatggctggggagaggtggaggctgacagctgagacgtaatgtcagatatgatctaggagggcggatcaccggaatccgggaccatacaagtaacatggtttccatggcaactgcttgctcctttgaattaagacagcagtcagttgtcattgccatgacaaggcctctatctccaggcacaatgtccctgctgtctcctaatccaatggacttgctctcaccccagggatgaaacacccagaaactcacttctcagtcacttccacagccgatgactcagaagagccaaacccagaatggggcctctcttttccccatcacagactcccctgacaacctttcctggcgtaactagaggagtcccagtgcaggataggccctaaacgtttgttaaataaacaggtgcatgaaaggagcctaaggccattgttgatatccactctcttctttccacttccttctcatctttttctccatgttttatgcttctctgattccctcttctgcctgccaccagaccagccccagccttttaattcctctccattttcactccttccagcctctgtccctgaactgccactggcaacccatgggacctcaaggaccagagactgcttgatcat

SEQ ID NO: 354985 - DNA, 884 bp, Homo Sapiens
  misc_feature (18)..(18): n is a, c, g, or t
  misc_feature (82)..(82): n is a, c, g, or t
agtccatctgcggattgncctctaacaaggtgtggaagaaaacggaggcatagattctctgccattcagactgatgttacanggatgcacggcagtcaagacgttattattaaagatgaagagagttcttcaagagagtgcagacatgagtccagcaagcagtaccacgtcacttcctgttagtcctcttactgaagagccagtgcctttcaaggatataatgaaagatgaatgctcgatgctcaagctgcagctgaaagagaaggatgaactcatttcccaacttcaggaagagctgctcccgaaaattttgtgttccatgagaggaggttttatttgcttggctgtgtttcttgaagattctactgatgtcttcagtgatatgcatgcccccattaaagattctaaagcaaactactacacgtaggccatcatgttccaagtttttgaaagttcatctttttcatcttgttgataaatttcatcaacttttatgtagggaaaagtccggcatttacagaaggcttttgcttcaagagtagataaatccacacagactgaactactatgctatgatgctaccgtgataagctgctattctgctcatcacaaggagttagagtcctaattatttaaataaacagaaggaagaaaggaaggaaattaattttgacaaaggacctgaataatccataaaccagatgcctttagtgaaaacgaagtaagatcagctctggatacctcctaactcttcccctccttctcctgatgagggagaagtggaggcccaaggaacaatgagcaagtttgtaacaacacgaatggggaaggatgggaaagagaccagaatcggtggaggggttaaacttgaaaagactagagac

SEQ ID NO: 354986 - DNA, 466 bp, Homo Sapiens
  misc_feature (13)..(13): n is a, c, g, or t
  misc_feature (28)..(28): n is a, c, g, or t
  misc_feature (85)..(85): n is a, c, g, or t
aaaccaattggancactgccctcctcantgtttaaacaacctcctccccttgccaaaggcctgttgttatgtcctggggtaaganggaccatgggggggtcccctaagcatgccagccatgccacctgtccagagcatcctgtagcccacagccccggcagaggaaggtagggacccatgcgggggcaaaacacaacaaaaacccaaacccaacaaggaagtacaaagaacaaaataaagaagagaagtccccagatggtagagagcagtcatatccttacccctagatgttcatcccagcagaagaaagaagaaggtgttggggtaggattcttcagaggttagcctggtactttctcatcagacactagcttgaagtaagaggagaattatgcttttctttgctttttctacaaacccttaaaaatcacttgttttaaaaagaaagtaaaagcccttttcattc

SEQ ID NO: 354987 - DNA, 973 bp, Homo Sapiens
  misc_feature (205)..(225): n is a, c, g, or t
atactgcaccactgaagatggatcatcccacagcagcccaggactgaataagccatgctcgcccaccaggcttctttctgacccctcatgtattaagcatctccaggtgacctactgtctgcctatattaagggtccacacggcggctgctgcttttttttaagggggaaagtaagaaaagagaaggaaatccaagccagtatannnnnnnnnnnnnnnnnnnnnaagaagaaaaaagttcatcttcacaaggtgcttcagacttggtttcttagctagaaaccagaagactacgggagggactatcaggcagagaactatgagtcttattttattactgtttttcactacctactcccacactggacaatcaattgaggcaacctacaagaaaacatttacaaccagatggttacaaataaagtagaagggaagatcagaaaacctaagaaatgatcatagctcctggttactgtggacttgatagatttgaggtacctagttcagaactccctagtcaccatctccaagcctgtcaacatcactgcatattggaggagatgactgtggtaggacccaaggaagagatgtgtgcctgaatagtcgtcaccatatctccaagcttcctggcaaccagtgggaaaagaaacatgcgaggctgtaggaagagggaagctcttccttggcacctagaggaattagccattctcttccttatgcaaagattgaggaatgcaacaatataaagaagagaagtccccagatggtagagagcagtcatatcttacccctagatgttcatcccagcagaagaaagaagaaggtgttggggtaggattcttcagaggttagcctggtactttctcatcagacactagcttgaagtaagaggagaattatgcttttctttgctttttctacaaacccttaaaaatcacttgttttaaaaagaaagtaaaagcccttttcattc

SEQ ID NO: 354988 - DNA, 738 bp, Homo Sapiens
  misc_feature (673)..(673): n is a, c, g, or t
aggaaatttaagtcagtcctcaaaaattcatcttcatattctccaaagtcccctactgttacctaaggcagccagctgtgttggtgagcaccgattcccactcaatatggcgtggcttacagtcttcattaggttcccgctcccaaccagaatgaggaatgatcacttcatctgtcaaggcatgcagtgcatggtccacaatctccattttgattgagtcatgggatgaaagattccacagggttccggtaataacttcagtaaggtccatatcacgagcctttcgaagcaatcgcacaagggcaggcacaccatcacagttttttatggcaatcttgttatcctggtcacgtcccaaagagatattcttgagagctccacaggctccaaggtgcacttcctttttgggatggtctaacaatcccaccagtactgggatgcccttgaacttccgcacgtcagtcttcaccttgtcattgcggtagcataagtgttgcaggtaagcagctgcattggacttgacacgcatccaagcggaatccaagcatggcgatcacctctggcagctctggctgtctccaattaggaggtggaggccctcctttgcgcaggctatccaagcttgctaaacttcctcgctcatgctgggccaaaggagcccagtagtattganccgatggcacctcctcaccaatcatgtcttcatagctcctgaggcgccgacgtgggtcagagggt

SEQ ID NO: 354989 - DNA, 653 bp, Homo Sapiens
aagattgccataaaaaactgtgatggtgtgcctgcccttgtgcgattgcttcgaaaggctcgtgatatggaccttactgaagttattaccggaaccctgtggaatctttcatcccatgactcaatcaaaatggagattgtggaccatgcactgcatgccttgacagatgaagtgatcattcctcattctggttgggagcgggaacctaatgaagactgtaagccacgccatattgagtgggaatcggtgctcaccaacacagctggctgccttaggaatgtaagctcagagaggagtgaagctcgccggaaacttcgggaatgtgatggtttagttgatgccctcattctcattgttcaggctgagattgggcagaaggattcagacagcaagcttgtagagaactgtgtttgccttcttcggaacttatcatatcaagttcaccgggagatcccacaggcagagcgttaccaagaggcagctcccaatgttgccaacaatactgggccacatgctgccagttgctttggggccagaagggcaaaggtgagtcttggttcctgtttcttagtctttaatgtgggatagggaaaggagggaacactttagcttaaggtacaaatactgcacagtatgagagtctccgtcgaact

SEQ ID NO: 354990 - DNA, 468 bp, Homo Sapiens
  misc_feature (61)..(61): n is a, c, g, or t
  misc_feature (80)..(80): n is a, c, g, or t
  misc_feature (123)..(123): n is a, c, g, or t
  misc_feature (156)..(156): n is a, c, g, or t
  misc_feature (163)..(163): n is a, c, g, or t
  misc_feature (271)..(284): n is a, c, g, or t
tccttgcacccttcctcttcagcacccagtaggtgcttaataagtgtttgctgcattggantatctccctattccttctnatttgccctctagcttcccataccttctccaagtgtcttcctncctttctttgtctggctccctatgactttctanttttttntcctccgtgtggttcccattgttttctgtcctgtctctatcttagtctttgtctgtcttcctcctttcctcaaatgtctcaactctctctccccaatttccccatttnnnnnnnnnnnnnngtgccaaacttccttggaactgagccgctctggggggagaggaccttggatagaggggaggaaatgggaccatttctctttgaggaggtccctaagaggcattgcaaaagtgtggacatggagctaaattgggtcccccttccacagccctcccaccctgagtttttcttagaatctttgtaag

SEQ ID NO: 354991 - DNA, 799 bp, Homo Sapiens
tcataacaaaggtttaattagaatggttaataactatgatttccaaagtgtctgagtcagttagggagttttgttccatacaaaatgctttatttaaccttcatgccttcattcagataattatacaaatgcatacagttaaaggtttaaactctatttcagttcacagctcaattcataggaaagttgaatacagaaaagcaatgcaccaacagaatatgtctgagacaccattaaaaacaataacacttgttcatttaaatctctgagaatagactggaataatcatcctctgagagaatctcattaggagggtctccctttacattatcatagggcaaaaaaatcaccattttacagtaaaaggaaaaaagctctgagtatatttacaatacatacactatacataaatacaagaacaacacttacataatattaataaacttataacaggggtgcctaaacactacagagtatataaatgcagaggaaactattgggaaattaagtctttagataaactggagaaataaattcatttgaaattaaaatcctgaacagaaaaccaaatgaagatttaagaactcaacacatttgcttgccagcatcactggggggctttatcctttaatgtgtaggacctcctatgggcactcttaactccctggggtcagagacccaagagtgttttgtaaaattacatccataaagcaaatcagatgcagcccatctattcaatttgctgttcagaggcttcaagcctagaataactgttttgtaaactaaaggatgtttctgt

SEQ ID NO: 354992 - DNA, 838 bp, Homo Sapiens
ttccatgtcctttggagattcacttgcaaatttcctttatgatctcttcttttgcctggagcttaatgtctgtgtcctctaagctgctccccaaggcaaccattttaacctaagcctcattgaggtcctgctccttcttctccagaaccttctcatgtgcttccttaatgcgctccagctcttcctccttctctctcagcagagtgtgcatgctctgcagctggctggagaccctctggtaggagtgctccaggctctggttgtcagcctctcttctcctcagcttttcccggagctcagccacatcctcgtcggacgtggccacgcgctctgtcagctcctggaaccgctgtctgaggaggtcccgctcgtcacagaggctctgcacgtgctctgcgagcctgcgcacgctggcctctcgtgcctccagctgctcctccagctggtgcacctgctcactgccctcgaaagtggcgctcagcttctccttctgcagggtctccacctgctgtgcctgaccctgcaactggtcctcataggcgctggccttgtcttccacttcctttaggttctgcagcaatgcctgcttctccttctcacagctctccagcagcagctcatagtttctctgcagcttctcctccatcagccgctgcgcctgctcactggcgcccagttgctggctgaggtcggcaatgcgctcctgcagcctctggacctccttctgccggtcccgctgcagcgcctgctgtgtctccaggccccgtagctcctgcgtcttctccagcagcagggcctcagcactcttgagcttctgctcgctagccctcagctggcc

SEQ ID NO: 354993 - DNA, 1275 bp, Homo Sapiens
ttgtattttcaggtgtgcagatcaatcaaatctgaaaactcacattaagtctaaacatggtaacaatttgccatataaatgtgagcattgtccccaagcatttggtgatgagagggagcttcaacgccatctggatttgtttcaaggacataagacacaccagtgtcctcattgtgaccataagagcaccaattcaagtgaccttaagcggcacatcatatctgtccatactaaggattttcctcacaaatgtgaggtctgtgataaaggttttcatcgtccttctgagctcaaaaagcatagtgatatccataagggtaggaagattcatcagtgcaggcactgtgactttaaaacatccgatccatttattcttagtggccatatcctttcagttcatactaaagatcagccattgaaatgtaaaaggtgcaagagaggattcagacaacaaaatgagctaaaaaaacatatgaagacccatactggaaggaagatttaccaatgtgagtattgtgaatacagcactacagatgcatctggctttaaacgacatgtgatatcaatacatacaaaagactatccacacaggtgtgaattctgcaagaagggattccgaagaccatcagaaaaaaatcagcatattatgaggcaccacaaagaggctcttatgtaataagatcaatataaagaaagaagctatttaggagatatgatatgctacttgggagaaaactctcactaactgtctcaccgggtttcaaagcttgatactaaaccatgactttacattctttgtattaaagatcttaaaatatttgaattcacaggggatcccatagccctttgaaaattacttaaagaatttaagaagcactatagaatggttacagaaaaacttcttaagtatctgtgtaatagtattatatgcataacttaaactacagaggggaaaagcaaagacaaatactttatttggctgattatgttagatacaaatgtttctgagaagagaatacataaattgagtttagtgatgctttgctatagcaagcaaacccacttttatgcaattttagaaatggggcagggaaaccaaaatgtggtccattcatcagtcacttagtcattgagccttttatattgtacctggaaattaaattcccagcaatgacaaaagcttgtgtattccattaaaaagaaaactaactggaaaacagggtagattaattcagtacttattaaaaaagaattcagagcctgtaatatttatca

SEQ ID NO: 354994 - DNA, 1067 bp, Homo Sapiens
  misc_feature (218)..(226): n is a, c, g, or t
  misc_feature (411)..(429): n is a, c, g, or t
  misc_feature (725)..(725): n is a, c, g, or t
agtaacaaatatttttgcaaaagagaaaaattaaactgtcaaatcatttttaggagttagcccagttaggtcttttggtgtcctagcaattcaaactgaaattaaaggcttcttatagcctataagcttctgaaaatgcagctaagtggcattcaaaaagacagaacattttttctacttccgtaaatataaaagaaattgaaaaatcaccacctagnnnnnnnnngctaggcataaattcatcagcaccaagtagaaatgatcttcaaaaggggcaagtctcttatgtatccttgtgttaatgaataggtactaatctctcctctaggaaaaacccactgcctgacgttaacatctttaggcaaaagaaaaggcaaaactcaacaaattacattttgattcatccaaatnnnnnnnnnnnnnnnnnnntttcaagatttttggcactactttaagcatttttcagggtaggtatgattttaagttcgactatcttcttccctactccattatttgcaaaagcaggaagtatcaaatttaactctattactaataattcttcaggtatcattccaaaagttgtacttagtcacaatacaacagttaacatttaaataagactctagttgcagtaaaaagtgttgaaaggtggtcatatcaaaatcttggtttccttttgtacctatcagatatgactaaaatgttggtggccagaactcaaatcnacatacagtcaaccacattattggaaccatgacctacatcctcgaatttggctagttaaacaggaacacacagctactcctgctccagctctgcagtgagacacagatccaacaagctcccacctattcagcactggatcaaacgcttctactgtatttaagtatgcattgccattatcaccaccaactgcaaagattttgcccatcactgttgcgattcccactccacctctgggagtagtaagtgctgccacataatcccacttgttgcttcgggggtcataccgctcaactgaactcagaggagaatatcatcaaaaccaccaaatacggtccgagctt

SEQ ID NO: 354995 - DNA, 2347 bp, Homo Sapiens
  misc_feature (4)..(4): n is a, c, g, or t
  misc_feature (6)..(6): n is a, c, g, or t
  misc_feature (8)..(11): n is a, c, g, or t
  misc_feature (17)..(17): n is a, c, g, or t
  misc_feature (25)..(25): n is a, c, g, or t
  misc_feature (27)..(28): n is a, c, g, or t
  misc_feature (35)..(35): n is a, c, g, or t
  misc_feature (57)..(57): n is a, c, g, or t
  misc_feature (71)..(71): n is a, c, g, or t
  misc_feature (83)..(83): n is a, c, g, or t
  misc_feature (85)..(85): n is a, c, g, or t
  misc_feature (91)..(92): n is a, c, g, or t
  misc_feature (94)..(95): n is a, c, g, or t
  misc_feature (158)..(158): n is a, c, g, or t
  misc_feature (203)..(203): n is a, c, g, or t
  misc_feature (212)..(212): n is a, c, g, or t
  misc_feature (217)..(217): n is a, c, g, or t
  misc_feature (235)..(235): n is a, c, g, or t
  misc_feature (244)..(244): n is a, c, g, or t
  misc_feature (248)..(248): n is a, c, g, or t
  misc_feature (251)..(251): n is a, c, g, or t
  misc_feature (265)..(265): n is a, c, g, or t
  misc_feature (267)..(267): n is a, c, g, or t
  misc_feature (269)..(303): n is a, c, g, or t
  misc_feature (315)..(315): n is a, c, g, or t
  misc_feature (332)..(333): n is a, c, g, or t
  misc_feature (341)..(341): n is a, c, g, or t
  misc_feature (346)..(346): n is a, c, g, or t
  misc_feature (348)..(348): n is a, c, g, or t
  misc_feature (381)..(381): n is a, c, g, or t
  misc_feature (383)..(383): n is a, c, g, or t
  misc_feature (390)..(390): n is a, c, g, or t
  misc_feature (396)..(397): n is a, c, g, or t
  misc_feature (399)..(400): n is a, c, g, or t
  misc_feature (403)..(404): n is a, c, g, or t
  misc_feature (406)..(406): n is a, c, g, or t
  misc_feature (427)..(427): n is a, c, g, or t
  misc_feature (432)..(432): n is a, c, g, or t
  misc_feature (540)..(540): n is a, c, g, or t
  misc_feature (635)..(635): n is a, c, g, or t
  misc_feature (1426)..(1427): n is a, c, g, or t
  misc_feature (1430)..(1430): n is a, c, g, or t
  misc_feature (1433)..(1433): n is a, c, g, or t
  misc_feature (1440)..(1440): n is a, c, g, or t
  misc_feature (1470)..(1470): n is a, c, g, or t
  misc_feature (1474)..(1490): n is a, c, g, or t
  misc_feature (1494)..(1496): n is a, c, g, or t
  misc_feature (1503)..(1503): n is a, c, g, or t
gaananannnntttttngaaaagtngnngttatanattttaagggaccattgaaagngtccaaagttgcgnaaaaaaagtctncngaaaannanngggtgggttttttttatgcaataatttaaatgtaaaaaaaagttttataaatgaatctttttnagttttccgaacttccaaatatgaattcctttctttatgattttntaaaaaagnaaaanacagtagtcccaaaaaanagagtaagngagnggngcccatctaatagngngnnnnnnnnnnnnnnnnnnnnnnnnnnnnnnnnnnntttggtggtggnaggtgggaatttattgnnctggctgnacttntntaccaggatgcagagttctccaggtagctggangntggggantggttnntnnttnntnggtgggcattagggtggtggntgagngagcgggaagagccctgggggtcccaaaccgctggagattggggcgagttacacgccattgggtcgctggagctgggactgtgctccgggggcatctccccgtttttnatgatcttcttgatcttggatcttttgttctgaaacaagattttcacctgagttggggaacaaaggcacacgttaccgggacactcagaggtcgncccgcgccttccccggggcggcgaatggaggcatcttcggaactctgggcggcccagccctgcctggcgtctccccgccgcttgcggcctaccgccaagaagctatgccttaggcaaaccatggagctctggccccagagggcgccctggccggctcggggcgccccggcccagcgaggccacgaccccaaaggcttgtcttttgtttgggctgggggtgggggacgccagcgcggcgggtgtgcgcccgagtgtcctcggcggcggcgcgcctcgtgtaagcctgcgcaggacgcgcggaacgcggcgaaggtctccaaaacaatcgcgcgagcccggcggggaaggggcgtggggcgggctacgcgcgcctgtggtcagaaaaaggagcgagctcccaacctcccgtcctactcccttcactccctctgcagctcagagaggccagaatctgactgcagctcttggcggcgactcgaacattctttatgcttccgtaggccccagctgggttggaggagtaaaaggaatgggacaatccaggaagacttctcacgtacaatagcgccccccacctcgcgacccttcggtggccgtggcctgaagctcccgtaggctcagggcacgacccttcagtttctccgctccaggcgacgttctcagccttttcttagcctgagaccaccgcgagaacaccaggccttgctcacccccgaggaggctctacattgttaagaaaaccagatagctgctctgggctgcctaggccgccctagaaataaccctccgcnngcnggnaacccgngaaattggccccacagctccggaggcccgntacnnnnnnnnnnnnnnnnncgcnnntagtggnaggtatctccagaccgctgatgaataccatccccaccgtctcaaggcctgactcaccgagttaaagcataggggctgatgtctttgggtctgttagtttctcacgggtactgtcgaaacagctccagtcccatcgagactgaaccgcgcgacccaaccagacgtgcagctcaggcaggtctagtgcatggcagcgccgtatttacctgtgtttgtgtcaatcccagcgaggcggccagctcggcgcgttccggcaaggcgaggtactgagtcttctgaaaccttctctgtaatgcggccagctgaaagctggaataaatagtcctgggtttacgaactttctttggtttgccattcaccattctcacctcgggctcggtcacttctttctctggctggttggtggcgcttgggacgcggttgtaggcgccgccgtactggtggtaggagctagcgtagctatagtcggcataagctttggctgggtagctcccggcggagccgttcacgccgtgatactgatactggtaggggttgagagctttgccataggaagccgaggtaggagagcagtagccgtgcggggctccccccgtagggctgtagtagtcagaatcggtagctgaagactcgggcaaagttggcgattcctgagacggatggtgcatagctgcggacgtctggaacggagcttggaagtcgccggatcggatgctggggacccttctgtcaaacactcctgtcatcgctcacgggcggcggcagcggctgtccttgctgttgtggcggcggcagctgccctagttggctgtggggctgctctggtctaagcagacatggctgtg

SEQ ID NO: 354996 - DNA, 671 bp, Homo Sapiens
cgagcggccgcccgggcaggtactgcagaattatattgtaacttcccctcaccccagttgcaattgtgtcatagtcatctgtatatcaaactattttattcccataacttcattggcttggatgcctaagtgtatgatgcttgaagcctcagaaaagaaataagcatatttcaaaagctgcaaaaggtttttcactgcctgcctcttgcggaactgggttacaccctggcactgttctgatccaagcatatttgcttggggaactaagtgctgactagtttgttttctatgtcaaggggcaatattaaaaaacaatttgcaagaaaatgtgtttcaagagagcaacctaagctaagtcactctgcgatatttcttgaaaataacgaccttgtcttgtatcagtggaagaagtaagttgcttagaaagggaaaagtcaaattgttccagaactgctaaaaatcattttaaaaaccatgatttagtttggaattatgattgtagtctgttgaatagtatttaccatggcatttcatacccatggtattttataccttctgactatcaattttagtattattagatgtttgtgtaaccacttgcttatttaaatgaattttgagtactgcctaattgtcagttatatgaataaattacatgtcattctactgta

SEQ ID NO: 354997 - DNA, 2056 bp, Homo Sapiens
  misc_feature (550)..(606): n is a, c, g, or t
  misc_feature (1953)..(1953): n is a, c, g, or t
  misc_feature (1979)..(1979): n is a, c, g, or t
  misc_feature (1985)..(1985): n is a, c, g, or t
  misc_feature (1993)..(1993): n is a, c, g, or t
  misc_feature (2010)..(2010): n is a, c, g, or t
  misc_feature (2029)..(2029): n is a, c, g, or t
tctgatcttggcctcacagcccttcctgttgattacaaagcccgtggaagaaaacagaacacaccctcctcagttccgtctaaatgtgtttcttctgcttcaattacaccagttctggggcaaagacactgatgaaacaacacccatacctgaaaagaataaatgtgtgactttcaaatcccctttcgcagtgaaagaaacagcaaacacttaagattcagcatctgttctccagttgcactgaggaatgcactgtctcgcagcaccagctctgcagagcccttgccccagactctttgcggttttatttatatgtatttccatatttcattcctgtgtgtcactgctgcattggtgtggcagcaagtgaccaaatgctacaggtcttactatggacaccaggtcaggtgcaaccacacaaaacaaagccagttccatgagctgcctatgatatgcattgcggaagtaacattttacccagggtgtgccattgcagtgatataaatatatttttttcttagactaaatatgagctgactatctcttttgnnnnnnnnnnnnnnnnnnnnnnnnnnnnnnnnnnnnnnnnnnnnnnnnnnnnnnnnntgtatgtgcatagcctcatgcttaggactacccatgaatgttgtggaatgctacacctggagagttctggttttccaccagtttcaagatgaagaactacatgatacagtggacctggagaccatccccttggaaagacaacccagagatgttcagcatcctgtatctacacgcatcctgtatctacacgtgtattttgtagctgtcacactaaccttaataagaattctacagctttggacagaggcattttcaccttaatggtgaagtaatttaaaatataaatccattcaggtgacaacccatcatcaaaattacaaattttctgattgaactcatctgaatcatcagttccttgatggagagagagaaggagatggaatgtgtctggtaaccccaaatggagtacaagtagcctttgttttcctgcataaatggacttgttgaatgcgaacgaatatatgcaattcatatacttttggagatgaacgtagatatgtgtgtcagctttgagatggtgtgccccgggattaatactttgtctccccaatatcacagaaaaatacatgcccagtgactcttgaggttaaggtagttgggatgaaatggcctcaggcaatttcacattccctaattaccctggaaagttctacagtaattaatatgcagctaactcctgttgccctcacaagagcatcagccttctagaatcggagctccggagtgtgaagattcagtattgatatgatatgtataccaaactccagccaacttactgccatttttcataatctgagtggctgccttgcttatcctaagctgtggttgcagaaaccgtggccatttatataagctataacatcaaatcagggaaaaatgatgtatttattacattctgacagggtgtgtggcattgtgttctatgccagagtgacaaagttgattcacccctttttggggaccttaatatattttttaagggatgtgcctatgcattgatgcctgaaaaatatgtataaagaaatgaggttgactcttctgagcagttcatcttttccagaggtaagggtaggaggccaacttcacggatctgggtctagagcccgtgggaaagccctggccgagtgagctccaatgctaacctaatgtgcccatctctagagcagtgggaaactaccccgctgcaccaaatcaagtagcttcaccttgtgtatgcaggccccaagttattttttagcaatcttacgagtgaaatgttctggtggggttgaaaaacgttcttatttttaaaagaaaggttgtgctcgctacactgctgggtgtttgcgttctgagacctctttgtantccaatctgtgaagggatatgtgtanttaatnccgtacanccgtataggcctcaatntttgtctggaaggcacttnaaattctgacccataaagggaagttaa

SEQ ID NO: 354998 - DNA, 321 bp, Homo Sapiens
actatcattgactaatgttaggaggttccccaccccaaggatttccctttccatttctatcaagtttcagcagatccttttctgaagtttaagtaagacaagcggcttgcctgttccatatcaatttgacttggaaatttagaagctaacccttcctcctcttcctcttcattttccttactttactagcctcatctcccttgttttactttcttctcaagttctttttttccatgctttaagtattaatttaaaagctcccctttcctatgctctaagaaaaaagaatagcagaaggaacagaagacaggtttagaaggg

SEQ ID NO: 354999 - DNA, 768 bp, Homo Sapiens
  misc_feature (24)..(24): n is a, c, g, or t
  misc_feature (68)..(87): n is a, c, g, or t
aaggctggtacggccccgaggttntggatatcgtcgaccaggccgtcggacgtggagggccggaggtnnnnnnnnnnnnnnnnnnnntgctgctgctgctgctgcccgcgtccgaggctcgcgggcggcgggcccggaaatgcactcggtgatggaaagagagccactattctgaagaacacttggccaaagggtcattatcgttattgtgatgctctttctatgctgggggaatatgactgggccctgcaagcaaacataaaagctcaaaaactctgtaaaaatgaccctgagggaatcaaggatctaattcagcagcatgtaaagttacaaaaacaaatagaagacctacaaggtcgaacagcaaataaggatccaattaaagccttttatgaaaacagggcctacacacctaggagtttatcagcacctatatttactacttcacttaactttgtggagaaggaaagagcatttcagaaaaattaatcacgaaatggccaacggtggtaatcagaatctaaaggtggcggatgaggcgttgaaggtagatgattgtgactgtcatcctgaattttcaccaccatcaagtcagcctccaaaacataaaggaaaacaaaaatctcgaaacaatgaatcagaaaagttcagttctagttcaccattgactttaccagcagattcgaagaacatcttggagaaacagttttctaaatcttccagagctgcacagcaggattttgctaatataatgaaaatgctgagaag

SEQ ID NO: 355000 - DNA, 956 bp, Homo Sapiens
atcaggccaaatcggccgagctcgaattcgtcgagagcggaggtggcccatgtcctgcaagggccttgctgatgggatgtcctgaagggctgggcagccttagatcgggctaagagggcaggactgtgggccagtgccagagccaggcttgtctgttctcaaaggatcagcctcctttggaggacattttgtgtcaaggatagggctgaggacctgcgttctgaacgtctttcctgggattcttgacagccaaagaaattcgaggatcgcctctatgaaggtgaagtcttggcatgtggggtacccctgaatcctgggctaaggtctgtgaccttttgccctccagttggggtatgtgtggtgtccccaaagaacaagggctcgtggatcccgagcagggtgcgatggcggattgggaggtcccatgtcactctcccatgcccgcctttgaagctgaggcgctctttagttaacaaactacaagtcccagcagggaccgggacgcgggtgggagaggcgcctgtggccccgaggcgtgccgcgagttgtagtccctcctgcccgctgtgttcgcttttgagctctccgatgggatgcggcgcttcggaatttcgggctttgatccctgtcccgcccttgggcacaggcacctgccggcctgaaggccccccgcggtgggggtaccctgcgcccctccgcgggaagggtggactacagttatcggcaggctgtgcggcgccaaagccacggtgaaccagacccgaggtttttcccgggcgttcgcaagtttccccggagactcccgtggcggcgtttggccttctttttccttagtcaggatccccgtacttttgtggaggggtacaagggaggggtttgagccggccgggggccccgggggtggtgggcacatggggttccccttgtaacagttgaatcccccgtttttttccccg

SEQ ID NO: 355001 - DNA, 464 bp, Homo Sapiens
  misc_feature (408)..(408): n is a, c, g, or t
  misc_feature (422)..(422): n is a, c, g, or t
  misc_feature (433)..(433): n is a, c, g, or t
ctgaaatgccttctagaaacagagaaaacgaaactgtacttatttactcttgatacacagattatttataaaacagattgaagtaacctgttaactggcaaaaagagaatgagatcggatttaaatgtatggcagtaagtcctattgatccctccagttatctcagtatgactgcagtatattcattcactaaaaccactcactagataccaactacacacctgggcactgcagatgtaaaggtcagtcacacatgttctgactttacagagttcacagtagcagtggaggatgatatatgtgggaaacaaaaaagggcattgattctattccagaggcactgttaggggcttcaaagggagagagggggtctttccacctaaggaaatgagggattggggtcattcntaggaagttgaccnttaagtctttnaaaatttaaggaggggggtttcccaggctgg

SEQ ID NO: 355002 - DNA, 1000 bp, Homo Sapiens
cttaaggtggttctcccctcaccccattgaacctggtgacttacactctgcccctggtcacctgaaggcacccagcctggccgtggaagggggaacaagatgactgccttggctctggctctccaaggatcagagaacacagagaaacctagagaggccacccacatggagaaggaggaggaagggagatacaaatcccccgtttcccacccaaaagcacagggagggaaggcagggtttgggaaccaaggctgggccacattaggtatttaaagtccaggctgaccagctcttcatccctaggaggcttcactttgagggttggggaaaggacttgggatctgaatgaaccccatctttctacacacaaaaagatacagcaggcacaactctcactttaacacagctccccatgggccaagcaggcagcccaatcagcccagggcaagtgccacatggctcgtggagggtgggtaggagggactgtcacgggacgggaggaaggcgaggaggtaggcaggatggcacacattttaatgggaaatcagctgtccagggattcagcttctggagccgccagccattgctcacttcctccttctcagtctctgccatgtggttgtgcttgctgggctttccttgtcctactaggagacctggtgtggatgttttcactcctacttctaattggctgggaagcagcatttgccacaggcactgtttaatttcgtttccatcccctgcatctcacaggaaagcaaatggtcaatagttcagattaaaagaatcatcctggtcagctccaaaatatggctacttgcatggtaatcacagcaaagtctgtcaaatcagtgattctttattcctaagaggaagggatttttcctaagcattatggttctaccaaccaagggagcaggcctactcttcaaaagtggctgcaaaggctggcaaaccgagaggcctgctttgggctcagaaactcctgttggtcctgcca

SEQ ID NO: 355003 - DNA, 647 bp, Homo Sapiens
  misc_feature (454)..(502): n is a, c, g, or t
  misc_feature (532)..(532): n is a, c, g, or t
  misc_feature (543)..(543): n is a, c, g, or t
  misc_feature (592)..(592): n is a, c, g, or t
  misc_feature (607)..(607): n is a, c, g, or t
  misc_feature (609)..(609): n is a, c, g, or t
  misc_feature (624)..(624): n is a, c, g, or t
aggtcccatcatggcggctgaagaggcggatgtggatatcgaaggggacgtggtagcggcggcgggggcacagccagggtgaggcttagagaccgggtctccctggggcggagaggggagtggattgaaggagcgggccctgggaaagctgcaggtccggcaagggaaaagggaacagaagactgtcccctgggccagggtctcttgttggcctgggaggcacctcgcccgcacgcttgtcccaagcccagcgggcagggcggttacctggagctcaggtactcctgggtcgctttcaccttttgccggatgctgtgagggcaccgatttcgcctaccacattgcgtttgatttacatttagattccttcttccgttccctccttttcaggatctcatcgacagtaactagaacaagagcggctacggacgagacctgaggtcagggactcttnnnnnnnnnnnnnnnnnnnnnnnnnnnnnnnnnnnnnnnnnnnnnnnnntcttcacatggggataagttgtaaaacttnccgagaagcangttgacttaaatggccaggttttaaaagttggacaagttctgggttttncttctgcatttgctngncctacaagttaatancaatgtgaccttgggcaagacac

SEQ ID NO: 355004 - DNA, 478 bp, Homo Sapiens
tagcccattctggctaaatgaaacaagggggattggcagggagcttatgggaaacgttgtccttatgataaaaagagatgcataggaggaaataccccttttcttcccatgggcattgtcacgtggtacctggaactatgacaccacttagtgaccatgaagcccaagccaatacgttgaagataccatatgagccacaggagaaaagactttatgtttggtgacattactgagttgctgacttaggactacaatgccccaacttccaaaatcttgttatgtgacagtcaattccttacttacaaaatttctttaattggatctcttgttcccatgcagctaaaggagttctgacaaaataaatcaaaactcaaaatgcgcatacccttggaacacaaaatgtaatttctagagctctgactcacggaaatattcagacaagtaaacagaggtatatataacatgctatttatagtac

SEQ ID NO: 355005 - DNA, 1356 bp, Homo Sapiens; identical to SEQ ID NO: 5074
  misc_feature (720)..(890): n is a, c, g, or t
  misc_feature (897)..(1006): n is a, c, g, or t
  misc_feature (1023)..(1032): n is a, c, g, or t
  misc_feature (1134)..(1143): n is a, c, g, or t
  misc_feature (1185)..(1206): n is a, c, g, or t

SEQ ID NO: 355006 - DNA, 509 bp, Homo Sapiens
ggaaggtaccgatatcattgagctatttaaagttgccagtttgggctccagtaatgctttctggtgggtaaaattccacattcaggccacgagagcatctacagtttgtactctggggctgcaggcatcctgggacgctgtacgcaattcagtggtctagtcctttataccgactcagattccttaagcatgcagagtcactcgaatgaaaaaacatactcgacctctccctaaaaagatgttgcaacccagtttctctgaattccaccacaaaaagagaccctgaataagaagagcagttttcctatgcatatagagggtgtgtcaaaggtgagctttttggggaccgggaaaaacaaagttgcctgattccgcgcaggttgcacaggccccggatgtacacccggaaaggggagtgtggctgtagaatcatccatccgtctacagctaaaacaatttgccaataaagtacatgtttttcctaagccaaaaataaatacgttaacaga

SEQ ID NO: 355007 - DNA, 1127 bp, Homo Sapiens
acgtctagaggaatggagtggcccacgcggccttggggtgaaggggcccaggcctgtgacagccactccaggaactcctgggggtgctccaacctccgcgttttcctgtgctgccaagctcagaagccagagggcggtttggtagtggctaatgggacaatgtgctgtccagcaaagcacacatggagaagcggccccaaaattcccaccttgatttccatcctgccccttcttctactccacggaggcgctgtctcactagggtcccctccccaaggctcagctctaagacctgcacctgcttctcttggcccctgcgtgacagacaagtccattccctccttagctcagaacaccaaatatcaccagactgcctaagagacttgatgacacctcccggaatgctctcggggtggggttcacctctccttgtcctgcacccactgctaggccacattctcgtttctgctcacatcccattgcccggctacaaggcctgcccacggcccttaaacttgctgggcaggtttggagcccatgggaccccgtgggtctctgtccaggagcagcagaggaggctgacagagccctgctccctctgctctagggggtagtctagggagccccagctcacaccctcccaatgcttatatgctgaagctcacagaatgggctatcttgcctgacagcaagtcaaagaatgagtttaatatcaaagtgtaagcttactttccatccccaagccagcctgccccctgccccatttcccatgagcacacttctggggaaggaaaacaggctcctggccttcactctcagcagagctttggagatgccccaggcatgccctgagctccttctgtgtacctgctcccacttctgagccacccgctgcccctccgcactgctggcaaacccagttcctgcctcagccaggtctccttccctggtttccagtcacacagagcccagcagctttctctttcagtcccataagggcagccttgtgtccctggccacacttccacccgccagggtcttcctccccatctttccatccttcctgctgagcttccacagagctcgtttgcaaacagggggattaaagcatcactgcgcattcgaaa

SEQ ID NO: 355008 - DNA, 790 bp, Homo Sapiens
  misc_feature (680)..(680): n is a, c, g, or t
  misc_feature (718)..(718): n is a, c, g, or t
cgagatgagagggaattcacacttgcaaagaaatagaagtagaatagatagcaattcacaattcattgtgtcccaaacttaagtggaaataaaagaaaaatggtacctatagcatttaacattatgtcactacatcttccatgtatacaaaatagacagctaattgtagaatgtggaccattttttactaatctgttatttaacagttgattattgagcaaacttatgtatcaggcatttaaaaattctaaagcacttggtgttaaacattgaaaaagatgttgtcccatccttcaaggagcttaattatgcaatccatcaatatttttcaaaataaagccaattgtttttaagaagatatacaattgtgtttacatatggcattctcttttttttcagatcaagtgtatagtcaaggtaaaattctaaacatactaaacttaatgtctaagtatagaatatgtttatgtgtaagcctcgatgtgtgcatatataatatgtactgctgtctatgtaaatcattaaaagggtaacacattttgccatgttggacttgaacattgtgacttggggtttggatgatttaaaactctttgatatttgggtcaattacattgcagcaaaatgtgtgtaatatggaaaaaatgtcttattatatttccctttaaatattatgaagnttcaaatttaagggggaatttttttaaagaaatgctgntggatttgtctcaaccaaacatgaaaattcttttggaagtgttcaattgttcccaaatataactggggtttg

SEQ ID NO: 355009 - DNA, 1249 bp, Homo Sapiens
  misc_feature (109)..(190): n is a, c, g, or t
agttcgacggagactctcacttagatgcactcctcctcatctagtgactcagatagctcaagtgattctcagtcctcttctgattcctctgattccgaaagtgctactnnnnnnnnnnnnnnnnnnnnnnnnnnnnnnnnnnnnnnnnnnnnnnnnnnnnnnnnnnnnnnnnnnnnnnnnnnnnnnnnnngcaagaagagtgcatctagtgagagtgaagctgaaaatcttgaagcacaaccccagtctactgtccgtccagaagagatccctcctatacctgaaaatagattcctaatgagaaaaagtcctcctaaagctgatgagaaggaaaggaaaaacagagagagagaaagggaaagagagtgtaatccacctaactcccagcctgcttcataccagagacgacttttagttactagatctggcaggaaaattaaaggaagaggaccaaggcgttatcgaactccttccagatccagatcaagggatcgtttcagacgtagtgagactcctccacattggaggcaagagatgcagagagctcaaagaatgagggtatcaagtggtgaaagatggatcaagggggataagagtgagttgaatgaaataaaagaaaatcagagaagtccagttagagtaaaagagagaaaaataacagatcacaggaatgtatctgagagtccaaacagaaaaaatgaaaaggagaagaaagttaaagaccataaatctaacagcaaagagagagacatcagaagaaattcagaaaaagaagacaagtataaaaacaaagtgaagaaaagggccaaatctaaaagtaggagtaagagcaaagagaaatcaaagagtaaagaaagagattcaaaacataatagaaatgaagaaaagaggatgaggtcaaggagtaaaggaagggatcatgaaaatgttaaagaataagaaaagcagtctgattctaaaggaaaagatcaggaaaggagtagaagtaaagagaagtctaaacagttagaatcaaagagtaatgagcatgatcacagtaaaagtaaggaaaaggatagacgcgcacaatccaggagtagagaatgtgatattactaagggtaaacacagttataatagcagaacaagagaattaagcagaagtagggacagaagcagaagagtggcgatcatagaacccatgacaggaaatccgccgccataagcaagtgagtaccccttggattccggagataccgggaattcccggg

SEQ ID NO: 355010 - DNA, 447 bp, Homo Sapiens
  misc_feature (320)..(405): n is a, c, g, or t
aatggttcacagttcttcataacaacgaaacccactcctcatttagatgggcatcatgttggttttggacaagtaatctctgcgtcaagaagttgtaagagagattgaaaaccagaaaacagatgcagctagcaaaccgtttgcggaggtacggatactcagttgtggagagctgattcccaaatctaaagttaagaaagaagaaaagaaaaggcataaatcatcatcatcttcctcctcctcatctagtgactcagatagctcaagtgattctcagtcctcttctgattcctctgattccgaaagtgctactgaagagnnnnnnnnnnnnnnnnnnnnnnnnnnnnnnnnnnnnnnnnnnnnnnnnnnnnnnnnnnnnnnnnnnnnnnnnnnnnnnnnnnnnnngtgtctagtgagagtgaagctgaaatctgagcacatcggagg

SEQ ID NO: 355011 - DNA, 680 bp, Homo Sapiens
gcaacagcactgcatgcatcaagatgtcacacaatattgagatacccgaccctggctactagcacagccagaagaggaaagcccccgacaaaagaacccattagccagaccacagatgacatccttgtggcctcagcagagtgtcccagcgatgatgaggacattgacccctgtgagccgagctcagagccaacccaacccgagcaggcggcagagagccgtatccaggctcagcagaagtgatccgggagtccagcagcaccacgggtatggtcgttgggatagtagccgctgccgccctgtgcatccttatcctcctctatgccatgtacaagtacagaaaccgggatgaaggctcataccatgtggacgagagtcgaaactacatcagtaactcagcacagtccaatggggctgttgtaaaggagaaacaacccagcagtgcgaaaagctccaacaaaaataagaaaaacaaggataaagagtattatgtctgatcccaagatcttaaatggacacttgtatagaaatagtcttcattttatctgagacataatataaacttatttactttcctttttatgaagcacatacaaaagaagacagggaatgcaatcaggaaggaaagactttttaaaaaataaaaacaagtatctcatgctcttgtttctcaaaaaaaa

SEQ ID NO: 355012 - DNA, 806 bp, Homo Sapiens
gttcgcacttatgccagcgggtaatgtaacctgtgattaggtatttatggcccgtttttgttttgtttcttgtttgagaatcagagcatgagatacttgttctagtgttttcaaagtcttgccttgcctgattgcagtcccggtcttctttggtatgtgcttcataaaagggaagtaaataagcttatattatgtctcagataaaatgaagactatgttctatacaagtgtccatttaagatcttgggatcagacataatactcgttatccctgtttttccttatttttgttggagctttttcgcactgctggggttgtttcttccttttacaacagccccattggactgtgctgagttactgatgtagtttcgactctcgtccacatggtatgagccttcatcccggtttcgtgtacttgtacatggcatagaggaggataaggatgcacaggccggcagcggctactatcccagacgaccatacccgtggtgctgctggactcccggatcacttctgctgagcctggatacggctctctgccgcctgctcgggttgggttggctaacccacctgagctcggctcacaggggtcaatgtcctcatcatcgctgggacactctgctgaggccaaccaaggatgtcatctgtggtctgcgagttttcacagtgccatctcatatccatgtctgtctggctaccctgcgtgcttagagcttttttcttaattcttaatggaaatcctaggaaatttagtccatcctctgaaatcaatactggtgacaggagagctcctgactcccgct

SEQ ID NO: 355013 - DNA, 844 bp, Homo Sapiens
ggaactgcacgtcctgctgtttcagacatccatccgggtgttagtgtggttgctaggttggctctacttcagctccttacccttaggaatctacttactggtgtctaagaaagtcacccttggggtcgtcttgtcagcctggtcccttcgagcctcgttattcttatggtgtatggtttttgccagtgtgttgtcatgaatttctagactgtatggcacctccttcttaactgatatgcaaaataagaaattggacacacattgccctgtttgagtgtgaagttagataatttataatttattttcttttatgttctttatgattagtatccatgacattaacaaaacccttggccacatgttgacttgattggttttcctgtaggctggaagtaaaaatgttcatttctccttaggggttagcaaattgtattagcctccccacttcaattggaacccatggacggcggggattctcccccagagaagggacgagggttctctctcagcacgtgccagacagacggcaggggtgtggtgtgttatactatagggagagcatggatccctcctttcgtattcatggatgttctatgatggcagttggacacaagaggaaagttgctctgagacacaaagtgtgtactcctttcccaccccatacccctggtattggaacaccctagaattgtcttcaggtgttttctctcttaagtcactctctgtggtcggcgatcccattgagatacttgtctcctctgcacattctccttgccaagaggaactcggttctttccctgggtaagttcaactgaataccatttttgcccctacttaggggatg

SEQ ID NO: 355014 - DNA, 468 bp, Homo Sapiens
acccaggcacgaggggtcgtggatgtggccacacataggaccacacgtcccagctggaaggaaaggcctggggcccccagggagggaggcagggggtgggggacatggagagctgaggcagcctcgtctccccgcagcctggtatcgccagccttaaggtgtctggagcccccacacttggccaacctgaccttggaagatgctgctgagtgtctcaagcagcactgacagcagctgggcctgccccagggcaacgtgggggcggagactcagctggacagcccctgcctgtcactctggagctgggctgctgctgcctcaggaccccctctccgaccccggacagagctgagctggccagggccaggagggcgggagggagggaatgggggtgggctgtgcgcagcatcagcgcctgggcaggtccgcagagctgcgggatgtgattaaagtccctgatgctctttg

SEQ ID NO: 355015 - DNA, 1574 bp, Homo Sapiens
  misc_feature (23)..(23): n is a, c, g, or t
  misc_feature (366)..(366): n is a, c, g, or t
  misc_feature (436)..(436): n is a, c, g, or t
  misc_feature (610)..(630): n is a, c, g, or t
  misc_feature (1113)..(1113): n is a, c, g, or t
tacgagctaggcgcagaagcggngtgcatgcccctcccagactcggtcccgcgggctttaaggggcccgggcggcgaaggcgcacggagccaagttccgggcagcagccctgggatgccctgagccgggccgggcggaggtctccgttgcctagcaaccggggccgcggcctgtgggcggagcctgcaccgcggctgcgacacggggcggggcctcaccgggagccggccgaggagcgggcaccggccattggcacaggcacgggccattggcgcatgcgtacggcgcggccttggggcggcgcccacccagtggcggagtcttctgaggggcgggtcgtgggcccggcctggaggcggagccggncgccgtcagtagtcggctgaggacggaggcggagctgggactgggacggggcggggcctgcgctggtggngcgggcgggggaggagacacggccaagcgcccgagtgggggccgttggttggtgcgcggctgaagggtgtggcgcgagcagcgtcgttggttggccggcggcgggccgggacgggcatggccctgctgctgtgcctggtgtgcctgacggcggcgctggcccacggctgtctgnnnnnnnnnnnnnnnnnnnnnaagaagttctccttctaccgccaccatgtgaacttcaagtcctggtgggtgggcgacatccccgtgtcaggggcgctgctcaccgactggagcgacgacacgatgaaggagctgcacctggccatccccgccaagatcacccgggagaagctggaccaagtggcgacagaagtgtaccagatgatggatcagctgtaccaggggaagatgtacttccccgggtatttccccaacgagctgcgaaacatcttccgggagcaggtgcacctcatccagaacgccatcatcgaaagccgcatcgactgtcagcaccgctgtggtaagcaaggctccgtccaggctgaggggcgtgccggtggagctcggggccctggaggctgaggggagccctggcggctcttgtacgtgtttcaggcatcttccagtacgagaccatctcctgcaacaactgcacagactcgcacgtcgcctgctttggctatnaactgcgagtagggctcaggcatcacacccacccgtgccaggccctactgtccctggggtcccaggctctccttggagggggctccccgccttccacctggctgtcatcgggtagggcggggccgtgggttcaggggcgcaccacttccaagcctgtgtcccacaggtcctcggcgcagtggaagtcagctgtccagggcctcctgaactacataaataactggcacaaagtaagtcccctcctcaaaccaacacagggcagtgtgttgtattgttgaagcacctcgtgggtgagtatgtgtgggggcacagggctggctcccctcagctcccacgtcctagagggggctcccgaggagggtggaacctcaaaccagctctgcgcaggaggcggtgcagtcctttttctccctcaaaggtctcgaccctcagtggaagcggcatcttcctaaagggtccca

SEQ ID NO: 355016 - DNA, 1020 bp, Homo Sapiens
  misc_feature (979)..(979): n is a, c, g, or t
tgggctccaaccgtaagcctggcaaaccagctcagctcggcctgtctgaaagcaatgtggggcagtcagccctcaatgggcacccctaccatcgtaggaaccctcccaaggctctgaccacagacctgggatggggtggaaccagaccctatggggaccctttaggaaagatgcccgcctccagctgaggttcggagacctttgagggagaaaaaggactgcagccgcctcctgcgcagagctgggttgaggttccacctcctcgggagcccctctaggacgtgggagctgagggagccagcctgtgccccacacatactcacccacgaggtgctcacatacacacactgcctgtgttggtttgaggaggggacttacttgtgccacgttatttatgtagttcaggaggccctggacagctgacttccactgcgccgaggaccacagcggtgctgacagtcgatgcggctttcgatgatggcgttcatggatgaggagcacctgctacccggaagatgtttcgcagctcgttggggaaataacctgagtcgtcagaggcaggagaaggtcaggactcaggcggtgggcggggtgtcccggggtgggggggccccgcctcggtttcgcgccccttaccggggaagtacatcttcacctggtacagctgatccatcatctggtacactgctgtcgccacttggtccagcttctcccgggtgatcttggcggggatggccaggtgcagctccttcatcgtgtcgtcgctccagtcggtgagcagcgcccctgacacggggatgtcgcccacccaccaggacttgaagttcacatggtggcggtagaaggagaacttcttggagaagttgctgtggcagtgcagacagccgtgggccagcgccgccgtcaggcacaccaggcacagcagcagggccatgcccgtcccggcccgatcccgggaattccggaccggtaccagcanggaggggaggaggagcggacgggggtcgatggaaagcagtg

SEQ ID NO: 355017 - DNA, 911 bp, Homo Sapiens
tgtggcgcgagcagcgtcgttggttggccggcggcgggccgggacgggcatggccctgctgctgtgcctggtgtgcctgacggcggcgctggcccacggctgtctgcactgccacagcaacttctccaagaagttctccttctaccgccaccatgtgaacttcaagtcctggtgggtgggcgacatccccgtgtcaggggcgctgctcaccgactggagcgacgacacgatgaaggagctgcacctggccatccccgccaagatcacccgggagaagctggaccaagtggcgacagcagtgtaccagatgatggatcagctgtaccaggggaagatgtacttccccgggtatttccccaacgagctgcgaaacatcttccgggagcaggtgcacctcatccagaacgccatcatcgaaagccgcatcgactgtcagcaccgctgtggcatcttccagtacgagaccatctcctgcaacaactgcacagactcgcacgtcgcctgctttggctataactgcgagtcctcggcgcagtggaagtcagctgtccagggcctcctgaactacataaataactggcacaagtaagtcccctcctcaaaccaacacaggcagtgtgtgtatgtgagcacctcgtgggtgagtatgtgtggggcacaggctggctccctcagctcccacgtcctagaggggctcccgaggaggtggaacctcaacccagctctgcgcaggaggcggctgcagtccttttctccctcaaaggtctccgaccctcagctggaggcgggcatctttcctaaagggtccccatagggtctggttccaccccatcccaggtctgtggtcagagccccggggagggttccctacgatggttaggggtgcccatggaggggctgaactgcccaaa

SEQ ID NO: 355018 - DNA, 985 bp, Homo Sapiens
  misc_feature (238)..(238): n is a, c, g, or t
ccgggttcggaaaagggttctgagcaccacctgcccgctccagagtaacaggccagggcttgtccaattgagtttccgcccccccacgttgcctgaggcagcccagctgctgttcagtgctgctttgagacacttcaagcagcaatcttccaaaggtcaggttggcccaagtgtgggggcctccagacacccttaaggctggcgatacccaggctggaatgtcagaagggtgtgcagnccgcggcacgctggtgttggcttacgagcaccccttctcccgaggcctcccttctctgggtcactcacaaggccggggtggctctgtgtgtcccaggccaggagaaggcagaggagcgtggtctcatgctcgtgtcctgtttgtgccagttatttatgtagttcaggaggccctggacagctgacttccactgcgccgaggactcgcagttatagccaaagcaggcgacgtgcgagtctgtgcagttgttgcaggagatggtctcgtactggaagatgccacagcggtgctgacagtcgatgcggctttcgatgatggcgttctggatgaggtgcacctgctcccggaagatgtttcgcagctcgttggggaaatacccggggaagtacatcttcccctggtacagctgatccatcatctggtacactgctgtcgccacttggtccagcttctcccgggtgatcttggcggggatggccaggtgcagctccttcatcgtgtcgtcgctccagtcggtgagcagcgcccctgacacggggatgtcgcccacccaccaggacttgaagttcacatggtggcggtagaaggagaacttcttggagaagttgctgtggcagtgcagacagccgtgggccagcgccgccgtcaggcacaccaggcacaccagcagggccatgcccgtcccggcccgccgccgccaaccaacgacgctgctcgcgccatcccgtactccgagcgtaccagcct

SEQ ID NO: 355019 - DNA, 1003 bp, Homo Sapiens
ctgaagggtgtggcgcgagcagcgtcgttggttggccggcggcgggccgggacgggcatggccctgctgctgtgcctggtgtgcctgacggcggcgctggcccacggctgtctgcactgccacagcaacttctccaagaagttctccttctaccgccaccatgtgaacttcaagtcctggtgggtgggcgacatccccgtgtcaggggcgctgctcaccgactggagcgacgacacgatgaaggagctgcacctggccatccccgccaagatcacccgggagaagctggaccaagtggcgacagcagtgtaccagatgatggatcagctgtaccagggaagatgtacttccccgggtatttccccaacgagctgcgaaacatcttccgggagcaggtgcacctcatccagaacgccatcatcgaaagccgcatcgactgtcagcaccgctgtggcatcttccagtacgagaccatctcctgcaacaactgcacagactcgcacgtcgcctgctttggctataactgcgagtcctcggcgcagtggaagtcagctgtccagggcctcctgaactacataaataactggcacaaacaggacacgagcatgagaccacgctcctctgccttctcctggcctgggacacacagagccaccccggccttcctggtatcgccagccttaaggtgtctggagcccccacacttggccaacctgaccttggaagatgctgctgagtgtctcaagcagcactgacagcagctgggcctgcctcagggcaacgtgggggcggagactcagctggacagcccctgcctgtcactctggagctgggctgctgctgcctcaggaccccctctccgacccggacagagctgagctggccagggccaggaaggccgcggatggagggaatgggggatagcttgtgcgcacatcaggcctgggaggtccgcagaactgcggactgtacttaagtccctgatggttttcacacaaaaaaa

SEQ ID NO: 355020 - DNA, 843 bp, Homo Sapiens
cacccccattccctccctccgccctcctgcctgccagctcagctctgtccgggtcggagagggggtcctgaggcagcagcagcccagctccagagtgacagcagggcctgtccagctgagtctccgcccccacgttgccctgggccaggcccagctgctgtcagtgctgcttgagacactcagcagcatcttccaaggtcaggttggccaagtgtgggggctccagacaccttaaggctggcgataccaggctcatgctcgtgtcctgtttgtgccagttatttatgtagttcaggaggccctggacagctgacttccactgcgccgaggactcgcagttatagccaaagcaggcgacgtgcgagtctgtgcagttgttgcaggagatggtctcgtactggaagatgccacagcggtgctgacagtcgatgcggctttcgatgatggcgttctggatgaggtgcacctgctcccggaagatgtttcgcagctcgttggggaaatacccggggaagtacatcttccctggtacagctgatccatcatctggtacactgctgtcgccacttggtccagcttctcccgggtgatcttggcggggatggccaggtgcagctccttcatcgtgtcgtcgctccagtcggtgagcagcgcccctgacacggggatgtcgcccacccaccaggacttgaagttcacatggtggcggtagaaggagaacttcttggagaagttgctgtggcagtgcagacagccgtgggccagcgccgccgtcaggcacaccaggcacagcagcagggccatgcccgtcccggcccgccgccggccaaccaacgacgctgc

SEQ ID NO: 355021 - DNA, 912 bp, Homo Sapiens
  misc_feature (804)..(804): n is a, c, g, or t
  misc_feature (812)..(812): n is a, c, g, or t
cagcgtcgttggttggccggcggcgggccgggacgggcatggccctgctgctgtgcctggtgtgcctgacggcggcgctggcccacggctgtctgcactgccacagcaacttctccaagaagttctccttctaccgccaccatgtgaacttcaagtcctggtgggtgggcgacatccccgtgtcaggggcgctgctcaccgactggagcgacgacacgatgaaggagctgcacctggccatccccgccaagatcacccgggagaagctggaccaagtggcgacagcagtgtaccagatgatggatcagctgtaccaggggaagatgtacttccccgggtatttccccaacgagctgcgaaacatcttccgggagcaggtgcacctcatccagaacgccatcatcgaaagccgcatcgactgtcagcaccgctgtggcatcttccagtacgagaccatctcctgcaacaactgcacagactcgcacgtcgcctgctttggctataactgcgagtcctcggcgcagtggaagtcagctgtccagggcctcctgaactacataaataactggcacaacctggtatcgccagccttaaggtgtctggagcccccacacttggccaacctgaccttggaagatgctgctgagtgtctcaagcagcactgacagcagctgggcctgccccagggcaacgtgggggcggagactcagctggacagcccctgcctgtcactctggagctgggctgctgctgcctcaggaccccctctccgaccccggacgagctgagctggccaggcccaanaaggcggnaagggaggaaaggggggtgggctgggcgcaacatcagcgcccggggaagggccccaaagctgccgggatgtgataaaaggcccctgaaggtttcctcttt

SEQ ID NO: 355022 - DNA, 470 bp, Homo Sapiens
atattggtggacgagaaatctgactttaaaagattattaagagagaatataccttaactatactggcttgatttgaaacaggctcttattgccatttaaactgccagaaatctttgccaaggtcctggttaaaaaaattggaaacggttttcttagccccagctttaaaagctagagatctcagagaaatagctggcttaacaatgacagaacagcctaaaatttgtgcctacaccatgttctgagagtcgttcacatcaaattcttatcttttccaagccagtaagttggcttctccattcctggtgtctgatattcttgacaatcatcagcaacaaagatcacagcactttccagaagcatggagcttcagaaagtgccagtgaactcttggtcctcagtagtgagatgataacagtgttataatgcagcttccttgagccatcagagagagtgtatgttcaccctat

SEQ ID NO: 355023 - DNA, 634 bp, Homo Sapiens
cggaggtttgatcagctggagctggtcacagttgccttattttcatggggtctgaacactgaaaatgcttatggtgccaacacagggaaagagaaagtgtcccagtctctccctgaacctgacactacctgtgtggtgtctgagattatggtgtcttgagtgttcacttgatgttttcccagttcttggcgtggagaacctgtggatacaccaagctcagagtcctgagtaccagccaaggattaatagaagtgttcttatttctggcaaccaatggaaacaggtgtagaaagctattttaggaattcataccattttgtgcaaatgctttgaggtgtgactgagctgggacctatgtacgacaggcatctattctttctcataggaacaagaagccgggtcaagattcaggcctgtaatgtggttgcctgaaaagctgggcatctgttttggagatgctgggatgcttggatggggaaagaggtggtctaatccagatgttcataggatctatctggttgcacactggaggagaacagactcctggattaatgaggaggcagttagcacggagggaagtttaccagcataattcagatgagttgatcgcccagcggggggttcctgtagagtt

SEQ ID NO: 355024 - DNA, 409 bp, Homo Sapiens
gacaacagagccaagctcgtaaaactgcctccgtgctagctgcgtcgggattaatacaggagtccgatctcctccagtgtgcaaccagatagatcctatgaacatgaggattagaccacctgtgtccccatccaagcataccagcatgtgcaaaacagaggcccagcttttcaggcaaccacattacaggcctgaatcttgacccggcttcttgttcctatgagaaagaatagatgcctgtcgtacataggtcccagctcagtcacacctcagagctagcacaacggagctcagatgcaggctaggactcggtccatgcctcaggaaccagggaaagccatcctcacactccctggatccagggaacccacgcccagggccccccagcttggtccctcagtgcccagct

SEQ ID NO: 355025 - DNA, 174 bp, Homo Sapiens
agcacactaactttaactacattagttgagtgtagttgatacatctgtggcctcgtgtctataaagagcacactagattgtacccagcacttttggatatgacatgctaattagatgtatttaactattcataggaaagtgtatgataaatgactgtaatatttctaataaaaa

SEQ ID NO: 355026 - DNA, 2291 bp, Homo Sapiens
ggagaaaccattaggttaggtgatacggtgccagcaagggaagcaccatcgtccaggatctgcaaatctggttcctgggaaccccagactcctcagcagatctggctgtacatggatcagaaccacttcttcccccgcttaagctgtggtttgacccaagggtcagcatataggactgcctgctgcatttaatgaaggtgtttccttttggaagtctgtgctaccctctgcgcctagttgggaggagacatccatctggtctgggatttcgggagttagaatggaaagctctttgctaaagactggagtcatcctggcctgccaactggtggttcagagccggacgggcttgttttggacatcactgttgccttcactcagcagccacgggagagtgctccccatgcaactccaccttagaaaccacgtcagatactgagtagcttgctgactcctggaaacttctggtttttgttagtatcataatgaaggcaaagagaactaggctgtcatctttcagcctctttgacttactctagatgttgggagcagtggttgccaggtgaaacctgggccctttgtctttttcaccatgctttgggcagtttctgtatccagagagtccgcaggttcagataagctgaagaagagtaatagaacagcaaaggaagtggcttgaaggatgtgctagtaagccctgtggtttgtgcttaggtctctgctctgctacccaaggaactggtggttcagctggagataaaaagaagaatttgccaagtcagagaagaaaccccaaccccggaaaatcctctgtctccagtctctggaggtgaagcagggacaataagctaaggtagtatcttggccatcccaggaacttgtggcattaggacgatgaaggccatgcttcagtgttttcgtttctatttcatgagactttttgtcttcctgcttacaagtgggaagatgattgacagtgactctactatgcagggctgttggtaccaacctgagccctataggtggcagtccctggagaagtggtcacagaagatggagctctgatcccctgcttacctcttcacaacacttgtgtgcaaagatagttttagatttggtttagaagctatcctccagaacaggctcccatacttagaatgtttctagttaaggtaataaattaggcaacccaagtgtgactccactcaagtgtccttttctgtaggcaggaagggcccacaacatggcttaaaatgtagtccatggttctggcccacagtacagtgtgtatctataccaggtcacctgtgttcaatctgggagccttcctggccagtctgagtggcagccagaagggagctcatagtgtctaggagtctcaggcaaggtaggtcagggtactgtgggcaggggggatgtgtgtgataggagagggtaccctaaaccccataccttccctccctgacctgaaaagctgatctcaacagggattcacacagaattaggctgtgtttttgcattagctggtaggtgactttctcaaaattcttaaattcagaaagtatttagtaaacttgaggaaggtatgaaatctggaggaggcatccaggacccaggggtttgatagctttacaggtaggatcataccacaccaaaagagcagtggacaataagactatatgagctatatgaagcttttaggaatcatttaggacagacagagccctaaacaacccattcatgacttaagttgttggctcagtgtatgctggggacaaagaaaaactaacaagccgacctgcctttatgataaattctagtgtgcttacaagggatgacttcctgaggtgtgatctgtccaccttgaagaactccacaactgaagaaggggagctgtgagaacgtggattgttctacaacttgcacagggtaacagaggaagtggctgaggcctagagtcacgttttccagttcccttcgcaaactatatttcttggaacgcgaaaggaagctttacctatttcatagaagacctggaatccataacctcagaaggcaatattattgatagaaaatgtggaaggatcaggaagttcttagattcttggatgacagatgcatgttgatgccctatggagatgtccttgtgttttgaggtcactgaggtaggaagacctgtctactcttggtttcaccactagaacagtcttgggctggatgggttatagagctgagcggctgtgatggttctgtttttacattaacaaaaacaattaaaaacaccaaaaaca

SEQ ID NO: 355027 - DNA, 209 bp, Homo Sapiens
tatctctaacattacaagcagcatacaggaataccatatctgttaacagaaccttctggatatttaacagatggcccaattaactataaatataaaactaaatgtacttggctcattgaaggctatccaaatgcagtgttaagattaagattcaatcattttgctacagaatgtagctgggatcatatgtatgttaatgttagagatac

SEQ ID NO: 355028 - DNA, 409 bp, Homo Sapiens
agggcataaaacccctcgtggcttggatagaatccagggcttgtggctcttgaatgtgtctagacttgctggctccttgctccttgctctcccaggatcgattgtatcttgagttaaaagaacctgctctccattatctcaagcagcagagcaaatgctaaaccatcacagctgtaaatcatgtacttaatgcaacgcgacctttcaacctccacattctcaccacctgtttctttgttggatcaccaaaaaataccatgggcccccagagctcagggcctttgcagcctccaccatcatgatagccccttggtcctactttacttcttaaactgtctttttctcaatcctttgactctgccagactttgtcacccccacacccgatgttggttctgatcacctcaaca

SEQ ID NO: 355029 - DNA, 551 bp, Homo Sapiens
  misc_feature (197)..(197): n is a, c, g, or t
cttgcccttcccttcccaaagctgtgacggatgttcctaagagtaacctttatccaaacttgtctggacccatctttccctttggataaattccttgccttcccagaactgcaatgtctgttcccaaagttaaaccaatgcccttcagaaataggacatactgcattcggcctccatgacaaagatggtgattttcncgcaaggctttatgtaactgatgcatgtaaagtgggaaggatttggtagaaagcaaatcaatctgatctaaagaaatcttccccaacatttccctgggtactgtaatcttggctagtgtaggaatgactgaggtgattgagcagaggctgaagtctttcatcagactgcacagcaggcaaggacctggctgttaatttcgagattgaatctctggcaagaatgattcctaaaccagggagaggccaatgctctgagtaaaattatttcaaggaagatttctgagttttccaaaggttttcttttcaacttttaaaacaattagcatttacaaaaagagcatgcatctcttcatg

SEQ ID NO: 355030 - DNA, 1590 bp, Homo Sapiens
  misc_feature (64)..(66): n is a, c, g, or t
  misc_feature (76)..(77): n is a, c, g, or t
  misc_feature (82)..(82): n is a, c, g, or t
  misc_feature (84)..(84): n is a, c, g, or t
  misc_feature (339)..(339): n is a, c, g, or t
  misc_feature (383)..(383): n is a, c, g, or t
  misc_feature (423)..(423): n is a, c, g, or t
  misc_feature (470)..(470): n is a, c, g, or t
  misc_feature (527)..(527): n is a, c, g, or t
  misc_feature (532)..(532): n is a, c, g, or t
  misc_feature (574)..(574): n is a, c, g, or t
  misc_feature (581)..(581): n is a, c, g, or t
  misc_feature (589)..(589): n is a, c, g, or t
  misc_feature (1564)..(1564): n is a, c, g, or t
ggatcccgatctgattcctgatccttgattccttgatccttggtcccgccatgggagccttagnnnacaatattcnnccctngnccccagcccccggggccttgagggggaagaggcagcggtctgggacggagcagggggtgaccagactcaagaacccccccctcaacatcccccatcgcgcgcgctgcctgtccaggagcgccgagttcggagcgacccggagcgctgcggatacaaaggcgacgggccgagcggggcgcccgcggagcccacccggcagttcgcagcggcgggagcgtcgctggattttctctgagacaagcccacccgtccagnaaaatagagtccctcaaggtgacatttgacttcctgaaggtgcntcttggcctaaagaagccggtgctgaaggaggtggctgtngggccccccaagaggccccagcctgcggccctggagcgctacaaggngcggcgttcagacgccatggacaccgagtcccagtactcgggctattcctacaagtngggcnactcccgcagctcccgcaagcacagggaccgccgggaccganaccgctntaagagtngagatgggggccgaggggacaagtcggtgacaatccaggctcccggggagcccctgctggacaatgagtccacacgaggggatgagcgggatgacaactggggggaaacgacgacagtagcaacgggcacctcagagcacagcatctcccatgatgaccgcacacgcatcgccaaggacatggaggacagtgtccctctggactgctcccgtcacctgggtgtggcagcgggggccaccctggcactgctgtctttcctcacgcctctggccttcctgctgctgcccccactgctgtggcgggaggagctggagccttgcgggacggcctgcgagggcctcttcatctctgtcgccttcaagctgctcatcctgctactgggcagctgggctctgttcttccgccggcccaaggcctcgctgccccgcgtctttgtgctgcgtgccctgcttatggtgctggttttcctgctcgtggtctcctactggctcttctatggtgtgcgcatcctggatgctcgggagcgcagctaccagggcgtggtgcagttcgccgtgtcgctggtggacgcccttcttttcgtgcactacctggccgtggtcctgctggagctgcgccagctccagcctcagttcacgctcaaggtcgtgcgctccaccgacggcgccagccgcttctacaacgttggccatctcagcatccagcgcgtggcagtgtggatcctggagaagtattaccatgacttccctgtctacaaccctgccctcctcaacctgcccaagtccgtcctggccaagaaagtgtctggcttcaaggtgtattccctcggagaggaaaacagcaccaacaactccactggccagtctcgggctgtgattgcagcggcagctcggaggcgggacaacagtcacaatgagtactactatgaggaggctgagcatgagcgaagggtgcgcaagaggagggccaggcttntagtggcggtggaggaggccttcact

SEQ ID NO: 355031 - DNA, 443 bp, Homo Sapiens
gcggccgcgtggtatctcccgagggctgcttggaccctggtgggctgagtgctccgaggaggggtggactccaccttggacagtgggatgtggtgttccacatgtgcctgtttccacgccagcaccttgacttggcagcatggagccaaggtctgtccccgcccaggagggtgccttcctcgggggtagggggacggcccactctgccccagggagtcccttttgatgggaagtgcagtcagcagcgtggaggtgtctgggccaccttcagaaggtggatgtggtggccgagaccccgtccacggagggtgatggcctttcccttctgcaggtgcgggcaggtgggcctgggaccggtgctggggcctctccttgctgtgtgtgagggcccaggtggaaggcgcggacctgacagcattccaataaagcatacgggaacatgc

SEQ ID NO: 355032 - DNA, 1286 bp, Homo Sapiens
  misc_feature (1270)..(1270): n is a, c, g, or t
cgccttcgcccgcttccggtcgtcgtcgtcgccgctgctgccgctgctgttgctcctgaggctgctggctgaggccggaggatcgagcggcgggctggcgggctggcggctgagagggctggcgtgctgggagcggagcgggacgagggaacgggaggaagcgagcgaggagcgcgcagagcgcgcttttccgtccgcctgaggagccgaagcagccccggccccgccgccgcgctgcccgcggacaaagccgagagcccgcgcccacagccatgtcctcgtcagccggcagcggccaccagcccagccagagccgcgccatccccacccgcaccgtggccatcagcgacgccgcgcagctacctcatgactattgcaccacgcccggggggacgctcttctccaccacaccgggaggaactcgaatcatttatgacagaaagtttctgttggatcgtcgcaattctcccatggctcagaccccaccctgccatctgcccaatatcccaggagtcactagccctggcaccttaattgaagactccaaagtagaagtaaacaatttgaacaacttgaacaatcacgacaggaaacatgcagttggggatgatgctcagttcgagatggacatctgactctcctgcaaggattagaagaaaagcagcaacactgatacttgtgtgcacctgatttggccaataggatcaacagtgaaaagacagaagaggcaataccagcagtccccattacagtctccacctccccgtcttcctctgggtgccaaatgatgggaagatgagcttcatctgaccatttcttctccctgtctcctgttccccttcccagttaaacaggttagattgaaggcccttgctgtatttctgtagagctaagcagcccttagaggaaaacagttcaactctgactttcctagttgtttttttattgagagccaccctcataccctgtaattttgtcacaaatcaaatatcaacctaccaacaactgcctggctgggaagtctggggaagggatacagagcttggtgggcctaacaccattcatattccttaccctctgtctctcctccctgtatcccacctatggttcagtgttgcaagagtctgggcttggggtctttaaaaccagcagggggaaatgataaaaagagagctgctttccctttttaccttgagggtatttcgtccctcgggacaggaggcacagcttgtgcaaactctgggtaggcgtttaccctgtggacactgtnttttgagggtccactt

SEQ ID NO: 355033 - DNA, 1014 bp, Homo Sapiens
  misc_feature (95)..(105): n is a, c, g, or t
agatcaaatttcgtcgagattaaccgaacacagttttccggggatatttgtgcggggtgatagaaacgtggcgaaagagtggccgtgggttaagnnnnnnnnnnngagaaggacaaagggaaagtgaaaacccgggaaagaaagagggaagaggaggttaaggaagggagaaatttcagggattaccgccagggaaaggcccaagaaaactgggggaggaaccacatttttttaaagcgccgtggcttatttatgccaagcaggccagggaaaggcagatccgccggaggaaaaaaatgcggttgtgttgggggaacattatggaaaatcaacgttcggactcaggacataagaaactgcaatctaaggacaactaccacaatgctcactggacttaaaaatgacgactgagaccgggtactcaaatgggtcaacgttcttcagcggtcattcttaggcattatctgacagaatactatgatcaggccttacccaccaagtggaagctaaagtgcctctattacttggtatggacctgctctaggagcagacaaaatcactttgctttcttgaagtacaagaggactctgccagcaacgagatgcaagcagggaggagtggcagaagaagagcaaaactggttaccaagggctctcttctgatgtacagagttaaaaatatctgcacaaatgcactaagtaaaagaatgggaagatgaactataataccaaagacagaagacattcctcccagaggaaagaaaggaagtggacctcaaaacagtgtcacagggtaacgctaccagagttgcacaagctgtgctctgtcccgagggacgaatacctcaaggtaaaagggaaagcagctctctttttatcatttccccctgctggttttaaagaccccaagcccagactcttgcaacactgaaccataggtgggatacagggaggagagacagagggtaaggaatatgaatggtgttaggcccaccaagctctgtatcccttcccc

SEQ ID NO: 355034 - DNA, 714 bp, Homo Sapiens
  misc_feature (33)..(33): n is a, c, g, or t
  misc_feature (379)..(389): n is a, c, g, or t
tgggtgccaaatgatgggaagatgagcttcatntgaccatttcttctccctgtctcctgttccccttcccagttaaacagcccaggccaagggtacttttaactggaaactggggaggagggaagaacactagcagggagctaagaggcaggttgctgggtaagccatcctgctcctacctggtgcctgtatctacattgctgagtgctgtgcgccagtgcctttccttcatctgcagatggagcccatctctttccacctgggtgaggagaccctctgctactccaggggtaaaccttaaagaaggtgtcttgaagagcccaaaggacactcacgtgctaaggtgtccattttatgcatctttaaaatattttatttnnnnnnnnnnntagccctgccctgtcttagtgccactaacggcccagttccatccattctgaatggaaaagcggagactgccagcactttccttggtcttccctttgtctcccatgatgtgttgttccctcatccctcccatccatttcactgtgtgtggatggatagcagagggtaccacgcagtccttgaggcagtcctgtgtgattccatgatcagttgtttttgtattttaactattcttccaaaccagcagatgtttggaaattaaggaaaaaattaaattctcatcaatggttgctgttatagttaaatcagtaaagatcttgagtatca

SEQ ID NO: 355035 - DNA, 881 bp, Homo Sapiens
ggggcagtcgccgaagatggcggggcgaagtctgtgtctcacgagaagcagcgttccagggactccgttcccgccacccgttcagcaaccctctacacctggacccgacctcctcgccttggaggaagaatataagcgtttaaatgcagaattgcaggcaaaaacagctgacgtggttcaacaagctaaggaaataataagagatcggcaagaagtacgatctaggcctgtttcaacacaaatgaaatcatgtgatgacgaagatgattacagtttaagaggtctgttaccatctgaagggatagttcatcttcattcagaaactaagccaaagaccaaaaacattgatcctgtaaacaaggttcaaaacaaattacactctgcaaataaaggaaggaaaacaaattcaagtgttaaattgaaatactctgatgtccaaactgccgacgatgttgccattccagaggatttctcagacttttcccttgcaaaaacaattagcaaaattgaagggcaactggaggaagaaggcttacctgaatatatagatgatattctgtctggtgtcaggtatgaccattggaacagaagcagcagatcacgctttctaaagggcccaactccgttgttatgcccgaggaattggataactgctgtatgtgaactgcaatccacaaggagcatgaacattgcggaaatttaaaggcctcacgtcgcaaactgtggaatgcaggatctactgacaaccagcagccgaccactaattttgcaacagcgcacgagttgaacatttccacgcacttgttcgcatgaaccaagcaacatcgcgaaggtttacccgcgacgatgtctcagataatgggatttcaccacggcagccg

SEQ ID NO: 355036 - DNA, 773 bp, Homo Sapiens
gaaaaacaagcagcaaaacaactgccagcagccatactttatcaaaagcagtcaaagcataagaaatcactaattgaccctaaaatgtcaaaattttcacctattcaagaaagtagagaccttgaacctgattattcaagctatatgacttctagcacttcatctattggtggcatttcctccagggcaaggctccttcaagatgacatcacttttggcctcagaaaaaatattacagaccaacaaaaatttatgggatcttctcttggcacaggactgggcacattaggaaataccatacgctcagctctgcaggatgaagcggataagccatacagtagtggcagcaggtccagaccttcctccagaccttcctctgtctatgggcttgatttatcaattaaaagggattcttctagctcttccctaagactgaaagctcaagaggctgaagctctagatgtttcctttagtcatgcatcatcctctgccagaactaagccgaccagtttgccaattagtcaaagtagaggaagaataccaattgtggcccagaattctgaagaagaaagcccactcagtcctgttggccagccaatgggaatggccagggctgcagctggacccctgccaccaatatctgcagacaccagggatcagtttggatcaagccactcattgcctgaagttcagcaacacatgagggaagaatcacggactcgaggctatgaccgtgacatagcattcatcatggatgacttccaacttgcctt

SEQ ID NO: 355037 - DNA, 1095 bp, Homo Sapiens
  misc_feature (264)..(264): n is a, c, g, or t
  misc_feature (1071)..(1071): n is a, c, g, or t
ttcaattaggtcctgggggctgattaaagggtgattttagggcccccttatgtttgcaccgagacagggaagatgagtaacccagccttgaggaagggccaaaaggggtggccttctggggtattctaggtcttcggtctcctaggggacacccaggggctataagggacagctgcagaagagtagtggagtagctttccttaaggaactcaagacattttgtcttccacttctccactgtctagtagcatgagcctgtgggancgtcaagggaatttagggaagtttagacacttccacctgtggtctagggagccaggaatctggacagtgttctgggtcatagccaggattctggaattgtagtatctgtgcattgctataacgtaaatcccagtcccagacagacagctgcaggttaaaagagttcccagctggaggctgggagtatcctggggtgtagacttgtgtataggagtttaactgtccgctctgctttccgcgctcccagggggtattcctcaggaaggtaagggtgtcaggaaccctgacactgtcatgaagagcaagaaggaaaaactcagagaattcaaaatcagctggaaactgctggaggagctgccagacacaatcaaggaagaggagaaacaccggagcctgaaaagaaattaagaggttggaagggattattgggacccaaagagggaggatgacgagatgataagggaatggggaacacagggaatagggggaacttatggaagtcagggaatgaaaatctgaattgagggtagcaggggcttgtaaggcctcactcatcaggatcttcgtcccagcctaacctcggggcccttctgaccggattcacctccaatggattatacaaaataatttctcattctcttacttccttagtaatatgcccccgatgccatcccgaatcattctcacctcttcactggccccagttcccccaagccgagtcaggaagggatgtccagctgccacccactctcgctgtactagtgattggaagccaaacagtgttcgggttagggggcgaaagcagcngcccgatccggagaattccggacc

SEQ ID NO: 355038 - DNA, 1613 bp, Homo Sapiens
  misc_feature (3)..(3): n is a, c, g, or t
  misc_feature (5)..(5): n is a, c, g, or t
  misc_feature (16)..(16): n is a, c, g, or t
  misc_feature (20)..(20): n is a, c, g, or t
  misc_feature (53)..(53): n is a, c, g, or t
  misc_feature (55)..(55): n is a, c, g, or t
  misc_feature (61)..(61): n is a, c, g, or t
  misc_feature (76)..(76): n is a, c, g, or t
  misc_feature (128)..(128): n is a, c, g, or t
  misc_feature (151)..(151): n is a, c, g, or t
  misc_feature (563)..(563): n is a, c, g, or t
  misc_feature (1114)..(1169): n is a, c, g, or t
  misc_feature (1408)..(1408): n is a, c, g, or t
  misc_feature (1559)..(1559): n is a, c, g, or t
ccnancactgcaatgngtgnaggaagcgcgatgccggatgaacagaaatccangntactcnccctcgtgtcgcaanagacccgccctgcccttgccttgcccggcccggtcccgcccgcacctccaantacagcagcctcatggtatgganggcccaacatgcctcccccaggaccttcggcgtgccccccggatgccaggccagcctcctggagggcctcccaagccctggcctgaaggacccatggcgaatgctgctgcccccacgagcacccctcagaagctgattcccccgcagccaacgggccgcccttcccccgcgccccctgccgtcccacccgccgcctcgcccgtgatgccaccgcagacccagtcccccgggcagccggcccagcccgcgcccatggtgccactgcaccagaagcagagccgcatcacccccatccagaagccgcggggcctcgaccctgtggagatcctgcaggagcgcgagtacaggctgcaggctcgcatcgcacaccgaattcaggaacttgaaaaccttcccgggtccctggccgggnatttgcgaaccaaagcgaccattgagctcaaggccctcaggctgctgaacttccagaggcagctgcgccaggaggtggtggtgtgcatgcggagggacacagcgctggagacagccctcaatgctaaggcctacaagcgcagcaagcgccagtccctgcgcgaggcccgcatcactgagaagctggagaagcagcagaagatcgagcaggagcgcaagcgccggcagaagcaccaggaatacctcaatagcattctccagcatgccaaggatttcaaggaatatcacagatccgtcacaggcaaaatccagaagctgaccaaggcagtggccacgtaccacgccaacacggagcgggagcagaagaaagagaacgagcggatcgagaaggagcgcatgcggaggctcatggctgaagatgaggaggggtaccgcaagctcatcgaccagaagaaggacaagcgcctggcctacctcttgcagcagacagacgagtacgtggctaacctcacggagctggtgcggcagcacaaggctgcccagtgtctgccnnnnnnnnnnnnnnnnnnnnnnnnnnnnnnnnnnnnnnnnnnnnnnnnnnnnnnnncgcctgccattgggccggatggcgagcctctggacgagaccagccagatgagcgcactcccggtgaaggtgatccacgtggagagtgggaagatcctcacaggcacagatgcccccaaagccgggcagctggaggcctggctcgagatgaacccggggtatgaagtagctccgaggtctgatagtgaagaaagtggctcagaagaagaggaagaggaggaggaggaagagcagccgcanaggcagcacagcctcccaccctgcccgtggaggagaagaagaagattccagatccagacagcgatgacgtctctaaggtggacgcgcggcacatcattgagaatgccaagcaagatgtcgatgatgaatatggcgtgtcccaggccctttnacgtggcctgcagtcctacttatgccgtggcccattgctgtcacttagagagtt

SEQ ID NO: 355039 - DNA, 909 bp, Homo Sapiens
  misc_feature (675)..(719): n is a, c, g, or t
ggactgatgcctgtatcttccctttgttaaggtgtaacttgatgtagggtcaaggtttttgtgacaacaggcacactccacacagagaggatatgatgagaatatggccatcacctgaaaagttttcttatcttctgtgcttttggtccctggaaacaaatccgcctatgtatgaagctagttgatttccagttgcactatttccagttgcctctgaagttcacaggcaatacattgtctagtcctttgcgaatttctctgatttgtgggcacagttatgaagtttccccacatgtgaagacaggtacaaaatagcagagccaagcagacagtgggtctattcttcattagctcagtgacttgtccacactcgtcttagcacttacgtttcaaaagcttgtcacaaacccttggagtcattcccagataatagaactggaaatgataaatcccctaatgccaagggtctagtgtgttcttagtggttatactgggaagtgtgtggagatttaggtgctgctctgctgctctggatggctgaaggctcctgggccatcttcatgtgctgcttgaagagctcctattttgtactcctggctagaatgctgtggaacaaatacaaagtgaaaaaagttctctgtagatttctgaagtgcatattcattgatgccaagnnnnnnnnnnnnnnnnnnnnnnnnnnnnnnnnnnnnnnnnnnnnnttccaagctggtttcaacagtactttgtttccagaacaaagaaatgtttctaacggcccatcatgctcctggcaaagcagtggtggatcccgtaccccgtcagcgagttcacacacaggaccacaatgttcttccacaggttccgtgtccccaccaccttcacgatgcagaccttcttgggcctccggga

SEQ ID NO: 355040 - DNA, 806 bp, Homo Sapiens
  misc_feature (14)..(14): n is a, c, g, or t
  misc_feature (25)..(25): n is a, c, g, or t
  misc_feature (747)..(760): n is a, c, g, or t
gggaaacacctggnttcgggattcncagttttcttggggagcaagccactgcccagcccttctgtctttttttataacggccatttttgtaataaaaatgtaagtacccaaggaagaaataaaattgtcaaaatatgctgctttcttaatagcaagcaggttgtactcactggaatgccacattcacaacagaatcagaggtctgtgaaaacattaagtggctccttaacttctccagtaagaatcagggacttgaaatggaaacgttaacagccacatgcccaatgctgggcagtctcccatgccttccacagtgaagggcttgagaaaaatcacatccaatgtcatgtgtttccagccacaccaaaaggtgcttggggtggagggctgggggcatagaaggtcaggcctcaggaggcctcaagttcgcattcagctttgccactgtaccaggtgggctgacgcacatcccctaaacattctggatctcttactcatcgtgaaaggcagacgctctaagtctaaagtctagggtaggagtttccattctttggaaaaccaaagatggttactcttcttaatgaaactgagaagaaggtatctacagaaaacactgaatttaaacaaattatgaccttgtttgttgaagccatcaaggacccgaggtctgtttaagcactaataggattttaggccagcatccagtcagaagagatagttcacagactcagagttggaaacagattnnnnnnnnnnnnnngatgtcaacatagaaaatgatgatagagtttagttaaaaaaattca

SEQ ID NO: 355041 - DNA, 871 bp, Homo Sapiens
  misc_feature (324)..(374): n is a, c, g, or t
  misc_feature (410)..(423): n is a, c, g, or t
ctagcacttgggcagtaaggtagcgggtgtgtattatgctattgccatagttctcgtctttgtggattcacataccctttcccatgaggagcttgctactaacagcctcctgtttctgttgtttttatatgggagaagagaaagagcttggaatttcaattgtctaaacaattggtatgatttacaagaaggcaaaccattcaggagatgttcaacagtgtatcattcttagcattcaatacaatgtttattataaaatatacacctgagtttatgtttttctgccaggctgaagggcaataatgtcttgctatgcaaacactnnnnnnnnnnnnnnnnnnnnnnnnnnnnnnnnnnnnnnnnnnnnnnnnnnnaactaaactctatcatcattttctatgttgacatcnnnnnnnnnnnnnnaatctggtttccaactctgagtctggtgaactatctcttcttgactgggatgctgggcctaaaatcctattagggcttaaacagacctcaaaacactctgaacctgtaggccaatacagagatgtggtccttggatatatctggggtcctggagggcttcaacaaacaaggtcataattggtttaaattcagggtttccggtagataccttcttctcagtttcattcaagaagagtaaccatcttgggtttcccaaagaagggaaactcctaccctagactttagacttagagcgtcggcctttcacgatgagtaagagatccaaaaggtacaggggattgtgcgtcagaccaacgggatacaggggcaaaactgaatgcgaacttgaggccctcctgaggcctgaccttctatggcccccagccctccacccccaagcactttttgg

SEQ ID NO: 355042 - DNA, 783 bp, Homo Sapiens
aacctatgagtgcctatctgcttttacaaaagggctgtgatcttacaccatctattcgaccctgaagctgaaggtgtgttggtggcatgtgatttgcccaggacttgttgtccatcaggacttggcagagctctagggccacagcctgtcttttcaccatagtgatttcttcactccgaacctgagacccagggtgttcaggctccctctactttttcctcgtcacctttcctaccctccctcaggccccaccaaagacacctagaagatttcatcccacattcatactgagatcaccagagtcagtgcatctctgcttccggggataacaaaattttaactcaggatgaactcttgagggatcaagaccctagaggtagaatttaggcttaggaacccctgacgcctccaaggagacagctgtactgcagtctgaatttgagaaatgtgtacatacacattatgtggggggtgggggagatctagtgctgattaacatggcatgttcttgtttacttgaaaaccgcttctcaagaaataatctagttttcagaaaatttttaaatttacattctcatgtacaaataaattgtatgctttccggataagtgacatgtttatatggcgataaagggaattataatgctcttaactcttatgtagtatgttctcatcaaaatcaccaagcatgagaacactgtttagtctcattcatcactcagcacagcctctttctgtccacttcagggccaagtctttgccatggccccacagggagagcgt

SEQ ID NO: 355043 - DNA, 968 bp, Homo Sapiens
  misc_feature (6)..(6): n is a, c, g, or t
  misc_feature (13)..(16): n is a, c, g, or t
  misc_feature (34)..(34): n is a, c, g, or t
  misc_feature (91)..(91): n is a, c, g, or t
  misc_feature (104)..(104): n is a, c, g, or t
  misc_feature (261)..(261): n is a, c, g, or t
cagtangcagagnnnntatgtaacctaaatctgnactatttcactgaactgattgaaaaagccatatataaaatggcattaccagtgttanttgaaaacaggcnacgtgttttactagaaaattaacctaataaccaaaaaactccacttcttcccagagtgttatattgtgctgacatcccatagataatattataaaaagattttatttttgcaataggctgggttcacagtgagtatgttagtaccaagatcatgggnggaagattattataagaatgtcattagtggaatgtatataaggcatgtaaaaaaatagttttaaagctcttagagggcaatgctccaaactggcagctgctagaaaaggtgctgacaggaatagaaaatattaaagaaatttagtttcagcacatattatagtgcttctacaatcaaaataattcacataaatttcaattgctggaactaatggaccaaatgagaatggacttttgcccctttaactactagaccaatcttgaaaacggaagcaatcacttgcaatcttccacacagtattgttgggagtggactgagcagtcagcaggaagttctggttgaagaaatgttgtttgtttccatcaaacttcacagttccactggtcacaacaagaactgtagtttgggactgagttgcttgctcatgaactggttggcaatctaacatattgacctggaactcactagaaggcaatgtgtcaaaaaaattatttagggcatccagccctgaaacagcatttccattccatattaaggtggccttgtccagatacagcctggttagtgcccgtcttcttttatccattgtctcatagtaaatattgacaaactcctcagcagctctacatgcctgatctacataagttttaaaatccccaacatccccgcctctcgctatttcccagctcaggtcctttccgggatca

SEQ ID NO: 355044 - DNA, 718 bp, Homo Sapiens
ctcagggagacagagaaggataccaaagaagaagtaactattatgaggggccacacaccagccactcaagccctgcggaccggacacgtgaggaggtagtgacgccgacactgccagaacacactgctacaaggtcccagatggccacgtctctggattttaaaacttatgtagatcaggcatgtagagctgctgaggagtttgtcaatatttactatgagacaatggataaaagaagacgggcactaaccaggctgtatctggacaaggccaccttaatatggaatggaaatgctgtttcagggctggatgccctaaataatttttttgacacattgccttctagtgagttccaggtcaatatgttagattgccaaccagttcatgagcaagcaactcagtcccaaactacagttcttgttgtgaccagtggaactgtgaagtttgatggaaacaaacaacatttcttcaaccagaacttcctgctgactgctcagtccactcccaacaatactgtgtggaagattgcaagtgattgcttccgttttcaagattggtctagtagttaaaggggcaaaagtccattctcatttggtccattagttccagcaattgaaatttatgtgaattatttagattgtagaagcactataatatgtgctgaaactaaatttctttaatattttctattcctgtcagcaccttttctagcagctgc

SEQ ID NO: 355045 - DNA, 794 bp, Homo Sapiens
tatgaaaacattcggtaggtcgagctcgtggtaatcggcacaggatggaggagtgatgtatatttcaggaggaattactcatgatactttccaaaaggagctcatgtgctttgaccctgatactgacaaatggatccagaaggcgccaatgaccactgtcagaggtctgcattgcatgtgtacagtgggagaaaggctctatgtcattggtggcaatcacttcagaggaacaagtgattatgatgatgtcctaagctgtgaatactattcacctatccttgaccagtggaccccaattgctgccatgttaagagggcagagtgatgttggggtcgctgtcttcgaaaataaaatctatgtggttggggggtattcttggaataatcgttgtatggtagagatagtgcagaaatatgatccagataaagatgaatggcataaggtttttgatctgccagaatcccttggtggcattcgtgcttgcacactcacagtttttccaccagaagaaaccacaccatcaccttctagagagtcccctctttctgcaccttaagatcatctctacaactaagatgctgtagttctatctttgcaatgtgtcataaattctcttctttttcccccctaagctagtatatatggttaggattaccctctggtaattgatacagatattggaaaaaagacaacattgatgttatttgtgctctttgtttggcctagaatgtttataaagtggtaacacaaccattctggaaatgtatcccatagaagctgatgtttaacatatg

SEQ ID NO: 355046 - DNA, 1159 bp, Homo Sapiens
  misc_feature (167)..(461): n is a, c, g, or t
  misc_feature (535)..(563): n is a, c, g, or t
  misc_feature (1097)..(1097): n is a, c, g, or t
ggctggtacggtctggagtgtagggatcattagttaacctggcatcaattaatgaggttctaataagcttgtcttatgatactacctggaggttacagagctggtatctgaggaataagcatcagtgagttggtcagatacaatagacgtttaaaatagggcttcannnnnnnnnnnnnnnnnnnnnnnnnnnnnnnnnnnnnnnnnnnnnnnnnnnnnnnnnnnnnnnnnnnnnnnnnnnnnnnnnnnnnnnnnnnnnnnnnnnnnnnnnnnnnnnnnnnnnnnnnnnnnnnnnnnnnnnnnnnnnnnnnnnnnnnnnnnnnnnnnnnnnnnnnnnnnnnnnnnnnnnnnnnnnnnnnnnnnnnnnnnnnnnnnnnnnnnnnnnnnnnnnnnnnnnnnnnnnnnnnnnnnnnnnnnnnnnnnnnnnnnnnnnnnnnnnnnnnnnnnnnnnnnnnnnnnnnaacaaatgaaagcagtggttttcaacatcaactaaggatcttattagaaatgaagactgcaagccgcacacctnnnnnnnnnnnnnnnnnnnnnnnnnnnnnacaattccctggtccccagataagtaattcttaagtattctatcttaagtagacctaaagccgtattttgaccctgtactagtatgttattttagtataatcattactgaattcatcatacttttacagtaaacagtacttactttgagtaataacacattacacttaatagtagtgaactgcatcctcgatatcaaaagcgacttttgatgtagttcactctggacccgtacaggaacaccagccttgcagattctccacgcaatggaaactggctataaccctacccagattctgaaaagtgaagggggatcaacctaaaatatgtagcttggtaaacagttttatatcctgcatcttaggggggaaaatcagttgacgcagattgaaaacaagttgttccataaggtttattatgaaaaacagtagccctcctaccctgcctttaccccactttccttgcctcacagtagtctgtccaactcttggctgatttgtttgtatttacctccatgtctcaatatgaacatgttntcatgactattccttgatggttttttgtttgcttgttttaagacggtctcactcttccccca

SEQ ID NO: 355047 - DNA, 450 bp, Homo Sapiens
  misc_feature (193)..(312): n is a, c, g, or t
agtaatgaaagaggaggggaaaaaatccagcacattagttaacctggcatcaattaatgaggttctaataagctttgtcttatgatactacctggaggttacagagctggtattctgaggaataagcatcagtgagttggtcagatacaatagacgtttaaaatagggcttcaggccaaacatggtgccccannnnnnnnnnnnnnnnnnnnnnnnnnnnnnnnnnnnnnnnnnnnnnnnnnnnnnnnnnnnnnnnnnnnnnnnnnnnnnnnnnnnnnnnnnnnnnnnnnnnnnnnnnnnnnnnnnnnnnnnccattatcttttgaatcctctcttcctcctgcccaccatgaatttacttcctctcacccatctccctgatattgtaattctggttagatcatattcagtgtcaaattattaagatgtgattaaactttttaaaaataa

SEQ ID NO: 355048 - DNA, 1205 bp, Homo Sapiens
  misc_feature (59)..(169): n is a, c, g, or t
  misc_feature (332)..(414): n is a, c, g, or t
  misc_feature (665)..(673): n is a, c, g, or t
cacacctgtagtcctcagcctcctgagtagctagaaatactggtgcacaccaccatggnnnnnnnnnnnnnnnnnnnnnnnnnnnnnnnnnnnnnnnnnnnnnnnnnnnnnnnnnnnnnnnnnnnnnnnnnnnnnnnnnnnnnnnnnnnnnnnnnnnnnnnnnnnnnnngtgtgagccactgcacccggccaccattatcttttgaatcctctcttcctcctgcccaccatgaatttacttcctctcacccatctccctgatattgaaattctggttagatcatattcagtgtcaaattattaagatgtgattaaactttttaaaaataccnnnnnnnnnnnnnnnnnnnnnnnnnnnnnnnnnnnnnnnnnnnnnnnnnnnnnnnnnnnnnnnnnnnnnnnnnnnnnnnnnnnggggggccttttaaaaaaaccccccggggggcccagatttccccgaccccgcttttttggaaaaaggggccccctaaaggggcccgattaaaacccgagggattgggcccttttttaccaaccccccgacggggaaaacaaacctaacctctgcgaattttgcgaggagagaccctttcctttctttgggcgacgccaaacccgggccacacactctccaacgaaaactaccgccaccccaaagccgaaannnnnnnnntttttctgccctcccccaccggggaaaaaaccccggagccgaaaaccccccactgaaaccgaatcgaaagcaccattgcccattactgagataacaccccccgcccaacgcactatcattccgtcccggcccccgcgagtgatccactctaagcggccgacccgcgatttctccgcatacgcgtgtgcccccgctcgggcctcgtacccataacaatccccatacccctctccgcccccgtctatatactgtatgacaaaattccgcactcccccctaatattctacgcccgggtgcttacctcatacccgttcctccactgttcaatctgcatgttgtctcctcagacacgcgagcccgaattctaatcccctgtaacgctcgttatccgcctgcgcgctaacgacatatcgcgccgctatccggcctctctacgacacataagactacacgcgccctaggaatactcccctagaaaaacaccgccctcccccacaaagcaaaagctttacgccgccgcgcgtgggacaag

SEQ ID NO: 355049 - DNA, 793 bp, Homo Sapiens
  misc_feature (60)..(60): n is a, c, g, or t
  misc_feature (262)..(299): n is a, c, g, or t
aataacaatggtatgtacagaatcaataatcacagtgtggtgacttcaacagtccatatntctagcagagtattatttcccttgtggtgtgatataaaaaccttggttggtgtatgataaagaagagaacagagaacaagacgcccctctcctttaagtgcactgttagctatcttacaggctcgcatttgcttcccgggccctggcttcacgctggggccctcgctggggagatcaacttcgagcgccaaaatgctatttnnnnnnnnnnnnnnnnnnnnnnnnnnnnnnnnnnnnnngctaagtggggtgtcaggaggaagaggttgggctttttaaattttttacttcaatatcaggcgtctgggggagaaaacctccccgatattttcaggaaagtaagaacaagagagagtggatgttggagttggagcgaggttggcagtagcaggggcaggggcaggggcgggtggacagccagccgaggaggtgccacgtcccggagcgccgagggctgccatgcccgcatccagactgctgtgaaggcggctgcgctctctcagtgccgtctcgggagtgtgctggtcctctgtttccatttggtcttgagtggtgctgagtgaggtgacctttcgaggcgcgcgcggggcgcgggtgtggagggcagcctttagcacacctccttgcccgtgctggtgcccggcaggatgttgagctgcgtgacctgcgccgcgtgctccttggccttgagcctcagcgcggctatgctagaggcgcgtctgtctgcggccgc

SEQ ID NO: 355050 - DNA, 660 bp, Homo Sapiens
  misc_feature (539)..(539): n is a, c, g, or t
  misc_feature (554)..(554): n is a, c, g, or t
gaattcggcacgagctgagctaaaatggctgaggagagagtcgcgacgagaactcaatttcctgtatctactgagtctcaaaaaccccggcagaaaaaagctccagagtttcctattttggagaagcagaactggttgattcatcttcattatatccggaaagattatgaagcctgcaaggctgttatcaaagaacagcttcaagagactcagggattgtgtgaatatgctatctatgtccaagcattgatatttcgcctagaaggaaatatccaagaatccctagaactcttccagacatgtgcagttcttagtcctcagagtgctgataacctcaagcaggtggccagatctttatttcttttgggaaaacataaagctgccattgaagtatataatgaagcagctaaactcaaccagaaagattgggtaagtagagaactttcagttctttcttaatagtaaacttgctaatggttccatttatcatctgggctgccttatttctgaaatcttacattccaaaaatgccttgattntaacctcatactaantcactgattgataagataggatcgagcagctcttacaagctggtcttgtgatgaccctagacctttggattttttcgcaatgaattcccaggttagcaattgggtt

SEQ ID NO: 355051 - DNA, 1129 bp, Homo Sapiens
  misc_feature (852)..(852): n is a, c, g, or t
ggggcagtggtgggctgagctaaaatggctgaggagagagtcgcgacgagaactcaatttcctgtatctactgagtctcaaaaaccccggcagaaaaaagctccagagtttcctattttggagaagcagaactggttgattcatcttcattatatccggaaagattatgaagcctgcaaggctgttatcaaagaacagcttcaagagactcagggattgtgtgaatatgctatctatgtccaagcattgatatttcgcctagaaggaaatatccaagaatccctagaactcttccagacatgtgcagttcttagtcctcagagtgctgataacctcaagcaggtggccagatctttatttcttttgggaaaacataaagctgccattgaagtatataatgaagcagctaaactcaaccagaaagattgggagatcagccataacctaggagtttgctacatatacctgaagcagttcaacaaggcacaagaccagttgcacaatgccctgaatcttaataggcacgatctgacttatataatgctggggaagatccacttgctggagggagacttggacaaggccattgaagtctacaagaaagcagtggagttctcaccagaaaatacagagcttcttacaactttaggattactctacttacagctcggcatttaccagaaggcatttgaacatcttggcaatgcactgacttatgaccctaccaactacaaggccatcttggcagcaggcagcatgatgcagaaccacggggacttcgatgtggccctcaccaaatacagagttgtggcttgtgctgttccagaaagtcctccactctggaataacatnggaatgtgtttctttggcaagaagaactatgtggcggccatcagctgcctgaaacgagccaactacttggcacccttcgattggaagattctgtataatttgggccttgtccatttgaccatgcagcagtatgcatcagcttttcattttctcagtgcggccatcaacttccagccaaagatggggggagctctacatgctctttggcagtgggctctgaccaatcttggaagatattgaaaaattgccaagagagcctacgcagaagcagtcaccg

SEQ ID NO: 355052 - DNA, 420 bp, Homo Sapiens
agacatacggactaagaaaaagccagctcgaagaagatatgaatcatatggaatgcattcagatgatgacgccaacagcgatgcatctagtgcttgttcagaacgctcctatagttctcgaaatggtagtattcctacatatatgaggcagacggaagatgtggcagaagtcctcaatagatgtgctagttccaattggtcagaaaggaaagaaggcctcctaggtctgcagaacttattaaaaaatcagagaacactaagtcgagttgaactgaaaagattatgtgaaattttcacaagaatgtttgctgaccctcatggcaaggtattcagcatgtttttggagactctagcggatttcatacaagtccacaaagatgatcttcaagattggttgtttgtactgctgacacaactact

SEQ ID NO: 355053 - DNA, 410 bp, Homo Sapiens
ttctgaataagctcttgttgcctttccgtaagttcttgaatttgaatttctactgcatgtagctcactggttatagaatccagttcctcagttagagctgaaacggacgccattctttttctttccaaatttgtttctaaaataatccaaatttctttcaacaaatggcagctgctaataaacaggctttggtggccaatcctcccttgacccttcaaagctgtaacagtagttatcccagagcctctccccaccgagaagcccagtctaactctccggtgtttgaccgtccggtgtccgactgtcctgtgtccgactctccgatctccgactctcggatctccgacaccaaagcacccaggcctcgagcagatctttccgctactcgggagtaaaatcttcccgccccc

SEQ ID NO: 355054 - DNA, 2555 bp, Homo Sapiens
  misc_feature (398)..(398): n is a, c, g, or t
aaaattacagtgctgtctttaattaaaaaacttgttcatttctcactgtgcacaatgtagcactaacatggtcttccgaacactgctgcttggtataaaaccgagaaatattaaagaccaggaataaggttatgtgtcctatgggtacatttcggaaaagaaaatacatccaacgagtatgactctagataggattttgtacaccctcaacaagtgacaaaattcaaaactaggtaaccgccctcataaggtacttgaaactaaaatttttgccacgaaaacatggcatgtgcaaaagttctctctctggccatcactcctgctaaggacactgggaaggacatggtcaacgtagcagtcgatcaaaaagattccagggaaactgcgcaacagcctgnggccgagaagcgaaacttggtcttctccaccctcgtcgcactccttttccccgagacttggtactgggagataggacgggagtctcctacacgcagtcaacacttgccacgagcggctagacttaggacaggcaagttgccctgccatccttctatcgcccccacccctcctttacttaagggcgatggcagagacgtcctcctcccccttctcctcctctttggtgcctccagccaggaggcgggagcgatccacagcagctgacccagctcaggcactgcctctctcacagccctcaagacacaccatgggcccagaggcaggtttgctacacagcagcgacgacgcaggcggcggccccagcgactcgcaactgcctccctgaccacagcggccaccgcccaacacccccgagaagccatcgccaccaccggcaggagaacctagggtccataaagccatcttcgcgatcgactaaagctacgtcaacaactatggcgggcgacgggcggcgggcagaggcggtgcgggaaggatggggtgtgtacgtcacccccagggcccccatccgagagggaaggggccggctcgcccctcaaaatggcggcagcagcgatgcgcctgcgtacagaactcctccgtcgcgccagggccggcgggaagtgaggttctcggacgagccgccagaagtgtacggcgacttcgagcccctggtggccaaagaaaggtccccggtgggaaaacgaacccggctagaagagttccggtccgattctgcgaaagaggaagtgagagaaagcgcgtactaccttcggtctaggcagcggaggcagccgcgaccccaggaaaccgaggaaatgaagacgcgaaggactacccgccttcagcagcagcactcagagcagcctccgctacagccgtctcctgttacgaccaggagagggctgcgggactctcattcctctgaagaggatgaagcatcttcccaaactgatttaagccaaacgatctcaaagaaaactgtcaggagcatacaagaggctccagtgagtgaagatcttgtaatcaggttacgtcgaccccctctaagatacccaagatatgaagccaccagtgtccaacagaaggtcaatttctctgaagaaggagaaactgaagaagatgatcaagacagctctcacagcagtgtcactactgttaaggccagatccagggattctgatgaatctggagataaaaccaccagatcatctagtcaatatatagaatcattttggcagtcatcacaaagtcaaaacttcacagctcatgataagcaacgttcagtgctaagctcaggatatcaaaaaactccccaggaatgggccccacaaactgcaagaataaggaccaggatgcaaaatgacagcattctgaaatcagagcttggaaaccagtcaccatcaacctccagccgacaagtgactggacaaccccaaaatgcatcttttgtcaagaggaaccggtggtggctacttcctctgatagctgctcttgcctctgggagttaatggttctttagtactcctgaggtagaaaccactgctgttcaagagttccagaaccagatgaatcaacttaagaataagtaccaaggtcaagatgagaagctgtggaaaaggagccaaacattcctggaaaaacatcttaatagctcccatcctcggtctcagcctgctatcttactgctcactgctgcccgagatgctgaagaagcacttaggtgtctgagtgaacaaattgctgatgcctattcttcttttcgtagtgtccgtgccatccggattgatgggacagataaagctactcaagacagtgatactgtcaaactagaggtagaccaagaactgagcaatggatttaagaatggccagaatgcagctgtggtacaccgctttgagtcatttcccgcaggctctactttgatcttctacaaatattgtgaccatgaaaacgcagccttccaaagatgtagccttagtcctgactgtcttattgggaggaagagacacttggaacaagtctaggcctaaggaagtcgaagaaaaagtaagagattttcttaaagtcaagttcaccaattctaacacaccaagtcctacaatcatatggaacca

SEQ ID NO: 355055 - DNA, 627 bp, Homo Sapiens
  misc_feature (20)..(20): n is a, c, g, or t
  misc_feature (40)..(40): n is a, c, g, or t
  misc_feature (56)..(56): n is a, c, g, or t
ggaacggtgtaagccgccantgaaagagaaccccccggantggtgaataggatttnccgaaataatttgtagaaattgaatccctatccccagaagaaccattatccattgaagataatcgatccccaagatgattaaaatagggtttctgatggatgttgaatggcgtggactcgctactccgttcttcacagctgccttccagaatgtgttcaaaagaaagacaagaaggagtgtatggcttataaagtgaatctaatacagtatttgttgcatttaaacaaactagacattttcttacggaaaaattatgaaatacagcatattttatgttctcccattgactcaatcatgacaatatttctgctttaacaccatctttcatgattagaaatgtttgttattggaaatgttacaccatgtaaataaaggaaatagattttagtattgtattcattttatattatagaactgcataatgtctgcagaataaaattaaaactaacaaatatgtcattagcagctgccctccgcatactttggaatctgacttgagataagcatgtgaaaatggttgagggccatagggaaccagatggtaaatacattcttcaaaattgtgtgagt

SEQ ID NO: 355056 - DNA, 1370 bp, Homo Sapiens
agcggaggtgactttgcgaaggcatggcggggacactgtgaatgtcagcccagaaggtgatcagagcctgttaattaaaatggaaagaagacagaagggaaggtagacatcaggttctccctggagacttttcgttttcatttacgctgcggaaactgacgtttttgcctaacaccccatgtaatgtaaacgtataggcttgagtacgtgtccggccgcatgtgtagtgaaccctaaagctttcctaattgtagttagcatcgtccctaagcggaacgattttccgtgaacatgatttgtacttttctacgagccgtacagtatacggagaagctgcacaggtcctcggcaaagcgattgcttttgccatacatcgtgcttaacaaagcgtgcttgaagactgagcccagtttgagatgtgggcttcaatatcaaaagaaaacgctgcgacctagatgtattcttggagtcacccagaaaaccatctggacgcagggaccgagcccccgaaaagcaaaggaggatggcagcaaacaagtgtctgtgcacaggagtcagagagggggaaccgccgtcccaacatcacaaaaagtgaaagaagccggaagagattttacctatttaatagtggtgctttttggaatcagcattacaggtggcttgttttacacgattttcaaagaacttttttcttcatccagtcctagcaagatatatgggagagccttagaaaaatgcagatcacatcctgaggtgatcggtgtcttatggtgagtctgttaaaggctatggggaggtgacaaggcggggtcgccggcagcatgtcaggttcactgaatatgtaaaagatgggctgaaacacacgcgtggtgaaattctacattgagggctctgagccagggaagcaaggaacggtgtatgcgcaagtgaaagagaacccaggaagtggtgaatatgattttcgatatatatttgtagaaattgaatcttatcctagaagaactattatcattgaagataatcgatcccaagatgattaaaataatcaagcaagcaggtttctgatggatgttgaatggcgtggactcgctactccgttcttcacagctgccttccagaatgtgttcaaaagaaagacaagaaggagtgtatggcttataaagtgaatctaatacagtatttgttgcatttaaacaaactagacattttcttacggaaaaattatgaaatacagcatattttatgttctcccattgactcaatcatgacaatatttctgctttaacaccatctttcatgattagaaatgtttgttattggaaatgttacaccatgtaaataaaggaaatagattttagtattgcgaaaaa

SEQ ID NO: 355057 - DNA, 527 bp, Homo Sapiens
catgctggaatcggggcccaaggcagcaggagcccagagtccacacccttaactatgcctatgttgcttctatgaggaagataaaagttggtgaagaacatattaggactctcacagcgaaataaccaatcgcagatagctctgctcccctgctcacacatcagacagtaagatacataatatttcttacattgcactatttgttttcattgtggagattgtaataaatactactgtttttagctgtttaaacaacagctcaggcgttttgctatatataaatgctgtccctaatgcaaaacttgactgacatttgaaaattttaccaaaacattgtaacttatcttttgaaggattagttattaccatctgtctatatccattttacaacacaagaaaggataaaaagatgccttataatttaataaggtatattacacttacactacaatattaacaaccagagtcactactgagacttaatgtgctacatcttcatacacattcccggattcgccgtcagcctg

SEQ ID NO: 355058 - DNA, 873 bp, Homo Sapiens
  misc_feature (863)..(863): n is a, c, g, or t
agcgggccccctccccgcctctctccaccgcctcctctggctccccggtcagagggccggagcgagaagatggcgaagacgtacgattatctcttcaagctcctgctgatcggcgactcgggggtaggcaagacctgcctcctgttccgcttctcagaggacgccttcaacaccaccttcatctccaccatcggaattgattttaaaattagaacgatagaactagatggaaagaaaattaagcttcagatatgggacacagcgggtcaggaaagattccgaacaatcacgacagcgtactacagaggagccatgggcattatgctggtctatgacatcacaaatgaaaaatcctttgacaatattaaaaattggatcagaaacattgaagagcatgcctcttccgatgtcgaaagaatgatcctgggtaacaaatgtgatatgaatgacaaaagacaagtgtcaaaagaaagaggggagaagctagcaattgactatgggattaaattcttggagacaagcgcaaaatccagtgcaaatgtagaagaggcattttttacacttgcacgagatataatgacaaaactcaacagaaaaatgaatgacagcaattcagcaggagcaggtggaccagtgaaaataacagaaaaccgatcaaagaagaccaggtttctttcgttgctcgctactttgatgaactctttctgagagactgcagcacacctagagggccctttcctgcttctcctgaagcacaagtcacccagcctcagaatcacacctcccggctgctgctgagagcaccactgaaccttgacctctcacacagtatgcccagtgggattcagccctcagggcctagncaaagaaccg

SEQ ID NO: 355059 - DNA, 997 bp, Homo Sapiens
gggacttccggggcggggctatctggccctttcctttccgcgtgtagaatgtggggcgcctgtaaagttaaggttcacgattccttggccaccatttccatcactctgagacggtacctgagattgggggcgaccatggcaaaaagcaagttcgagtacgtgagggacttcgaggctgacgacacctgcctggcacactgctgggtggtagtgcggctggacggccggaatttccatcggtttgctgagaagcacaactttgcaaaacccaatgacagccgtgctctccagctgatgaccaaatgtgcgcagactgtgatggaagaactagaggatattgtgatcgcgtatggacagagtgatgagtacagctttgtgttcaagcggaaaaccaattggtttaaaagaagagccagtaagttcatgactcacgtggcctcccagtttgcctccagctatgtgttttattggcgggattactttgaggaccagcccccttctgtatcccccaggctttgaccgaagagtcgtggtgtatcccagcaaccagactttaaaggactacctcagctggcgacaagcagattgtcacatcaataatctttataatacagctttctgggcacttatacaacaatctggactaacacccagtacaagcccaagggagattacaggggaactcttgcagcagacaaaaatgagattttgttttctgaattcaacatcaactataataatgagccgccgatgtataggaaagggactgtgttgatatggcagaaagtggatgaagtgatgacaaaagaaattaagctgccaacagaaatgggaaggaaaaaagatggcagtgaccccggacaaggacaaagccagtgcccttgcactgccatatcatcgggggatgcttttctggaagggaacatccaagaaattctagatgaagaccgctgaccctttttgcgctttcagttcctggtggggccttaacccatgc

SEQ ID NO: 355060 - DNA, 1322 bp, Homo Sapiens
cccacagctaacatggcggcgccctgtgtgtcctacggcggagcagtttcgtaccggcttcttctctggggtaggggtagcctcgcccggaagcaaggcctctggaaaaccgcggccctgagttgcaaacaaatgtcagatcccagatattaaggctaagacatactgcatttgtaataccaaagaaaaacgttcctacctcaaaacgtgaaacttacacagaggattttattaaaaagcagattgaagagttcaacataggaaagagacatttagccaacatgatgggagaagatccagaaactttcactcaagaagatattgacagagctatgcttaccttttcccaagtggtttgttgagaaacgagccaggccagtaatgaagcatcctgaacagatttttccaagacaaagaggatgtatatggaatgttactcaatttagaaaaacatcaaagtcactcgcaagccaaaagtctgctcccagaaaaaacggtaaccaggagacgttgattggcagcagatggctgattaaggaggaacctagaaagaaatgttagtggaaaaactgtcagatctagattatatgcagttcattcggctgctagaaaagttattgacatcgcagtgtggtgctgctgaggaagaatttgtgcagaggtttcgaagaagtgtaactcttgaatcaaaaaaacagctgattgaacctgtacagtatgatgagcaaggaatggcctttagcaaaagcgaaggtaaaagaaagactgcaaaagcagaagcaattgtttataaacatggaagtggaagaataaaagtaaatggaattgattaccagctttacttcccgatcacacaggacagagaacagctgatgttccctttccactttgttgaccggctgggaaagcacgacgtgacctgcacagtctcagggggcgggaggtcagcgcaggctggagcaatacgactggcaatggcaaaagccttgtgcagctttgtcaccgaggacgaggtcgagtggatgagacaagctggactacttactactgatccacgtgtgagggaacggaagaagccaggccaagagggagcccgcagaaagtttacgtggaagaaacgctaagggtttgctcccaggaaaggagaggaagagctatatatatgtgccggcatgtggcagacacacagtaaataatggctgaccagcatgagggcagtactgtcagaaatttctttgagctgtgagatggatttatttttaaatgctactttgtaaaggtgacctttaaaaaataaaaggaaaataaagaatgttagtttc

SEQ ID NO: 355061 - DNA, 935 bp, Homo Sapiens
  misc_feature (53)..(89): n is a, c, g, or t
  misc_feature (825)..(825): n is a, c, g, or t
taatgatacactcactatagggcgaactcggagctcatcgcggtggcggccgnnnnnnnnnnnnnnnnnnnnnnnnnnnnnnnnnnnnnatcaggccaaatcggccgagctcgaattcgtcgagagcggagctcccacagctaacatggcggcgccctgtgtgtcctacggcggagcagtttcgtaccggcttcttctctggggtaggggtagcctcgcccggaagcaaggcctctggaaaaccgcggcccctgagttgcaaacaaatgtcagatcccagatattaaggctaagacatactgcatttgtaataccaaagaaaaacgttcctacctcaaaacgtgaaacttacacagaggattttattaaaaagcagattgaagagttcaacataggaaagagacatttagccaacatgatgggagaagatccagaaactttcactcaagaagatattgacagagctattgcttaccttttcccaagtggtttgtttgagaaacgagccaggccagtaatgaagcatcctgaacagatttttccaagacaaagagcaatccagtggggagaagatggccgtccatttcactatctcttctatactggcaaacagtcatactattcattaatgcatgatgtatatggaatgttactcaatttagaaaaacatcaaagtcacttgcaagccaaaagtctgctcccagaaaaaactgtaaccagagacgtgattggcagcagatggctgattaaggaggaactagaagaaatgttagtggaaaaactgtcagatctagattatatgcagttcattcggctgcctagaanaagttattgacatcgcagtgtggtgctgctgaggaagaatttgtgcagaggttcgaagaagtgtactcttgaatcacaaaacagctgattgaacctgtacagcatgatgc

SEQ ID NO: 355062 - DNA, 331 bp, Homo Sapiens
acaaaagtagcattttaaaaataaatccatctcacagctcaaagaaatttctgacagtactgccctcatgctggtcagccattatttactgtgtgtctgccacatgtcggcacatatatatagctcttcctctcctttcctgggagcaaacccttagcgtttcttccacgtaaactttctgcgggctccctcttggcctggcttcttccgttccctcacacgtggatcagtagtaagtagtccagctgcagcataaaaagagaagcctttaggaaccattaatatgcatgctgcccagaagaaaagcaggttcataaatttataggtactg

SEQ ID NO: 355063 - DNA, 942 bp, Homo Sapiens
  misc_feature (687)..(687): n is a, c, g, or t
ctcacagccgatttctagcgtccgtgccggggacaggtgtccagaggtcgactgctgcagacatggcggcctccaccgcggccgggaagcagcggattcccaaagtggccaaggtgaaaaacaaagccccggctgaggtacagataactgctgaacaactcttaagagaggctaaagaaagagaacttgagcttcttccacctccacctcaacagaagatcacagatgaagaagaattaaatgattataaactaaggaaaaggaagacttttgaagataatataagaaaaaacaggactgtgattagtaactggataaaatacgcacaatgggaagaaagcctaaaggagattcaaagggctcgatccatatacgagcgtgctttagatgtacactaccgaaatattacactctggctgaaatacgcagaaatggaaatgaagaatcgccaagtcaaccatgctcgaaatatctgggaccgggccataacaacgctgcctcgagttaatcagttctggtacaagtacacgtacatggaggaaatgttgggaaacgttgccggtgcccggcaggtgtttgagcgctggatggagtggcaacctgaggagcaagcctagcactcctacatcaactttgagctgagatacaaagaggtggatcgggcccgcaccatttatgagccgattngtctcgtgcaccttgatgtaagactgcatcaagatgcccgcttgaagaaaacatgcttatttgccatgccacgaaagtgttgacagactgtgaaatcttttgagatgacatatgatgagcacttatggtgctttgcaagttgagacatcccaagatttgacgggccactgataccagttgctggcaatattaaaacgaagccaagactcttaaattatctattttgaaaatgtgaagggggtttaacattatgga

SEQ ID NO: 355064 - DNA, 2080 bp, Homo Sapiens
agcggagtcagtcctgcaagttccgcttccggttccgagatcctgtttgttttctgaaagctttgtggtttcggtgagctctcagagccgatttctagcgtccgtgccggggacaggtgtccagaggtcgactgctgcagacatggcggcctccaccgcggccgggaagcagcggattcccaaagtggccaaggtgaaaaacaaagccccggctgaggtacagataactgctgaacaactcttaagagaggctaaagaaagagaacttgagcttcttccacctccacctcaacagaagatcacagatgaagaagaattaaatgattataaactaaggaaaaggaagacttttgaagataatataagaaaaaacaggactgtgattagtaactggataaaatacgcacaatgggaagaaagcctaaaggagattcaaagggctcgatccatatacgagcgtgctttagatgtagactaccgaaatattacactctggctgaaatacgcagaaatggaaatgaagaatcgccaagtcaaccatgctcgaaatatctgggaccgggccataacaacgctgcctcgagttaatcagttctggtacaagtacacgtacatggaggaaatgttgggaaacgttgccggtgcccggcaggtgtttgagcgctggatggagtggcagcctgaggagcaagcctggcactcctacatcaactttgagctgagatacaaagaggtggatcgggcccgcaccatttatgagcgatttgtcctcgtgcaccctgatgttaagaactggatcaagtatgcccgctttgaagaaaaacatgcttattttgcccatgcacggaaagtgtatgagagacctgtggaattctttggagatgaacatatggatgagcacctttatgttgcctttgccaagtttgaagaaaatcagaaaaagtttgaaagggtacaagtgatttacaagtatgcccttggacagaatttcaaaacaagatgcccaagaactctttaaaaattataccatctttgagaagaagtttggtgataggcggggtattgaagatatcattgtgagcaaacggagattccagtacgaagaagaagtgaaggcgaatccacacaattatgatgcatggtttggattacttgcgcttggtatgaaagtgacgcagaagctgaagccgtgagagacgtctatgaaagggccattgccaatgtcccacccattcaggagaagaggcactggaagcgctacatttatctttggatcaactatgcactctatgaagaattggaggcaaaggatcctgagaggacaagacaggtgtatcaagcctctttggaactaattcctcacaaaaagttcacatttgccaaaatgtggatactgtatgcacagtttgaaatacgacagaagaatctgtcattagccagaagagcattgggaacttccataggcaaatgtccaaagaacaaattatttaaagtttacatagaattggagctacagcttcgagaatttgacagatgccggaagcttttatgaaaagttcctggaatttggacctgaaaattgtacctcatggattaaattcgctgaattagagacaatccttggtgatattgacagagcacgggcaatctatgaattagccatcagtcagccacgtttagacatgccagaggtgctttggaaatcatatattgattttgaaattgagcaggaagaaacagaaagaacacgaaacctttaccggcggttgcttcaacggacgcagcatgtcaagggatggatcagctttgctccagtttgagttgtcttcacgaaaagaaggaagtttgactaaatgcaaacaaatttatgaagaagctaacaaaaccatgccaaactgtgaaagaaaagggaagagaggacttatgctgccgggaatctttggcgaagtttttgaagaaggaatttgggaacagctttcagataagggagagagtagaccaaactctcgggccggagaaaaggccaggaagaggaggaaggggcccaaattggagaagggggcctgaatgcaggcctggg

SEQ ID NO: 355065 - DNA, 1530 bp, Homo Sapiens
  misc_feature (1003)..(1003): n is a, c, g, or t
  misc_feature (1365)..(1365): n is a, c, g, or t
ccggaattctccggatcgcagcggagccagagccggttacggctgtggccgctgcctctacccccgccacggatcgccgggtagtaggactgcgcggctccaggctgagggtcggtccggaggcgggtgggcgcgggtctcacccggattgtccgggtggcaccgttcccggccccaccgggcgccgcgagggatcatgtctacagcctctgccgcctcctcctcctcctcgtcttcggccggtgagatgatcgaagccccttcccaggtcctcaactttgaagagatcgactacaaggagatcgaggtggaagaggttgttggaagaggagcctttggagttgtttgcaaagctaagtggagagcaaaagatgttgctattaaacaaatagaaagtgaatctgagaggaaagcgtttattgtagagcttcggcagttatcccgtgtgaaccatcctaatattgtaaagctttatggagcctgcttgaatccagtgtgtcttgtgatggaatatgctgaagggggctctttatataatgtgctgcatggtgctgaaccattgccatattatactgctgcccacgcaatgagttggtgtttacagtgttcccaaggagtggcttatcttcacagcatgcaaccccaaagcgctaattcacaggggacctgaaaccaccaaacttactgctggttgcaggggggacagttctaaaaatttgtgattttggtacagcctgtgacattcagacacacatgaccaataaacaaggggagtgctgcttggatgggcacctggaagtttttgaaggtagtaattacagtgaaaaatgtgacgtcttcagctggggtattattctttgggaagtgataacgcgtcggaaaaccctttgatgagatgggtggccccagctttccgaatcatgtgggctggtcataatggtactcgaccaccactgtataaaaaatttacctaagcccattgaaaagcctgatgactccttgnttgggctaaagatcctttcccagcgcccttcaatggagggaaatggtgaaaataatgactcacttgatgcggtactttccaggagcagatgagccattacagtatccttgtcagtattcagatgaaggacagagcaactctgccaccagtacaggctcattcatggacattgcttctacaaatacgagtaacaaaagtgacactaatatggagcaagttcctgccacaaatgatactattaagcgcttagaatcaaaattgttgagtgggagcagtgtggagagcttgcccccaacctctgagggcaagaggatgagtgctgacatgtctgaaatagaagctaggatcgccgcaaccacagnctattccaagcctaaacggggccaccgtaaacttgtttatttggcaacattctggatgtccctgagatcgtatatcaggcaccggacagccaagacctagatccatcccagacctgactgtacctggaacagaacctggccaggtgagccagaggtaatcagtcc

SEQ ID NO: 355066 - DNA, 822 bp, Homo Sapiens
gccagagccggacacggctgtgtgccgctgcctctacccccgccactgatcgccgggtagtaggactgcgcggctccaggctgagggtcggtccggaggcgggtgggcgcgggtctcacccggattgtccgggtggcaccgttcccggccccaccgggcgccgcgagggatcatgtctacagcctctgccgcctcctcctcctcctcgtcttcggccggtgagatgatcgaagccccttcccaggtcctcaactttgaagagatcgactacaaggagatcgaggtggaagaggttgttggaagaggagcctttggagttgtttgcaaagctaagtggagagcaaaagatgttgctattaaacaaatagaaagtgaatctgagaggaaagcgtttattgtagagcttcggcagttatcccgtgtgaaccatcctaatattgtaaagctttatggagcctgcttgaatccagtgtgtcttgtgatggaatatgctgaagggggctctttatataatgtttgtgcctttctttcgcagtgctgcatggtgctgaaccattgccatattatactgctgcccacgcaatgagttggtgtttacagtgttccccaaggagtggcttatcttcacagcatgcaacccaaagcgctaaattcacagggacctgaaaccaccaaacttactgctggttgcaggggggcacagttctaaaaattcgtgattttgggtacagcctgtgacattcagacacacattgaccaatacaaggggagtgctgcttggattggcccctgaagttttcgacaggtaatattaccgtgaaa

SEQ ID NO: 355067 - DNA, 492 bp, Homo Sapiens
  misc_feature (287)..(287): n is a, c, g, or t
  misc_feature (323)..(323): n is a, c, g, or t
  misc_feature (362)..(362): n is a, c, g, or t
  misc_feature (445)..(445): n is a, c, g, or t
  misc_feature (461)..(461): n is a, c, g, or t
  misc_feature (472)..(472): n is a, c, g, or t
ccagtacaggctcattcatggacattgcttctacaaatacgagtaacaaaagtgacactaatatggagcaagttcctgccacaaatgatactattaagcgcttagaatcaaaattgttgaaaaatcaggcaaagcaacagagtgaatctggacgtttaagcttgggagcctcccgtgggagcagtgtggagagcttgcccccaacctctgagggcaagaggatgagtgctgacatgtctgaaatagaagctaggatcgccgcaaccacaggcaacggacagccaagnacgtaggatccatccaagacttggacttgttaactnggaacagaaacctgggtcaggttgaggcagttagggtcntcccagttccccagttgttcaggattgatttacttaccttcagggacccaaccttcaggaaaaaggccaacttcgaagttccntcccttggggaccccntgattgatttnccacaggttaccccttgggg

SEQ ID NO: 355068 - DNA, 947 bp, Homo Sapiens
  misc_feature (720)..(720): n is a, c, g, or t
  misc_feature (737)..(737): n is a, c, g, or t
  misc_feature (814)..(814): n is a, c, g, or t
  misc_feature (854)..(854): n is a, c, g, or t
  misc_feature (917)..(917): n is a, c, g, or t
ctattcataaagaaactgtactttgagcaatgtaggtatcccaggcagcatcagagggaatgcccagggaattcttccatggatataagacatcatcaacaataccttctcttagttctaatgagacagcctctcaggtccggtcagttctagaacgctttgggcaggcacaaatggaagattccttccctcgttaggagtaccctcaccctaaccccagcaaagcatgtctagggtctcacaataatagcaggtctcagaaagataaaataattctgaatgttacaactcgtcccatttaaggctagacataaatctatcacagatcctttggaacatcgatggcaagaattctggaacacgaaggaggtatgaaaagggcttcactcgtttcatggaaaagctcagaacagtttgtcgacttggaaacacaggccctgagagcgtaccaaggtcaccctgcccttcaatcctgctgatagcccaagttaacatcctcccatgccttggccttcccagaacaaacatggctttggacgcctttgggtggttgggactggctgcctatttttctctaaaacttaagttttaggaaagaattctttccagctttccatcctgaacctgctggtctccaggctcgttcctgcaaatatttcacagaggagtaagagccacattcgtgctggctttcccaattcattctcctctcttcgagtnccacctcttaaaacttncttagtgactcttgcaagaaactcatgtcttttgtcagggagaatggcatggcctttgtatgacacttccttctagnccagactcgaatttgggggcatcatatttgggatggctgncaccgtaaacaggaaaggccacaggacagctcacaggttctctctgaacagaagcctgtgagnacgtgcctgtcatttaaaagctgcatgcac

SEQ ID NO: 355069 - DNA, 846 bp, Homo Sapiens
ggtgggtggcggtggaagttaagggagtcagggctatcgctcctcgagactcgcagtcgcggccactgcagtcacttcgccagttagcccttagggtaggagtcgcgccggcagcagccatgagcggcggcgtgtacgggggagatgaagttggagcccttgtttttgacattggatcctatactgtgagagctggttatgctggtgaggactgccccaaggtggattttcctacagctattggtatggtggtagaaagagatgacggaagcacattaatggaaatagatggcgataaaggcaaacaaggcggtcccacctactacatagatactaatgctctgcgtgttccgagggagaatatggaggccatttcacctctaaaaaatgggatggttgaagactgggatagtttccaagctattttggatcatacctacaaaatgcatgtcaaatcagaagccagtctccatcctgttctcatgtcagaggcaccgtggaatactagagcaaagagagagaaactgacagagttaatgtttgaacactacaacatccctgccttcttcctttgcaaaactgcagttttgacagcatttgctaatggtcgttctactgggctgattttggacagtggagccactcataccactgcaattccagtccacgatggctatgtccttcaacaaggcattgtgaaatcccctcttgctgggagactttattactatgcagtgcagagaactcttccaagaaatgaatattgaatttggttcctccatatatgatggcatcaaaagaagctgtcgtgaaggatctccagcaaactgggaacagaacagagaa

SEQ ID NO: 355070 - DNA, 1105 bp, Homo Sapiens
tttgaggccaaatgtaccccattccccaagttgtggtggagacacacatggtggagctccctaccattggtgtttcctgataaaccccttttccatgggaaagggtccagaaatccctttggaatatctttaaccggctttcgcgccaaaatccacaattgtagcccatggggaaatttataaaggaccaggtggccatctggacacccatttgttcatcataaagtggatatcggacacctgaaagtccggaagctttgaaactcctgggataccccaagttccccatatattggggcccaagaccctggtaacctgagggcaactcctcttttcttttccagtttgctggagatccttcacgaacagcttctttcgatgcaatcatatatggaggaaccaattcaatattcatttcttggaagagttctctgcactgcatagtaataaagtctccagcaagaggggatttcacaatgccttgttgaaggacatagccatcgtggactggaattgcagtggtatgagtggctccactgtccaaaatcagcccagtagaacgaccattagcaaatgctgtcaaaactgcagttttgcaaaggaagaaggcagggatgttgtagtgttcaaacattaactctgtcagtttctctctctttgctctagtattccacggtgcctctgacatgagaacaggatggagactggcttctgatttgacatgcattttgtaggtatgatccaaaatagcttggaaactatcccagtcttcaaccatcccattttttagaggtgaaatggcctccatattctccctcggaacacgcagagcattagtatctatgtagtaggtgggaccgccttgtttgcctttatcgccatctatttccattaatgtgcttccgtcatctctttctaccaccataccaatagctgtaggaaaatccaccttggggcagtcctcaccagcataaccagctctcacagtataggatccaatgtcaaaaacaagggctccaacttcatctcaggcaacaaagcggcgtccacacaccccggagctcagccacacttgctggctcctcctatcagccaatcactaggg

SEQ ID NO: 355071 - DNA, 1364 bp, Homo Sapiens
  misc_feature (799)..(808): n is a, c, g, or t
  misc_feature (810)..(812): n is a, c, g, or t
  misc_feature (1300)..(1300): n is a, c, g, or t
aggcggtacggtccggaattcccgggatatcgtcgacccacgcgttccgagtgactgtggcaggcgttcagtcagcattcacaatgtatccaacatcagagaattcacagctggagagaaaccctacatgtgcaagagtgtgagaaatccttcagtgcatgcttatcccttatccaacacaagagaattcacactggagagaaaccctatgtatgtgccaaatgtggaaaatccttctgacaaagctctcaccttattcaacatcagagaattcacagtggggagcaacctcatacgtgtaatcgatgtgaaaaaaccttcagttagagaataactcttagtagtcatgagaaaatccatacaattcacattagagagcaagtctatgaactgtagtaagtgtgaggaactctagcgcacagtcatctttcattcaacgagtgtacatgtacagcagttgggagagtaactgatgagtctataaattcttcacagttatacattatatgagagtcatactcgtgagaaatgagtcactttatggttttccttttggagattcagctcttaagggatttcactctcccagtgagctgctaactaaaggcaggctgctgaagtatatagcagcaatcccacaatagcacaccttgcttcagattcagaggatgagcccccttcttgagccctgtagatatgtgaaacttaattatttagatgcatttcatggcaccagaccctaaggtacagttaggtatttcactggagaccacttactttgcttagctttgctgtgtannnnnnnnnncnnngcaagatttatttcaacttcaaagaaagtagttgagatccttgcacttccaagtgtgatggaaccaggctagggttttctttgtttgtttgggcctcttcaaaacgtttttattctgttataaggaatatgataccttaagcttcaattcacagggaagagaaacatgattataagcaaaagtttgtcaaggaataaggtgagtctttgtgtagattaaaatagttgagaccttgctaaaaagtcagataacactgtaatccacctccaggtttccaagagttaagacgctgccagcaaggagcttgcagtcttgtagctggcccaatatatccaactaattcaaaatgggaaattgtacattttacttaaacaggatttggtagatgggtcttctagatatggtgtcatgaagaaaaatcaggtagctatggtacacttgaagaacagagttcatggcttttcctgagtgctggaaaccttaatctnctgaagttaagtcaaacttaaatgcaattcaccaattcttttgcttgaggctgatccaggattt

SEQ ID NO: 355072 - DNA, 1247 bp, Homo Sapiens
  misc_feature (729)..(730): n is a, c, g, or t
  misc_feature (736)..(736): n is a, c, g, or t
  misc_feature (784)..(796): n is a, c, g, or t
  misc_feature (959)..(967): n is a, c, g, or t
atattgatttcatactctgaatataaaactggataataggggaatgttttaaaatttattatgctattattcagaatgccaaagtattattttttttcccaaaatcagtctggacatttactaccttttagactttttgacgttgaactttctgtataaaaattggctgggttttgagcttttggtaagaaataaaagccgattaagcactggccgccccgcggctggtacccaatgcccgagtcactgtggcagcattcgcactggtgtggggagtcctttcaactcaaggaggctgggtttctgggcaccctcgaagttttctggatgtctttttatctttctcgtgtgaactgcactacaaaagagaccagcccgcttcccaagccagccagacacctgggtcttgagccataaactggcgtagttaagctttgcagcttccagtgtattttatttattcttttgttgggtttttgtttgtttcttcttgtaaaattgtacagaaactttttaaaagaaattggattcgaaactggatgtgtattcgtaacctcataatttttatttgtgtattgtttcttttattatttcagttaaatttttacattattttgcatgtatatttctttgtacagagaccttacatgtttacacagtatgatgtgatgtaaatattttattttgccatcagttattttaaaaaattaaacatatttgcctgaaaanntaatcncacaccaagccccacacaccaaaaaccgagaccaaaacaaacacctgnnnnnnnnnnnnngtggcgggaagaactcctgcccatcaaaaaagcctttttcacacccattgcccttggaatggcgggggcgccccagggggaaaaaggggacaattggccaaaaaagatgcttgtcccaaaggaaaaatgcggggggcgggtaccctaaagggcattcggaatnnnnnnnnngcaataaaaaaagaacgccccgggggaaaaaccaatactcgttttagtgaaacccctccccagacctggaagttgcccatgacccccattcacgggagaatcccaaccgaccgggtaattccccaagaaagacaccctcttatcaaaaataccccccctacgccaccggcccatgtaatatacgccgaaaaagtggggtcgcacgccccaaaagtgagttatcgggcgcaaccatgaggaacacattccccacccgcgggttggtcatgaaaccttttct

SEQ ID NO: 355073 - DNA, 938 bp, Homo Sapiens
  misc_feature (18)..(18): n is a, c, g, or t
  misc_feature (64)..(64): n is a, c, g, or t
  misc_feature (76)..(76): n is a, c, g, or t
  misc_feature (155)..(155): n is a, c, g, or t
  misc_feature (240)..(240): n is a, c, g, or t
cccctgatttgtagtctntgtcaccatcttccccagtgcccaaatttcagaatagtctgattancatcttgtctgnagatatggtcaatttaataagattttttatgatacagagtgtgcagatcatctaattttgaagcaccgtcatctagcgnagtttcacttgcagtgcccaggtctccattttcatgtgtgtcagttactgccttcttattaaatccttgtaatactttgatttcnccacttgtgtctttgcaactagcaccagggttaccacctccttctaactcatcaaggtacaaacggtaacgatgtccactctcatcttcatactctacgttttcatcatcagaatccacttcaggagccacataaactacttcaaattcaatctctcctctctgctgagaaagaatagttacagcttctttatgctttgtgtcccttaggttaactccgttgactgccaaaatagcatccccaacgtgcagccctccgcatctatcagcaggttgccccggatggatctcagagatgaggattggaacaccatgttctttcccacctgtaattgaaatgccaaggccttcatgatcttccttaaggaggagaacttttctaattggaccaacaccttggcttttctttagggaatcttgatcatggcctggtggtgcttgcattggtcgtttcaagtcattacgtcctctgcaggctcggatcacagttttgtgacgatgcaaatgtatttcagcttctaattggttccaaagcttatcatgagcaggtcccttcatatctcgtcctagcaattgtatctgttggacccttcctgccagttccttatccaagtacttggcagctagtctcgccccatagacttcagcctggagaacagctatagtctacgaagggcttcatttcctttttccaacaat

SEQ ID NO: 355074 - DNA, 1454 bp, Homo Sapiens
tccggtcctagggtcacacccaccgcaggtctggcttggtacagttgggtgcatgcagaagtaggtggagctgctgttgcagccttgagagagttttattgtaaaactcttgtaatttatagtaatcggaggggaaaacacctcttccttttaattgctctgaggaccgctgccaaagaaacgcagtagatccgctccctcttgggggcggggagaaagaacgggttgtgtccgccatgttggtgaagtcaagcgaaggcgactagagctccaggagggccagttctgtgggctctagtcggccatattaataaagagaaagggaaggctgaccgtccttcgcctccgcccccacatacacaccccttcttcccactccgctctcacgactaagctctcacgattaaggcacgcctgcctcgattgtccagcctctgccagaagaaagcttagcagccagcgcctcagtagagacctaagggcgctgaatgagtgggaaagggaaatgccgaccaattgcgctgcggcgggctgtgccactacctacaacaagcacattaacatcagcttccacaggtttcctttggatcctaaaagaagaaaagaatgggttcgcctggttaggcgcaaaaattttgtgccaggaaaacacacttttctttgttcaaagcactttgaagcctcctgttttgacctaacaggacaaactcgacgacttaaaatggatgctgttccaaccatttttgatttttgtacccatataaagtctatgaaactcaagtcaaggaatcttttgaagaaaaacaacagttgttctccagctggaccatctaatttaaaatcaaacattaagtagtcagcaagtactacttgaacacagctatgcctttaggaatcctatggaggcaaaaaagaggatcattaaactggaaaaagaaatagcaagcttaagaagaaaacatgaaaacttgcctacaaaaggaacgcagagcaactcgaagatgggatcaaagccacgtgtttggtaaagaatttagaagccaatatagtgtatttacctaaaggtacattcagaacacatggttaccaactggccttaagcagtcttcctgtggggaagattttaagatccttgaacaagatcacacaagataaaacactgctaagtctaaatctaaaacagaccaagagtaccttcatttaaatttagcttgcacagagcttgatgcctatccttcattcttttcagaagtaaagataattatggcacttatgccaaaattcattatttaataaagttttacttgaagtaacattactgaatttgtgaagacttgattacaaaagaataaaaaacttcatatggaaattttatttgaaaatgagtggaagtgccttacattagaattacggacttaaaaattttgctaataaattgtgtgtttgaaaggtgg

SEQ ID NO: 355075 - DNA, 1348 bp, Homo Sapiens
ggcctgggtggcgaattcggcacgagggcgcgattcgcggcagcgccccgatggaacctcctggtcctgtgagggggcccttgcaagattccagctaggtataagccttctagcagagtctagtgcagactaggataggctgtatcactaacagcagctgaaactctggcccttcaggctacacagggacaagagaagatgatgatgatgggaccaaaggaagaggaacagtcttgtgagtatgagaccaggctacctgggaaccactctaccagtcaagagatcttccgccaacgcttcaggcatctccgctaaccaggagactcctggtccccgggaggccttgagccaactacgagtactctgctgtgagtggctagaggccagagaaacacacgaaggagcagatcctggagttcctggtgctggaacaattcttgaccatcctgcctgaggagctccaatcctgggtgcggggacatcaccctaagagtggagaggaggctgtgactgtgctggaggatttagagaaaggacttgaaccagagccgcaggtgggaagggggatttggtctgttatgggagccagattgatgaccttcaggctggaccgaggggcagctgtagggggaggtgccaagttcaaacctctcttgggccaggtagagcagttagtatgtgtttctgtgtctgtcttttctgccctcgagccctgaatgagaaagagactctagctcctcttcttcccttgtgctgactctgaggaggctctctaaagtctccttgggaagctttgggccaaggagggtcacatctgcaagtgtcccaggcaggggacaaaaaccacactagtaatttgaagaaaatttaaactgagtggtgcctgatcacctccaggtcccaggccctgcacatggacctgcacaggaagagccatgggagaagaaggaatctctgggagcagcccaggaagcactgagcatccagctccagcctaaggagacccagcctttcccaaagagtgccttactattcttatctcttagaacaggtatatttacattttctgtcagttgttacagaagatggcccagagcccaaggacaaaggatcattgccacaaccacccattactgaagtggaatcacaggtgttctcagaaaaacttgctactgacacctctacatttgaagctacctctgagggtaccttagaactgcagcagagaaatcccaaagcggagagactgaggtggtcccctgcccaggaggaaagtttcaggcagatggttgtcatccataaggaaattcccacagggaagaaagaccatgaatgtagtgaatgtggt

SEQ ID NO: 355076 - DNA, 529 bp, Homo Sapiens
ggagaaattaggggaaaaaaagcagataaatgggagaaattaaaaagaagaaaccctctcctctgtatagtcccatcaccaagagataactgttggcaatatccagtaaatattcttcgaatgtttgtcatatatatagttgtttttaagcatttgttttcattccagaaatatacattttaatctaagtgtcatttcttcatacatccagaacaggtatatttacattttctgtcagttgttacagaagatggcccagagcccaaggacaaaggatcattgccacaaccacccattactgaagtgggaatcacaggtgttctcaggaaaaacttggctactggacacctctacatttgaagctacctctgagggtaccttagaactgcagcagagaaatcccaaagcggagagactgaggtggtcccctgcccaggaggaaagtttcaggcagatggttgtcatccataaggaaattcccacagggaagaaagaccatgaatgtagtgaatgtggtaaaaccttcatt

SEQ ID NO: 355077 - DNA, 480 bp, Homo Sapiens
cagcctcagttgggactttaatgccatcttcattctttcctagtccctttttagggagctatcccattttagtcatgattttttgattcctggggctgtatagggaggctgggatagtaatctctgcatgccattgtcgtaacaagtctcggccccataaattgattggaatagaagtgatcacaggctgaaccgtactatcttgattatcagatcctagacaatgtaaaatcatggcactttgatacacttctgaggcagtacctatgccaatgacagaaacatcagcctgggtatccactaaaccttcaaactctttccctgaatagtgactgtacacacgggtctatcctctgagacctgattagcccaataagcagcttttcctgcagggttggtacttccaaaccctcctgttctttcctttttgttttccccaattttaacataaggcaaaagcagtaattgagcaattctatc

SEQ ID NO: 355078 - DNA, 1120 bp, Homo Sapiens
  misc_feature (23)..(23): n is a, c, g, or t
  misc_feature (582)..(606): n is a, c, g, or t
gtcgcccaggctagaattcagtnggcaggatcatagctcactgcagcctcgaactcctaggctcaagcaatcctcctgcccctgcctcctgggtagctggaactgtagatgcaagccaccaagcccagctctaatcacactttgaatagctatgaattaacaataaacacaaattcaaaaggaaatagaaaagcaaacattatctttatttaataatctttgatatttaaaatacaactcattgaacatccacactaacaacagaatcctgtgttcaacagtgctttggaagcccggcttttctaacgaccagacaggaaggcctgtgtgtgtaataacagcaaatgaactttaacgagggagcacacacagaagggctgcagggctggggtcctgagcaagcggcactgccacagtgcacttgtatcatggccaaacaacaatgctttttgtttcagatattttctgtacttgaatttcaaatatttatacagaacagtaatttttaaaaagttattcctaatagcccagtgttgtaaaaattagataatcacatttaaaaatgtatgttttcctctttcnnnnnnnnnnnnnnnnnnnnnnnnnttcagaaaacattccttgaactatgcaagagacaattgagagcttcctaaatgcatcaggaatatccatttatattttactaatgtttctcattgctttgtctatgaatccacaggcttaaaatgttttttgatatgctattaaacatgccaattacgacaaatttagaagttacgttattagcactaattcttaaaatgccagaccacttggaaaaaataataatagcaaagattttcttcaaattaaaaaacaaaatcaaaattctagaatttaccaacgatgtcaataatcttcactcatgaaagcaaattagaacaaaaatatttttattatgtttaagactaaaaaaatacaaagccaggtcattttttaaagcaaaaagatgctggttataaaggggccagaaataaaagaaagtttttattttgaatatgaaaaataaagttatttacattgccgacatgattagttgatccaatctggtagttcttaattagggtcacatatatat

SEQ ID NO: 355079 - DNA, 740 bp, Homo Sapiens
  misc_feature (224)..(232): n is a, c, g, or t
  misc_feature (255)..(307): n is a, c, g, or t
tgcagcagtgcgaggacaaaagatcatggagtggtcaaaatattcagatgagacatttggcatgtcttcctttattcactgatattttctacccatggtcttatatcaccgtatgaaatggaaacttacaggacttaaatatcagtgaaatattttgagatctttgaataattcctttagaggaattatacaaaattaatatatatgagtcctttgtaatttannnnnnnnngagacaggatctcacttttaccnnnnnnnnnnnnnnnnnnnnnnnnnnnnnnnnnnnnnnnnnnnnnnnnnnnnntgagttcaagcaatccttctgtctcagtctcctcagtagctggggctttaggtgggcactgccacaccgtactaatttttgtattttttgtagagacgaggtcccaccatgttgcccaggctggtgtcaaactcctgggctcagtcagtccccccatctcaccctccccaagtgctggaattacaggcgtgagctactgtgcccagccttacggacatccttttgaattatctttttcactcatagaatatgaatacatttatttagactttttctagaactttcctgttttcatgtctttgcttcatctggaattggcttaacacccttttataaagttttgtgtttgtaaaatttccattgtgacatcaatacgcaatatatttttgtaatataggagtttctatttttttattaaaatggcaatgaaagc

SEQ ID NO: 355080 - DNA, 949 bp, Homo Sapiens
  misc_feature (647)..(674): n is a, c, g, or t
gctggtacggtccggaattagggatgcagaagttatgggatagcagataagatagagttcatctgtggagatttcttgctgctggcttcttttttaaaggctgatgttgtgttcctcagcccaccttggggagggccagactatgccactgcagagacctttgacattagaacaatgatgtctcctgatggctttgaaattttcagactttctaagaagatcactaataatattgtttattttcttccaagaaatgctgatattgaccaggtggcatccttagctgggcctggagggcaagtggaaatagaacagaactccttaacaacaaattgaagacaatcactgcatattttggtgacctaattcgaagaccagcctctgaaacctaactatgcagcagtgcgaggacaaaagatcatggagtggtcaaaatattcagatgagacatttggcatgtcttcctttattcactgatattttctacccatggtcttatatcaccgtatgaaatggaaacttacaggacttaaatatcagtgaaatatttgagatctttgaataattcctttagaggaattatacaaaattaatatatatgagtcctttgtaattcatttttttgagacaggatctcacttttaccnnnnnnnnnnnnnnnnnnnnnnnnnnnnacagtcactgaggttcagccttctgagttcaagcaatccttctgttctcagtctcctcagtagctggggctttaggtggggcactggcacaccgtactaattttgtattttttgagagacgaggtcccaccaatgttgccaggctggtgtcaaactcctgggctcagtccagtccccccatctcaaccttccccaagtgtggaattacggcgtgagctactgtgccagcttaggaatcctttgaattttcttttcactcataggaatatgagtcg

SEQ ID NO: 355081 - DNA, 479 bp, Homo Sapiens
  misc_feature (51)..(51): n is a, c, g, or t
ccctaatcaactaacaatctgaaccccaagttctgaaacctccaacctgangccctcaatgttgggaacccctctggttcccgaatcaattcccagagccttggcccagaaccctcattatcaagatcctctctccgattccgtgatctgattcggcacttggagaagctgggcgagagtcgttctcagaaactcctgagtggcttctccctgactgcacagattcattgtcagactgctcagaaccggagggccttctctttctggatggctggtcactgtctgagtcctgatctgaccgctgtcttcgtggcctccggggactgccggcctcgctgccagacttgttctggttctcatcggaatcactctctgatgaggcacatttctttcgttgttcgtcctcgtctgagtcactgttgctgttgctgttcctgggatgtccttcatcagcaattttaagtttatcctcatccgaa

SEQ ID NO: 355082 - DNA, 1220 bp, Homo Sapiens
  misc_feature (650)..(809): n is a, c, g, or t
  misc_feature (823)..(929): n is a, c, g, or t
  misc_feature (1112)..(1112): n is a, c, g, or t
gagacagagtcttgaggaaatacatttctaagaaggatttttacagacactcatctttcatacccaaccacagggtctaactctaaagaggataaaaccaattactttcgtcccaagagctcatgactaatgacagcgtaaatctatgctatcaaaacctgcgtctctcatctgttacgagtattcaggcaggattcaaatattctcaaagaaagaaacacagtgcatgctgtgatcgcctgctcagcaacaacaagcactgcatcccaaactatctcctcccaggaattaaatgaggccagttgtgtacactggcatttcctccactgtggtactgcagaaggtctcagtgtcacaaagaatccttttgtcttctttaatatttatggtcacagctgtcttcccaagttgaccccgactgccagttcaacaagtcagtagcagtcaaaatatggtttgtcctttatctgaattccctcctgataatgttttcttccttctgtcgctaccctctttcaaaattattgtaaaacactgattctttcaagggccaattcttccttcttcaccagaatttgaaatagatctgtcatgaacttcttggtaacttccaacatattaatattgaggcagaaagcaacacaatcttnnnnnnnnnnnnnnnnnnnnnnnnnnnnnnnnnnnnnnnnnnnnnnnnnnnnnnnnnnnnnnnnnnnnnnnnnnnnnnnnnnnnnnnnnnnnnnnnnnnnnnnnnnnnnnnnnnnnnnnnnnnnnnnnnnnnnnnnnnnnnnnnnnnnnnnnnnnnnnnncatggtggcacatnnnnnnnnnnnnnnnnnnnnnnnnnnnnnnnnnnnnnnnnnnnnnnnnnnnnnnnnnnnnnnnnnnnnnnnnnnnnnnnnnnnnnnnnnnnnnnnnnnnnnnnnnnntgatgaagtgagactcgtgtgggggcgggggaagacagaggcctggctgcagaaggacgccctctggaagggggactggaagccgaatcccctgacaagcggtcgcggtcctgtctttccgctcgagcttcgttctcccttcaccacccactccgcgcccccacgcaccgaaccaccgcggcnttatgcctcgtcaccttggcaacagcagcgggctcaggcagtgtcgccaccagtttcttgcacccgccagcagcactgacgctgcagaggttgccgccatgtcccatc

SEQ ID NO: 355083 - DNA, 933 bp, Homo Sapiens
agcgggcgtgaccaagagccgcctagagcacaagtcctgctagtcgcctccgtctgggtaccagccccctattactctgcaggcgtgtgaagaaagaaggaaactagctcggaccgtgcaggtttgtaggtctgttggcctgtaggtttcggcacaagtttcagcgagagaaggagaaaactgccttggttggaaccttgcagattcatcacaagagagctacaagagcctggaagaagctgaagactgctaccctccatccttactcaccctggacctgagagacctcttcaatcagaaatggaaacagagagattctcctggaaacccctgccccataaacggccctctcgaacacaatgggacggaatccacccacaacgcgcttggtttgcagatgtcaaagaatctgcagagggtgctactgaagatccagccttagccaatcaccacctcattgggtgaaagttccagggctcaatccaggaccacactcttattggccaggcaggggctcccacagagctttgagtaacttcttggttgtgcagtctgcaggcaatgttggcattgtaaattcctcccttgcagcctccttcatgtggtgaggggatcacttcagctgcctgctgtggacaaagaacatcaaattacagcatcacgagtgctattgttgcctgtggtggtctccctgtccaagcgggaccgctttgcagagaccagaggcatatcgcggcttgagctgaaaatgcatttgttgcagcttaggttgaattatttttcgtttgctctttcttctacacgcgcctgatggatagtgaacctattcatcaaaaaagtgcactgctcttctgtctattgtaccgacttaacctcttccacccaagtccgcatctgtgtgtatcatcaataaagttgtgtgctttgattggc

SEQ ID NO: 355084 - DNA, 1808 bp, Homo Sapiens
  misc_feature (1797)..(1797): n is a, c, g, or t
  misc_feature (1804)..(1804): n is a, c, g, or t
ctagagcacaagtcctgctagtcgcctccgtctgggtaccagccccctattactctgcaggcgtgtgaagaaagaaggaaactagctcggaccgtgcaggtttgtaggtctgttggcctgtaggtttcggcacaagtttcagcgagagaaggagaaaactgccttggttggaaccttgcagattcatcacaagagagctacaagagcctggaagaagctgaagactgctaccctccatccttactcaccctggacctgagagacctcttcaatcaggtggagcaaggccctctcctgtcctgccccaaggctggcacagacttgagcatgggccgggctcgggaagtgggttggatggcggcaggactgatgattggggctggtgcctgctactgcgtttacaaactgaccataggaagagatgacagtgagaagctggaggaggagggggaagaggagtgggacgatgaccaggagctggatgaggaggagcctgatatttggtttgattttgaaactatggctcggccctggactgaggatggggattggactgaacctggggccccaggtggcactgaggacaggccctcagggggaggcaaggccaaccgagcacacccaataaaacagcggccattcccctatgaacataaaaatacttggagtgctcaaaattgtaaaaatggcagttgtgttctggacctctccaagtgtcttttcattcagggaaaactgttgtttgccgagcccaaggatgcgggctttccatttagccaggatatcaatagccatttggccagcctctcaatggctagaaacacgagccccactccagaccccactgttagagaggctttgtgtgccccggataacttaaatgcgagtattgaaagtcagggccagattaagatgtacatcaatgaagtgtgtcgggagactgtgtcacgttgctgcaactcatttctgcagcaggccggattaaatttgttaataagcatgacagttattaataacatgcttgccaagtccgcttcagacttgaagtttcctttgatatcagagggaagtggatgtgctaaggttcaggttttgaaaccgctgatgggtttgtctgaaaagccagtcttggcgggggagttagtcggtgcccagatgctcttctcattcatgtccctctttatcagaaatggaaacagagagattctcctggaaacccctgccccataaacggccctctcgaacacaatgggacggaatccacccacaacgcgcttggtttgcagatgtcaaagaatctgcagagggtgctactgaagatccagccttagccaatcaccacctcattgggtgaaagttccagggctcaatccaggaccacactcttattggccaggcaggggctcccacagagctttgagtaacttcttggttgtgcagtctgcaggcaatgttggcattgtaaattcctcccttgcagcctccttcatgtggtgaggggatcacttcagctgcctgctgtggacaaagaacatcaaattacagcatcacgagtgctattgttgcctgtggtggtctccctgtccaagcgggaccgctttgcagagaccagaggcatatcgcggcttgagctgaaaatgcatttgttgcagcttaggttgaattatttttcgtttgctctttcttctacacgcgcctgatggatagtgaacctattcatcaaaaaagtgcactgctcttctgtctattgtaccgacttaacctcttccacccaagtccgcatctgtttttatcatnaataaanttgt

SEQ ID NO: 355085 - DNA, 407 bp, Homo Sapiens
aagctgaagactgctaccctccatccttactcaccctggacctgagagacctcttcaatcagcctccttcatgtggtgaggggatcacttcagctgcctgctgtggacaaagaacatcaaattacagcatcacgagtgctattgttgcctgtggtggtctccctgtccaagcgggaccgctttgcagagaccagaggcatatcgcggcttgagctgaaaatgcatttgttgcagcttaggttgaattatttttcgtttgctctttcttctacacgcgcctgatggatagtgaacctattcatcaaaaaagtgcactgctcttctgtctattgtaccgacttaacctcttccacccaagtccgcatctgtgtgtatcatcaataaagttgtgtgctttgattggcaaa

SEQ ID NO: 355086 - DNA, 963 bp, Homo Sapiens
  misc_feature (21)..(21): n is a, c, g, or t
  misc_feature (83)..(83): n is a, c, g, or t
  misc_feature (102)..(102): n is a, c, g, or t
  misc_feature (494)..(504): n is a, c, g, or t
  misc_feature (918)..(918): n is a, c, g, or t
acccttttgccagaacctganggaaaaataacaacctccttaatgtaaaagtttgccccttgaattaataaagcccataagtnaaatccgaagctgttccgncatttttgccaggcccttgcattttcctacctgggaggttccatcaaaccttcccacttagcaatagcccctgacctccaggcagaatgccctcataaattagcccttcgaaagaaaagtgcacgcctcagacagtgtgtggaggggcaggagcgtgatgcagacaaggacttagtcatgactgattttccttagcccagtttgtaatggcttatggggaacattgtgagcttcctacctgacatgttggcagaagtagaatattaggatcctcaagcatctctaccgtaagtccaaagaatttaggtccctattgtcactttgttttgcaatgttttttataaaaatgcaattaaatacctcactattaaactgccatgatgcctcagttnnnnnnnnnnnttaaatgtccgtcagtgtctgtgccttggtgaccattgattgctgcttctgcccaggccgctgcaaaggttaggactttgtccactcacatgctttccaccctgagcttgttctaaggagagtgcagatcacgaatgcacctgcttccaggcagtgcacttagagaaaggtcactggcccgggcttgggaccctgggggatgcagctctctctgtgggcttctcttggtgcacggttctgcctctggacactcaaacctatttagggtgtgtgcagggctggggccagtggacctgacagtaccttacctggctctgagaaactcgcaatgctagtttgcacaaatgaatagttcgttcttttgtgaaaccagaatgagaattcaggttctaaagactagaggtctccctacanatgaagacttatcagggccctagaaagtgctaggaggaagaggtt

SEQ ID NO: 355087 - DNA, 1955 bp, Homo Sapiens
  misc_feature (82)..(82): n is a, c, g, or t
ggtattcaaaactgccattaagataggatttcatgtcagatacgtatttaaagagtaaagtcaaatttgtttaatgtcagancagtgacagaagtgaaaagaaagtaattgtgaaagtgatgtttgagctattgtacacatctagcatatggaaagcaaatgcactcgaaaactactattctagaacatgaggcttcttcagcaacttgtgcactctgccattaataaattaaatttttcccctctagaaagccttaactatggcggaaactttttaaccttttatattttaataaataaaacattgtagtcccatttcttagtgtttgaaaggtgtgtcagtgagtcggccatgtctccatgtgtttcagacctgttcatcttattttatgatggtatatttcataagtaatattcccttacatgcaatggagctgattaaaattaatccatttcaatttctccatattggaacttcctcagctaccagatttctggtttggagaagtgctggaaagatttcaaagcctattcagttgtgtatgtggggatacgacagcaactgtgataccttgtagaatatgagtgatatgcaagctgtgttttttaattgttttaaaatgtaaattatggttatgctaaagtgaaaacctagaggaagctaatgattttatatactttgcacgaccaaatatggtcgtagtatgacgagttttatacattgccagagagttctgcctcctctgaaataacattcgcactgtaggattgcatttcggcttttcctcctttcacattcttttttgctttacacttcacgtcttcggcacctgccctacctcccatcctttcaaagaggtttctttcacgttccagaattcagattgttctgtgatttcttttacatcagtctacccatttctgcaagcagccctgaaagccctttgtgttgattcagagtgtttgcagagaaatgcagttgaaccctggtagtggggtgtccctcacacacccgcgcacccctcccaaagttcaggatgaaaggctagaaaacccattcaaagttaggaaagaacacagatctttgaggccgatagcctagacctagaagatgaccttgagtatgtaaacattgtctccgtgacacaaaacactgaaactcttcatgtgcatataacacctgcttctgctcccattgtttcaagctcatcttatctttgtagtagtaatgtttgtctttgatacctacaaactaaaaaggtacttttatcaaggtttctcaaaacatttacaaaaccagctttgagaaaatgttatgttgcctggcaacagcactcggagtagtaattgtgttttctcattgtgatgttggtctgtgtgagcaaccagtgtagtgactctttggttcattattcgtgttgtttttatttttagtctctgtgtgacccaacagtggcaggggttacaaccccctctcctttcttttttgtatttatctatttgtaggattgtcagatcaagtacaagatgcccagttaagtttgaatttcagagaaacaatttcacgttaagaatgtttcatgcaatatttggcatatatttacagtaaaagcattcattatttgtctgaaattcaaatttaactgagcatgctggtttttctcattgtttggtttttctaaatctggcaatcctacagctgtggtcatgggaaatcacctacagcatgttaaagtcctctagtcatcatctcgtcacctgaaatggaagtcctttttccctcaccctccacttctttccaaaggagggcatcaaggaacttaacctgcctgcctggtgggtttctatttaagacatctttgtgattatatttaacctgcaattgtgctttggcttaatgtctagctcactgtacttgtaaatgattaatattcaataaaaccatttttaaagta

SEQ ID NO: 355088 - DNA, 499 bp, Homo Sapiens
  misc_feature (106)..(106): n is a, c, g, or t
  misc_feature (142)..(142): n is a, c, g, or t
  misc_feature (153)..(153): n is a, c, g, or t
tggcccaaggatcaaagtaccaagatgcccccccagtaaagttgaaattcccaggagaaaacaaattccaccgttaaagaatggtttccatgcaaaatatttgggncaataatatttaacaagtaaaaaagcaattcaattngtttggccctngaaaaattccaaaatttaaactgaagcaatgccgggtttttccctcattggtttgggtttttcctaaaatctggccaatccctacagctgtggtcatggggaaatcaccctacagcatgttaaagtcctctagtcatcatctcgtcacctgaaatggaagtcctttttccctcaccctccacttctttccaaaggagggcatcaaggaacttaacctgcctgcctggtgggtttctatttaagacatctttgtgattatatttaacctgcaattgtgctttggcttaatgtctagctcactgtacttgtaaatgattaatattcaataaaaccatttttaaagtac

SEQ ID NO: 355089 - DNA, 462 bp, Homo Sapiens
  misc_feature (32)..(32): n is a, c, g, or t
  misc_feature (41)..(41): n is a, c, g, or t
  misc_feature (228)..(228): n is a, c, g, or t
aagcccccggtaaaggttggaaaatcccaggngaaaacaantccccggttaaagaaaggtttccaaggcaaaaaaattgggccaaaaaattaccagtaaaaagcattcaatggtttggtcctgaaaatcaaaaattaaactgaagcatgctggtttttccccattgtttgggtttttcctaaatctggcaatccctacagctgtggtcatgggaaatcaccctacagncatgttaaagtccctctagtcatcatctcgtcacctgaaatggaagtcctttttccctcaccctccacttctttccaaaggagggcatcaaggaacttaacctgcctgcctggtgggtttctatttaagacatctttgtgattatatttaaccttgcaattgtgctttggctttaatgtctagctcacttgtactttgtaaatgattaatattcaataaaaccatttttaaagt

SEQ ID NO: 355090 - DNA, 1023 bp, Homo Sapiens
  misc_feature (1013)..(1013): n is a, c, g, or t
ttaacaaatgaatttaggcaatgtgctttgctctacaatccatcagatacattttcactgcagatagttcagaaatcattttggaaatagacacaaacatgtacatattcatttgctgaaaatgccacttacagctttaatatcaaatatagttatcatagttcacagaaaaagtataaagtgcaaaagctccacttcaaaaggcctttaagtcactcccaaagcaacgaggattaaatttaaccacagccagtggggcatgccacccttatgtaggagcacctacataaggtataaaacaaggtataaaatctggtttaacatacagagaaagatacaattcaaacaattagtcctataaagtaggggttatttatttttttaagtttgcaggggaattatgtctataaaatccattgagaatcccaatctggcccaagacttctctttggccagctggaataatagcacctaggcaaagccttggctatgaaagctttcagattaatttcagtgtaaaaggagctaggagaggggccctgactgggtgagcttcagcatccacctggtccctcagagatggttccatgtctgccccaagggataaagagccaggaaggctcaaatcccagtcctgagggctcatggaagcatgatgaactggcgagagaagttttacacacctgacagatcccagtaagtggaataggtggtcgtatttttacaaagccttgtgtttgatgaccatcaagctttgtccctcaacagaacatctttgatctataattaatgttttaggcactcttcactggacaggcatagagttccccaaaaatgcagcccatccccaaatggattcagacatctcatctccacacaccttaaatgtgttcatggaaggacttgatttataatgatgtaatcataaagggaagaaaatattactttttctaataatcaacaactaaacactgtaaaacatgaatcgctgactgaaatgatcactcggaaancctcgtgccg

SEQ ID NO: 355091 - DNA, 469 bp, Homo Sapiens
cggcctgggtccgggcggtgttcgcggctttggcgacggcggtggagctccttcgtgggcccctgaggacgcctggatgggcactcaccctaagtatctagaaatgatggaattagatataggagatgccacccaagtttatgtagcgttcttggtttacctggacctcatggaaagcaaaagctggcatgaagtaaactgtgtaggattaccagaactccagctcatctgccttgttggtactgagatagaaggggaggggttacagactgtggtgcctacccccatcactgcttccctcagccataacagttgtacacagaagaaagcccatatgaggacacagcaagaaggtggctgtcttcaagccaagaagagaggcctcatcagagatggaatgttcctgcacttcggtctggatttctagtgtccagaactgtgagaaaataaatttctgttgtttaagccc

SEQ ID NO: 355092 - DNA, 1892 bp, Homo Sapiens
  misc_feature (1807)..(1807): n is a, c, g, or t
  misc_feature (1810)..(1810): n is a, c, g, or t
  misc_feature (1813)..(1816): n is a, c, g, or t
  misc_feature (1820)..(1820): n is a, c, g, or t
  misc_feature (1824)..(1829): n is a, c, g, or t
tcctaagtagcgaggcctgggtggcgaattcggcacgaggccacgggagcgccgcaccggccggcatggaggagcgcggcgattccgagccgacccccggctgcagcggcctgggtccggacggtgttcgcggctttggcgacggcggtggagctccttcgtgggcccctgaggacgcctggatgggcactcaccctaagtatctagaaatgatggaattagatataggagatgccacccacgtttatgtagcgttcttggtttacctggacctcatggaaagcaaaagctggcatgaagtaaactgtgtaggattaccagaactccagctcatctgccttgttggtactgagatagaaggggaggggttacagactgtggtgcctacccccatcactgcttccctcagccataacagaatatttctcttagaagatgacatccatgtttcctgatgcttgttttattcatacaagattggatttgagacccatcagactgcttcatcttttatctcagaaatagggttgacgtacatagtgagggttgacttccccattccataaggttttcattctgaagagtaaaacttccccaggtagaagactttctccttcttaaaaaatatagggtgatttctttaaaactttgttatctagagacagtttaattacagttatatacaggtttatgcctaggatgtattcagatgggtgggacctgtgtgctgcttttgtcatcccacactcaaagttgtctctttgtttcttgctgccactgccagctcattgttgagactgccatttctttctcttactcagctctccccagtgccttttggccactgcagctaccgtagaatggcattttatatgtaccttgtcacccacttctgtttactttttcctctccagtaaaaagtaaaagatttctttcaattggtcttcccattgcagttactgttatttctcttttttggttaactttaaatcaaaactcaaaatatgttcatccagagtgtgtcttaagtaacttacgtgtcttaagtaacagggaccagagacatgttacctacaagagttctgggctatccttttcattcttatcacatatcatagcttgaatattacaacagtgtgggagagaatcaaccgtaaaaatgtcttcattaattagacccagttattccacttttgttaatgtctctcaaattgtacaaagtataaaaaattatatgcacaaagatgttccaagtgacattacttttagtagcccaaattataaaccactttaaagtttggggtaaagattggcaaactttttctataaagggccagaaagtaactattttaggtttttaaacctactgtctctgtcataacttgtcaacactgctgtatgaagcacaaaagcagccatagacaatacataaacaatacgggcgtggctttgttccagtaaaactttgtttacaaatgtggtgccatagtttgtcatccctgggtctaggaaatagtcaataaacagatatatacaaatgatacataatgtacttattaaaaattagtaatgaatattattaaaaacatgaaaatattaccttaagtaaaaattgcaagacggaaaagtgtataagtgggtgtaatcatggctgaaataacagaccaagcatatgataaaaagataacaaagtaaatcaaattactaactggttatagtgggataggaggcagaaaatggatgactttgtcttttctcaatgtttttatttgtattttataataaaaatgttttaaaatcaaaaaanaanaannnnaaanaaannnnnnccctggtcggcccgcctcggcccctcgaaaaagcttttcttagaccaattcgttttgggcgcg

SEQ ID NO: 355093 - DNA, 924 bp, Homo Sapiens
  misc_feature (769)..(769): n is a, c, g, or t
  misc_feature (784)..(784): n is a, c, g, or t
  misc_feature (788)..(789): n is a, c, g, or t
gtgccctatagaacagtttcggtccggcacgggagcgccgcaccggccggcatggaggagcgcggcgattccgagccgacccccggctgcagcggcctgggtccgggcggtgttcgcggctttggcgacggcggtggagctccttcgtgggcccctgaggacgcctggatgggcactcaccctaagtatctagaaatgatggaattagatataggagatgccacccaagtttatgtagcgttcttggtttacctggacctcatggaaagcaaaagctggcatgaagtaaactgtgtaggattaccagaactccagctcatctgccttgttggtactgagatagaaggggaggggttacagactgtggtgcctacccccatcactgcttccctcagccataacaggataagggagatcttgaaggcatctcgaaagttgcaaggtgatccagatttgccgatgtcttttactttggccatagtggagtctgattctacaatagtctattataaacttactgatggatttatgctgccagaccctcagaatatttctcttagaagatgacatccatgtttcctgatgcttgttttattcatacaagattggatttgagacccatcagactgcttcatcttttatctcagaaatagggttgacgtacatagtgagggttgacttccccattccataaggttttcattctgaagagtaaaacttccccaggtagaagacttttctccttcctaaaaaatataggggtgatttnctttaaaactttgtntatnnctagagacagtttaaattacagttatatacaggtttatgcctaggatgtattcagatgggtggggacctgtgttgctgctttttgtcaatcccacactcaaaagttggtcctcttttgtttccttggctggccac

SEQ ID NO: 355094 - DNA, 797 bp, Homo Sapiens
  misc_feature (18)..(18): n is a, c, g, or t
  misc_feature (42)..(42): n is a, c, g, or t
  misc_feature (71)..(71): n is a, c, g, or t
ggaagccgggataaatgnaccccagaaaaagtcctccttganggccagggtgatgaattatggcctccaanagcatcctccccacagaagtgagtaaagggttgcacagcattttcccataagagcatgaatagcctttgttactgattggtgcaacttatacaatgaattcactactgccacatttcttctctgtccttcagtaagaggcccaatcacctgacttgcatctccttgtgtggagagaagctgctctgattttacactgtataactggatggtctttgccacattttttgacacagctaatgtgaggtttgtatcaacagcagcaacatttagttcacttgctatagttttaataataccatcaagttcatcagaggaaggaggattacgaccacccgggggaaaaaccaagttgataggatcgaagagtcgagataaggattttgatagataagcagcctcatagggttgtagtgagtctttcaaagccttttctggatcataatctggcttttttggtatgaatatatcttgtgcatcatcttccatgtgttgtaggtcaacatagaggtctgtagttccacttgcattaaaattcccttggatatgctgactgtattgttgaagacgcttccataagtcattataaagacgtaataatttagggtattctccttcaaatgcctgcttcaaaaacatcgaagagtttgttgccatatgaaattgagaagaaagtgcctgagtaactgaattccaaaatgtgtagaaaatttccggttgtccatcct

SEQ ID NO: 355095 - DNA, 1150 bp, Homo Sapiens
  misc_feature (241)..(282): n is a, c, g, or t
  misc_feature (533)..(533): n is a, c, g, or t
  misc_feature (763)..(800): n is a, c, g, or t
  misc_feature (1047)..(1047): n is a, c, g, or t
  misc_feature (1099)..(1099): n is a, c, g, or t
  misc_feature (1108)..(1108): n is a, c, g, or t
  misc_feature (1120)..(1120): n is a, c, g, or t
  misc_feature (1134)..(1134): n is a, c, g, or t
tgccgtgaaagtttcttgcatttcaacaatattcagaaggtcttttccaccagcctattttcttcttcaccaaaggcctagagtgtgacctggcttcatgggtgacccatgaaaaccttactagttagacattgaaaatccatccacagtcctgcattaccgaacagctaagaagcattcttgcaaaactttggagttaggcacattatttcttttttccttgaaaaatatttctagcagnnnnnnnnnnnnnnnnnnnnnnnnnnnnnnnnnnnnnnnnnngaaatctctttttctagaaactcgatgatttaattatctttaaagattctggttccaacacacctagaaatacttcacggattagttgagatgtgttcctgaaaatttccctacctggacatctcggttcttctgtcccttcgtctaccttttctagtttttggtccagccactctgtccacgtaccatgtagactgtctcccctctcatgaatacttggaagtattcattgcatctgcctaacaacttgngttttgcatctagcatgattttccacctcatatctctaagatgacttgagtgtgtgttattatgtgtgcaatgagaatattaacatggattgtatagacagcctaggtaattatatatataaagttggtgcttcaagcttaattctcacctcacattggagaaaaagagtgaaaaaatattattagccccaaataatagagcttaaaaacctactgtaacttcaaagtgnnnnnnnnnnnnnnnnnnnnnnnnnnnnnnnnnnnnnnctgttctaattggaactatcaatatggaatttttgcatcccagcataataattatatatgaggaaatagatgtcttacgtggtgtccttaactgacaagaatttcatcctgattttgtttccccctaaaataggtatgcagtgtcaatgtgctaggaaggaatcggagccagagtgtatgctctccctggaagaccttgtgggaagtaaagcccaaggtgggtcatggactgtgtttggcatgtttngtggggcagggggattgaggagagtgttaaattaacccattctggattaaancagcctggntcccgggtgccnggtttcgcagttcngcttttccgggtgagt

SEQ ID NO: 355096 - DNA, 1864 bp, Homo Sapiens
ttggctgctttacttcgagatggtgagactttggaggaacttatgaaattgtctccagaagagcttctgcttagatgggcaaactttcatttggaaaactcgggctggcaaaaaattaacaactttagtgctgacatcaaggattccaaagcctatttccatcttctcaatcaaatcgcaccaaaaggacaaaaggaaggtgaaccacggatagatattaacatgtcaggtttcaatgaaacagatgatttgaagagagctgagagtatgcttcaacaagcagataaattaggttgcagacagtttgttacccctgctgatgttgtcagtggaaaccccaaactcaacttagctttcgtggctaacctgtttaataaatacccagcactaactaagccagagaaccaggatattgactggactctattagaaggagaaactcgtgaagaaagaaccttccgtaactggatgaactctcttggtgtcaatcctcacgtaaaccatctctatgctgacctgcaagatgccctggtaatcttacagttatatgaacgaattaaagttcctgttgactggagtaaggttaataaacctccatacccgaaactgggagccaacatgaaaaagctagaaaactgcaactatgctgttgaattagggaagcatcctgctaaattctccctggttggcattggagggcaagacctgaatgatgggaaccaaaccctgactttagctttagtctggcagctgatgagaagatataccctcaatgtcctggaagatcttggagatggtcagaaagccaatgacgacatcattgtgaactgggtgaacagaacgttgagtgaagctggaaaatcaacttccattcagagttttaaggacaagacgatcagctccagtttggcagttgtggatttaattgatgccatccagccaggctgtataaactatgaccttgtgaagagtggcaatctaacagaagatgacaagcacaataatgccaagtatgcagtgtcaatggctagaagaatcggagccagagtgtatgctctccctgaagaccttgtggaagtaaagcccaagatggtcatgactgtgtttgcatggttgatgggcaggggaatgaagagagggtaaaataaccaatctgaataaaacagccatgctcccaggtgcatgattcgcaggtcagctatttccaggtgaagtgcttatggcttaaggaactcttggccattcaaaggacttttcattttgattaacaggactagcttatcatgagagccctcaggggaaagggtttaagaaaaacaactcctctttcccatagtcagagttgaatttgtcaggcacgcctgaaatgtgctcatagccaaaacattttactctctcctcctagaatgctgcccttgacatttcccattgctgtatgttatttcttgctctgttatcttttgccctcttagaatgtccctctcttgggacttgcttagatgatgggatatgaatattattagacagtaattttgctttccatccagtatgctagttcttattcgagaactatggtcagagcgtatttgtgatatgagtatcctttgcttatctttgtagtactgaaaatttgccgaagtaacctggctgtgcaaaatgtaatagaagcttttcttattcctttattcttaagatcagtatctttttacagtattccttcccacatgaatcctttttttgtaacttttaagaaataatttttgattatatttaaaaccaagactgggtgaatttttgcctacatttttttaaagggggtcccttcaaggtaaagtaaaaacattaaccatccgtcaacccttcg

SEQ ID NO: 355097 - DNA, 702 bp, Homo Sapiens
tgcgctcgcggccacaggcctgttgttctcggaagggagaaagctggacatttccccacgtaactcccagctctgggcctagagtgcgtgcatggcgaagtccccggagaactctaccctggaggagattctggggcagtatcaacggagtctccggggaggaactctctggaatgaaaaataaaatacaagtagttgtgcttgaaaacgaagggctccagcaacagctaaaatctcaaagacaagaggagacactgagggaacaaacacttctggatgcatccggaaacatgcacaattcttggattacaacaggtgaagattctggggtgggcgaaacctccaaaagaccattttcccatgacaatgcagattttggcaaagctgcatctgctggtgagcagctagaactggagaagctaaaacttacttatgaggaaaagtgtgaaattgaggaatcccaattgaagtttttgaggtaaagtgaaatcgtccatttatagtcataccaaaagcataatgatcttaaaatatatttgaatgtttgctgaacttctagttttagtcattatcagacttacttgatgacattttaatacactttaaaaaatttcctcagattattaaaggatgaaaggcctaaaattgagttcttttccaaatcacgttcccatttcttcatcagttgtaaaatatttgtgt

SEQ ID NO: 355098 - DNA, 864 bp, Homo Sapiens
gggaggctcccctgtgacagccgcggcaggaagcaggcgggcgctccccggccacaggcctgttgttctcggaagggagaaagctggacatttccccacgtaactcccagctctgggcctagagtgcgtgcatggcgaagtccccggagaactctaccctggaggagattctggggcagtatcaacggagtctccgggaacatgccagcagaagcattcaccaactgacatgtgccctgaaagaaggcgatgtcactattggagaagatgcaccaaatctttcttttagcaccagtgtgggaaatgaggacgccaggacagcctggcccgaattacaacagagccatgctgttaatcagctcaaagatttgttgcgccaacaagcagataaggaaagtgaagtatctccgtcaagaagaagaaaaatgtcccccttgaggtcattagaacatgaggaaaccaatatgcctactatgcacgaccttgttcatactattaatgaccagtctcaatatattcatcatttagaggcagaagttaagttctgcaaggaggaactctctggaatgaacaataaaatacaagtagttgtgcttgaaaaacgaagggctccagcaacagctacaaatcttcaaagacaagaggagacactgagggaacaaacacttctggatgcatccggaaacatgcacaaattcttggattacaacaggtgaagattctgggggtgggcgaaacctccaaaagaccatttttcccatgacaatgcagattttggcaaagctgcatctgctggtgagcagctagaactgggagaagctaaaacttacttatgaggaaacagtgtgacaattgaggaatccc

SEQ ID NO: 355099 - DNA, 407 bp, Homo Sapiens
  misc_feature (375)..(375): n is a, c, g, or t
  misc_feature (377)..(377): n is a, c, g, or t
  misc_feature (379)..(379): n is a, c, g, or t
atgcacaaaataagcctggctgtggaaatgcttatttgttgggagggtgcttgtttggatcgatgatgagaataattgtctgagcatgctgagggactcattccagatgtcaatctgaggtccagatgtgtggccctccaataggacaaataagactctcagagcctggctctatttggggatccctcagtgacaacatagtacctctgtgagcgtgccttttctatctctccgaagagggcattagcatcctgtcttatgagtcagtatgcactttagtatggttagtgacccaagactcactttattttgttcattttgagcagagaattgtagatagatacatatatgggaaatatgttcttgattagcccnananacaaaagaaaaaaccaaaaacaccttgt

SEQ ID NO: 355100 - DNA, 1435 bp, Homo Sapiens
  misc_feature (251)..(251): n is a, c, g, or t
  misc_feature (371)..(381): n is a, c, g, or t
  misc_feature (515)..(529): n is a, c, g, or t
  misc_feature (554)..(609): n is a, c, g, or t
  misc_feature (968)..(968): n is a, c, g, or t
  misc_feature (991)..(991): n is a, c, g, or t
  misc_feature (1164)..(1260): n is a, c, g, or t
  misc_feature (1311)..(1311): n is a, c, g, or t
  misc_feature (1347)..(1394): n is a, c, g, or t
acacgtaacgcccttcggtcatatgacacaggaccttgtctgaacataatgatttcaaaatttgagcttaaaaatgacactctgaaatccagtcagtgtgctcacactagacttttccgattccaagattttctgcagaaaatgctttgaaaactttgaatacttaaaaatggcaggtgtagtattgcactttgctagttgctcagatacccttttttatttgtatagatattctgagttccttttttttnctacatgttgtacgttgtcgaaagctaaaaggaaacttatccttggatcacggaaggcagaggcatttggtgagatggaaacaaggatgtgtaaaaatgagacgaccacctctcggattnnnnnnnnnnngtgccagagttctagggttctaagtgaagtccaggaaggaggaggaaaaatatttatggagcatatattatggaacacagtgagtatagtacctgcctttaaatgaatactgttggctttttaggacagttgcnnnnnnnnnnnnnnncttcagctgtgtgcagttgattaannnnnnnnnnnnnnnnnnnnnnnnnnnnnnnnnnnnnnnnnnnnnnnnnnnnnnnnggcagcattgctaatttttgtatagtgagacggtatctcacagtccaggctggagttcagtggcattaacataactcactgcggccttgaacacctgagctcaaacgatcctttcgccttatcctccagagtagctgggactgcagtcgcgtgtcaacatgcctggctaattttagttttctaatttttttagagttgggatctcgctatgttgcttagactggtcttgaactcctggcctcatgccatcctcttgcctcagctggtattgtaggtgtgagccactgtgccaggtactaattttttttatgttagaaaacaagtttttaggtatttaatagttactcccttatgaccantatctcatcaagaatctaggccntatctgaatatctgaactccatacgtttataccgtgtaagtcaagccattcccagatagaggtccatttgagttacttaagtgtttaccagcacttgtttactacccttgcggatgatatttacagtgtatttttgggtatggttttggggttatttggttgttgttaagatnnnnnnnnnnnnnnnnnnnnnnnnnnnnnnnnnnnnnnnnnnnnnnnnnnnnnnnnnnnnnnnnnnnnnnnnnnnnnnnnnnnnnnnnnnnnnnnnnctagaaatacaaaaattggcctggcgtggtggcgggcacctgtggtcccantacgcaggaggctggggcgggagaattgcttgagcnnnnnnnnnnnnnnnnnnnnnnnnnnnnnnnnnnnnnnnnnnnnnnnnttcagcttgagtgacagaggtgagactcccatctcaaggta

SEQ ID NO: 355101 - DNA, 1355 bp, Homo Sapiens
  misc_feature (1179)..(1179): n is a, c, g, or t
  misc_feature (1198)..(1198): n is a, c, g, or t
  misc_feature (1205)..(1206): n is a, c, g, or t
  misc_feature (1229)..(1230): n is a, c, g, or t
  misc_feature (1237)..(1237): n is a, c, g, or t
  misc_feature (1311)..(1311): n is a, c, g, or t
  misc_feature (1319)..(1319): n is a, c, g, or t
  misc_feature (1325)..(1325): n is a, c, g, or t
  misc_feature (1331)..(1331): n is a, c, g, or t
gtggaaggcagacagtgaaggtccacaccagcggctaactagtgagaactacctgttaaggcagagctgctgacatccgatctcgattcagagtcatcctccaaggcttcttcttctcctaagagcactttgcctagtaaataatgtaccaacattccttttagtttgctaaaaataaggacttcaaaattaagtaaatgcactctaaaatgaaactcataagaatatttaatttactctaatatagtttatcatcatatataagtatttttatacctccacagtattaaacacaaagaatgtagagatgttatgtttagaatgctattaaagtcaataaacctatatggaaaaagttaaaagcaatgattctcaaactataccacaaaacattttaataattaatatttattgattttgattattaaataatctatattactacttaaacttaaaaatggtaagttataactgtaaagatccaatgctattggcctttgaaatattcatgtcatagctccaatgacacaccagaatttataataaaactctaatacctaaaagtcactttcattttattatcttttaattttctagactttaagattaacaatcagaacttaagcattatatgatctggaaggatgaaataatatttcatttgaaagttctaaaaatacattttattgttcatcttcagaattacattaatgagaacaaatgaaaccaacagtcttaatatgatttaaaactgaactcattaaatctttgtggctacatcacatgtgagtgtcattaaatgacactatcaaaataattattgggaatttctaatttctgctcttcaaagaaaaagtcagaagtatgataacttccataaacttacaatgatgtgagattaagagtgaaaaaatgagcaaaggaaacccaaaatctacatggaattaacacagcaacttggcctatctactaaataataggaaactttattacaaaataagttctttaccttgagaaatcaaataaaatgccaaaaaggtgaattcagatcttaacaaaagccatctctatcttccaaatcagtggtttgcaaatatgttccacagagccgtccccagggtaatttccttcaaggcacaagagctaggcttgcaccagaagagagctccaggacacccncactactttcacccctatnctatatnncacacaactctaccttcatctgnnctataanttgggcagatttcactttaaaagggattttccagctattaccagaagagtttgaagacacagctcttcaatggnggaaaaantaccanggcttngagaccaggatattcccatgtccc

SEQ ID NO: 355102 - DNA, 821 bp, Homo Sapiens
aaggagcctattataaacagatctgtggtctaatgaaatgtgattaatactgtgcattattaaagaacttttgacttttcaaaaaacttttacaacatttcccatttgatagcggcataggtttaagcacttctcatctctaagttagtggacaaaaaaccctcatggatagtctaataatgtttgctacaagtccatgttgagttttatactccattttattttcagttttaaaaactgtggttaaatatgtgtaacataaaatttatgttcttaaccattttttgcgtatacagttcgctggtattaaatacatttaaataatgtcatggaatcattgctaccacccatctctgtaaccttttgatcatgtaacactgaagctctgttcccattgaactctattcctcctttcccgccaagtccctggcaaccacgattcttctttctgtcttctgaatttgactactttgggttctcatatactttaggagtcacacagtatttgttttacttagcataatgtccccaaagctcatgcatgctgtagcctatgttagaacttcctaatgtttcaggccaaatactattccattgtatggataggccacattttgcttttccattcctctgtccatggacacttgtattgcttcatgttttagccattgtgaatcatgctgttatgaacgtgggtgtacagatagctcctggagactctgctttccatttttttggctaaatacccagaaatggagttgcttttacattccaattttaatttaaaacattcatatcattgagtgttttacttaatagta

SEQ ID NO: 355103 - DNA, 609 bp, Homo Sapiens
taaaaggagtaggtataaatgtttgggtttgcaaaccatacgatttcctttgcaactatttaattctgcaattgtagctggaaggcagccatgcacaatcagtaaatgaaagtgtttggttatgttccaataaaactttgcttaaaaatacatggaaaggaggatggatttggcccacaatctgtttgccatctcctgatctaaatgatccccacttggagcaagagctaaccaaagacacactttaatggcccttatcagatagatagatgcttatatcatactttaaaattcttaattatataagatgcagtttttatgtaacttcccttcacaatttgttagtaccacactcataacttaagatgatacttaagcatccacagaagcactatgcttttacaaaattcttgtatctactcctgcctgttttattacttagctatatgtcaatacaatacgtcaagttcccagaaaaactatgttagaattttgactaaaattgcaaagcaatttctgtataactcatgtatttgaaatagtgatttatcattcaggaacatggcttctatctgtatttcgttctcataaaattttattttcttgtcc

SEQ ID NO: 355104 - DNA, 3793 bp, Homo Sapiens
  misc_feature (1846)..(1848): n is a, c, g, or t
  misc_feature (1851)..(1851): n is a, c, g, or t
  misc_feature (1856)..(1856): n is a, c, g, or t
  misc_feature (2101)..(2167): n is a, c, g, or t
acatgcccgactgccccaactgcaactacaggagaagatgtgcttgcgatgactgcagtctctcacacatcctcacgtgtggtatcatggacccccccgtcactgatgacatccacattcaccagctcccacttcaagtggatcctgctcctgactatcttgctgagaggagcccgcccagtgtgtcatctgcaagctcggggtccggctccagctctcccatcacaattcagcagcaccccaggctcatcctcacagacagtggctcggcaccaactttttgtagtgatgatgaagatgttgcacattgtcagccaaatttgctgatatttatccattgagtaattatgatgataccgaggtggtggccaacatgaatggaatccacagcgaattgaatggtggcggggaaaacatggccctgaaggatgagtctcctcagataagcagtaccagcagtagttcctcagaagctgatgatgaagaagcggacggcgagagtagtggggagcccccaggggccccgaaggaagatggagtgctgggaagcaggagccccaggacagaggagagcaaagcagacagtccacccccatcctaccctaacacagcaggctgaacaagctccaaacacttgtgaatgtcatgtttgtaagcaggaagcttctggactgacaccatctgcaatgacagccggagcccttcctcctggccatcagttcttgagcccagagaagcccacacaccctgcactgcacctttaccctcacatccatggacatgtgcctttgcacactgttccacacctgccacgccctctcatccaccccaccttgtatgcaacgccccccttcacacacagtaaggctttaccgccagcacctgttcagaatcacacaaataagcatcaggtattcaatgcatctcttcaagaccatatttatccgagctgttttgggaatactccagagtggaatagttctaaatttataagtctttggggatcagaagtgatgaatgataagaactggaatcctggcactttcttgccagatacaatttctgggagtgaaatattagggccaacactctcagaaacaagaccggaagcccttccacctccatctagcaatgaaacacctgcagtctcggatagtaaagagaaaaagaatgctgcaaaaaagaaatgtttatacaatttccaagatgctttcatggaagcaaataaagttgtcatggccacgtcatcagccacgtcctctgtgtcctgcacagctaccacagtgcagtccagcaacagccagttcagagtgtcatccaagagacctccttcagtaggtgacgtgtttcatggcatcagcaaggaggaccacagacactcggccccagccgccccgaggaatagccccacgggcttggcccccctcccagcgctctcgcctgctgcgctgtcacctgctgcgctctcacctgcctccacacctcaccttgcaaatcttgcagccccatcattccccaaaacagcaaccacaactcctgggtttgtggacacacgcaagagtttctgtcctgcacccctacccccggccacagatggctccattagcgcccctccaagtgtctgcagtgaccctgactgcgaagggcaccgctgcgagaatggtgtctacgacccacagcaggatgatggggacgagagtgcagatgaggacagctgctctgagcacagctccagcacctcgacctccaccaaccagaaggagggcaagtactgcgactgctgctactgcgaattctttgggcacggcgggcctccagctgcaccaacaagtagaaattatgcagnnntgnggganaagcttcgcttacggctgaccaagaggaaagaggagcaacctaaaaaaatggaccagatctcagaaagggaaagcgtcgttgaccatcggagggtggaggatttgttgcagtttataaatagctccgaaaccaaaccagtgagcagcacgcgtgcagcgaagcgagcaaggcataagcaaaggaagctggaggagaaagctcgcctagaagcagaggccagggcccgggagcacctgcacctccnnnnnnnnnnnnnnnnnnnnnnnnnnnnnnnnnnnnnnnnnnnnnnnnnnnnnnnnnnnnnnnnnnnatttcagcggcttcaggagcttcagaagctaagagctgtaaaaaagaagaagaaggagaggccaagtaaagactgccccaagttggacatgctcactagaaatttccaggcagcaacagagtctgttcctaactctggaaacatccacaatggctcactagagcaaactgaagaaccagaaacctcttctcactccccatccaggcatatgaaccactcagagcccaggccagggctaggggctgatggggatgctgcagaccccgtcgacaccagagactccaaatttctcctccccaaggaggtgaatgggaagcagcatgagccactctcttttttcttcgacatcatgcagcaccataaagaaggaaatggcaagcagaagctgaggcagaccagcaaggccagcagcgagccagcgaggaggcccacagagccccccaaggccacagaggggcagtccaagccccgggcccagactgagtcaaaggctaaggtggtcgacctcatgtccatcacagagcagaaaagagaggagagaaaagtcaacagtaataacaataacaaaaagcagctgaaccacatcaaggacgaaaagtcaaacccaacccctatggagcccacctctcccggtgagcatcagcagaacagcaagctggtgctggcagagtcccctcagccaaagggcaagaacaagaaaaataagaagaagaaaggagacagagtcaacaattcaattgatgatgtctttctacctaaagatattgacctagacagtgtggatatggatgagacagagagggaagtggaatatttcaaaaggttctgcttggattctgctagacagacccgacaaagactgtctatcaactggtccaattttaagcttgaaaaaagccacctttgctgcccacttgaatgaggactccctggagagggacacgcgagaggcaggccaggctgcaccacccaagagccacgcccctcgctggcgccccagagccgtggtgcttgccaagggctgtgcggagctggtgctgcctgaaaccccagaccgagaagttgatgctcggcccacgccgttagctcgtgtgcgtgtagtctgtgcgtgagactccttcgattgtagctctgtgctgtcggattggaacagtagttcccgccaagtcctcccaccaccgcggcctcggaggcctgggccgtggccagataggagtttgcatcatccacgtggctccgttgcctctgcattgcgccctgtcctgtcatgtgtcctcaccggggtatcggccgtcactcagctctcctgtgcccctgcgtctcaccctaggcgggctgggcggggcaggcctcctttgttctccacaatctactgtctccgagtgtacacgttgcgctgtttgtgtttgatccccctgacttgtagccagcttgtgtaagatcccttgcagaacgagaaagttaaaaacaagcccacccagtactcacaccatcaagtctgttatagagtgtacgactgtattaacacggaggcctgcctggctacttttttaacatattgttaagtaatattaaaatcatgtctttctttttgaaagatggaatacattagtacagcaaaaaaaa

SEQ ID NO: 355105 - DNA, 2046 bp, Homo Sapiens
cggtccggaattcccgggatctttggccaatgaagtgggtaacctttatttcccttctttttctctttagctcggcttattccaggggtgtgtttcgtcgagatgcacacaagagtgaggttgctcatcggtttaaagatttgggagaagaaaatttcaaagccttggtgttgattgcctttgctcagtatcttcagcagtgtccatttgaagatcatgtaaaattagtgaatgaagtaactgaatttgcaaaaacatgtgttgctgatgagtcagctgaaaattgtgacaaatcacttcataccctttttggagacaaattatgcacagttgcaactcttcgtgaaacctatggtgaaatggctgactgctgtgcaaaacaagaacctgagagaaatgaatgcttcttgcaacacaaagatgacaacccaaacctcccccgattggtgagaccagaggttgatgtgatgtgcactgcttttcatgacaatgaagagacatttttgaaaaaatacttatatgaaattgccagaagacatccttacttttatgccccggaactccttttctttgctaaaaggtataaagctgcttttacagaatgttgccaagctgctgataaagctgcctgcctgttgccaaagctcgatgaacttcgggatgaagggaaggcttcgtctgccaaacagagactcaagtgtgccagtctccaaaaatttggagaaagagctttcaaagcatgggcagtagctcgcctgagccagagatttcccaaagctgagtttgcagaagtttccaagttagtgacagatcttaccaaagtccacacggaatgctgccatggagatctgcttgaatgtgctgatgacagggcggaccttgccaagtatatctgtgaaaatcaagattcgatctccagtaaactgaaggaatgctgtgaaaaacctctgttggaaaaatcccactgcattgccgaagtggaaaatgatgagatgcctgctgacttgccttcattagctgctgattttgttgaaagtaaggatgtttgcaaaaactatgctgaggcaaaggatgtcttcctgggcatgtttttgtatgaatatgcaagaaggcatcctgattactctgtcgtgctgctgctgagacttgccaagacatatgaaaccactctagagaagtgctgtgccgctgcagatcctcatgaatgctatgccaaagtgttcgatgaatttaaacctcttgtggaagagcctcagaatttaatcaaacaaaattgtgagctttttgagcagcttggagagtacaaattccagaatgcgctattagttcgttacaccaagaaagtaccccaagtgtcaactccaactctggtagaggtctcaagaaacctaggaaaaagtgggcagcaaatgttgtaaacatcctgaagcaaaaagaatgccctgtgcagaagactatctatccgtggtcctgaaccagttatgtgtgttgcatgagaaaacgccagtaagtgacagagtcaccaaatgctgcacagaatccttggtgaacaggcgaccatgcttttcagctctggaagtcgatgaaacatacgttcccaaagagtttaatgctgaaacattcaccttccatgcagatatatgcacactttctgagaaggagagacaaatcaagaaacaaactgcacttgttgagcttgtgaaacacaagcccaaggcaacaaaagagcaactgaaagctgttatggatgatttcgcagcttttgtagagaagtgctgcaaggctgacgataaggagacctgctttgccgaggagggtaaaaaacttgttgctgcaagtcaagctgccttaggcttataacatcacatttaaaagcatctcagcctaccatgagaataagagaaagaaaatgaagatcaaaagcttattcatctgtttttctttttcgttggtgtaaagccaacaccctgtctaaaaaacataaatttctttaatcattttgcctcttttctctgtgcttcaattaataaaaaatggaaagattct

SEQ ID NO: 355106 - DNA, 251 bp, Homo Sapiens
  misc_feature (113)..(115): n is a, c, g, or t
  misc_feature (122)..(122): n is a, c, g, or t
caaagcacagggaaaagaggcaaaatgatcacagaaatccgttttttagacaggtgtgacttacactaacgaaaaagaaaaacacatgaataagcttttaatcttcatttttnnnttttgtnatggtaggctgagatgcttttaaatgtgatgttataagcctaaggcagcttgactgcagcaacaagttttttaccctccttggcaaagcaggtctccttatgtagccttgcagcacttctctacaaaac

SEQ ID NO: 355107 - DNA, 597 bp, Homo Sapiens; identical to SEQ ID NO: 313152

SEQ ID NO: 355108 - DNA, 459 bp, Homo Sapiens; identical to SEQ ID NO: 252636
  misc_feature (264)..(280): n is a, c, g, or t

SEQ ID NO: 355109 - DNA, 651 bp, Homo Sapiens
cccagtaaggaaataagcactgttatgttccccattttacccatgaagcagctaaggattaaagttaaggaacttccccaaagtcatccacacctagtaaacagagcctagacttaaaccagggcagtctgataccaagacccacaccctaaaataggtatgttagtgccagaatcaaatacatcaattccagaaactagcgggaacactgacggtgatttttcagatttctcaaatttagtgtgttccaaaaggaacccttgcctcctccttccgccaacatatactccatttcaagaaagggccccaccatcctccagtctctcgtccagtatgctctcacttaggtaagcgctacgaggacaaggctctatttactttctacctagctaagaccttacacaaagcagatgctcatatttattgaaggaataaatgagggtaagagtggggtgttgatggcgcccctgccactgagaaaagaggagctggggtagagaagtggtcattcctaactggggatggtcaggagagccagatgctaggtattcctaaagcttccaaggtgaaggagaaacaactcacgccaaggtatctagcttcttactctgcaagaatgaggccataaaacccaatcagggaagggagaac

SEQ ID NO: 355110 - DNA, 434 bp, Homo Sapiens
agatcacgttacatctttgggtgaatgttcctgacttcgacaaccgccagctctggaagttgcacttcatcatgcttggctactccacgtctcctgagtcgggtcactcacaggggactgggtttagaggtctgctcctgtttacaatatagccaagctgagttgatggagaccttagcaaatgaacgacacaaagatttcactgttatgtcacctaataaccctagttggtatgggggctgagagaacaaattataatgattataatgattgaaagtaaacacctataaacacatttggagagagcacaccagtgatactgctagaccactgtgtgccagccttgctggatacagctctgttttcataccctggaaacacaagaattgagagatccagcaatgatcttatgccatcttgcagaaatcttaaac

SEQ ID NO: 355111 - DNA, 550 bp, Homo Sapiens; identical to SEQ ID NO: 252637

SEQ ID NO: 355112 - DNA, 1032 bp, Homo Sapiens
aaggaaattaaaaagaatggtgcccctcggagtttgcgagctgccctgtggaggtctgctgagctggctcacctggttcggcctcagaaatgcaggccttacctggtgaaccttctgccgtgcctgactcgaacaagcaagagacccgaagaatcagtccaggagaccttggctgcagctgttcccaaaattatggcttcttttggcaattttgcaaatgacaatgaaattaaggttttgttaaaggccttcatagcgaacctgaagtcaagctcccccaccattcggcggacagcggctggatcagcagtgagcatctgccagcactcaagaaggacacaatatttctatagttggctactaaatgtgctcttaggcttactcgttcctgtcgaggatgaacactccactctgctgattcttggcgtgctgctcaccttgaggtatttggtgcccttgctgcagcagcaggtcaaggacacaagcctgaaaggcagcttcggagtgacaaggaaagaaatggaagtctctccttctgcagagcagcttgtccaggtttatgaactgacgttacatcatacacagcaccaagaccacaatgttgtgaccggagccctggagctgttgcagcagctcttcagaacgcctccacccgagcttctgcaaaccctgaccgcagtcgggggcattgggcagctcaccgctgctaaggaggagtctggtggccgaagccgtagtgggagtattgtggaacttataggcaagttattagcaaggtctactcttacaattaactttgcagtaatactagttacactctattgattatgggcctgccctgtgctaagcagtctgcattccatcttccttgccaaaacttataatacaaatttcatctttattttataaataggggagttgggctgggtgtggtggctcacgcctgtaacttcagcactttggaaggatcgcttcagcccaggagtttgagacaacctggccaagtgagaccctgtctctacaaaagaaaaa

SEQ ID NO: 355113 - DNA, 2786 bp, Homo Sapiens
  misc_feature (648)..(648): n is a, c, g, or t
  misc_feature (778)..(778): n is a, c, g, or t
  misc_feature (2461)..(2461): n is a, c, g, or t
  misc_feature (2501)..(2502): n is a, c, g, or t
  misc_feature (2543)..(2543): n is a, c, g, or t
  misc_feature (2550)..(2550): n is a, c, g, or t
tctgcgtttctgcgtttccgcctttccttttagtttgtctcacgttttgcgtgggaggcggtcccgggatttcaggcgatctaccaggcatctcttatgagcgaatgcaacccgaagagagagtgagctgtatcttcagagttgtctccgtcatttccaagaacagaacaaaatgaacaaggtagatacagaagttccaggggtcagtatcatttaaagatgtgactgtgggcttcacccaggaggagtggcagcacctggaccctagtcagagggctctgtatagagatgtgatgctggagaactacagcaaccttgtctcagtggggtattgtgctcacaaaccagaggtgatcttcaggctggaacaaggagaagaaccatggagactggaggaagaattcccaagccagagctttccaggctcctcttggctatggtggtttcccagactttccttgctattggatgaccttgacagttatggagagaatcctggatagagaagtctggacagctgatcacctgaaagagaggagccaagaaaatcaatctaaacatttgtgggaagtatgtattcatcaataatgaaatgctgactaaggaacaaggtaatgtaataggaataccatttaacatggacgtaanttcttttccttccagaaaaatgttctgtcagtatgactcatgtggaatgagtttcaacactgtttcagaattggttatcagtaagataaactatttaggaaaaaagtctgacgaatttaatgcatgtggngaaattgttactcaatattaagcatgatgaaactcatactcgagagaaaaatgaagttttgaaaaataggaacactctgagtcatcgtgagaacactttgcagcatgagaagattcaaactttagaccacaattttgaatacagtatatgtcaggaaaccctccttgaaaaggcagtattcaatacacggaagagagagaatgcagaagagaataactgtgactataatgaatttgggagaactttctgtgatagttcatccctcttgttccatcagatacctccatcaaaggacagtcactatgaatttagtgattgtgagaagttcttatgtgtgaagtccaccctttctaaacatgatggggtacctgtgaaacactatgattgtggtgaaagtgggaataatttcaggaggaaattgtgtctgtcacagcttcagaaaggtgataaaggagagaaacactttgaatgtaatgaatgtgggaaagctttctgggagaagtcacatctcactcgacatcagagggtgcacacaggagagaaacactttcaatgtaatcaatgtggaaaaactttctgggagaagtcaaacctcactaaacatcagagatcacacacaggggagaaaccttttgaaatgcaatgaatgtgggaaagcctttagccataagtcagccctcacattacaccagagaacacatacagggggagaaaccctatcagtgtaatgcatgtgggaaaactttttaccagaaatctgacctcactaaacatcagagaacacacacaggggcagaaaacctatgaatgtaatgaatgtgaaaaatccttctgtatgaattcacacccttacagtacaccagagaactcacacaggtgaagaaaccttttgaatgtcttgagtgtgggaaatcctttagtcaaaagtcaaatcttacacagcatcagagaactcacataggagataaaccttatgaatgtaatgcatgtgggaaaactttctaccacaagtcagtactcaccaggcatcagataattcatacagggtggaaaccttatgaatgttatgaatgtgggaaaaccttctgcttgaagtcagacctcacaatacatcagagaacgcacacaggggagaaaccctttgcatgtcctgaatgtgggaaattctttagccataagtcaaccctctctcaacattatagaacacacacgggggagaaaccctatgaatgtcatgaatgtggaaaaatcttttacaataaatcatacctaacaaaacataatagaacacatacaggggagaaaccctatgaatgtaatgaatgtggaaaaaccttctgccagaagtcacaactcactcagcatcagagaattcacataggggagaaaccctatgaatgtaatgagtgtggaaaagctttctgccataagtcagctctaattgtacatcagagaacccatacacaagaaaagccttataaaatgtaacgaatgtggaaaatctttctgtgtaaaatcaggacttattttacatgagagaaagcacacggcggagaaaccctatgaatgcaatgaatgtgggaaatccttcaggcacaaatcatcactcacagtacatcacagggctcacacaggagagaaatcttgtcagtgtaatgaatgtggaaaaatcttttaccgtanatcagacctttgctaacatcagagatcacatacaggggannagccctatgaatggtacacatgcagggaaaccttctttcanaagtcanatctcattggtcttcgaggacccccatatgaggaaaacctatgattgatggatatagaaattccagcacagtcagcctcatattgctagaggcttacactggggagaaggctgtgacatctgaagttcatactatcacaactcgctatagtctcaagtacggagggaaaccatgactcacactatagaggctttgtagaaggattcgtgaattcaggtaactgctaaactccaatt

SEQ ID NO: 355114 - DNA, 1054 bp, Homo Sapiens
  misc_feature (10)..(10): n is a, c, g, or t
  misc_feature (16)..(16): n is a, c, g, or t
  misc_feature (18)..(18): n is a, c, g, or t
  misc_feature (22)..(22): n is a, c, g, or t
  misc_feature (37)..(37): n is a, c, g, or t
  misc_feature (40)..(40): n is a, c, g, or t
tcactatagnctgaantncaancctccatccactctnctntgcaaatttagcaacatcttctttccagttcattttccgatagttaatagtaatggagtaataatgtctgtttagtccatgaattaatgcctggatagatggcttgtttaagtgacccagattcgaagttgtttgtcttggttcatgtcctaagaccatcatattagcattgatcaatctgaaggcatcaataacaaccctttccttttacactctgaaggggatccacaaccactgccacagctctctccgacaaggcttcaaagctctgctgagtgttgatatccacaccagaaagccaacaaccaaagccagggtgactgtgataccaaccaacaaccatctccggccttcctgtctgcttcaacatatccaacattttagcttggaacactggatcaactgcctccacactgacacctgttcctgactgtggcatagcaaacacatcaatcactctgacggtataatcatcaacaaattctccaagcatcaaacccataacttccattggaactccagcacggccatgttttaacatttttaacagtgccagggaagagatatagacttgttctgctgtgtccactgcaggagcatctgtaggtggcccctggcccagtccaggcatacctcctccaagtctaagaagtctgtccatatttctggtcagtaactacaactcttaaggtgttaaccttcaatttgttgagtttgacaaatgtcttcttaaagaaagctcttgctaattctggcaggtacaacttccccaagtatattttattttttctttctctcctgaagacgggcgggagccggatgccgcgatatggacccttgtcttgcctctgtggtgacgcgaagacagaggcaacagcagcagcggcgcacacccgacgcggctctgtctgcaaaccggcgatgaatcagcccgattccattcaaaagagttgcccgggcctccgccgcgaagcccgctctcgacgaattcgagctcggccgatttggcctgat

SEQ ID NO: 355115 - DNA, 2050 bp, Homo Sapiens
  misc_feature (1623)..(1623): n is a, c, g, or t
  misc_feature (1994)..(1994): n is a, c, g, or t
cctgggtggcgaattcggcacgaggagactgagccgcgtcgggtgtgcgccgctgctgctgttgcctctgtcttcgcgtcaccacagaggcaagacaagggtccatatcgcggcatccggctcccgcccgtcttcaggagagaaagaaaaataaaatatacttggggaagttgtacctgccagaattagcaagagctttctttaagaagacatttgtcaaactcaacaaattgaaggttaacaccttaagagttgtagttactgaccagaaatatggacagacttcttagacttggaggaggtatgcctggactgggccaggggccacctacagatgctcctgcagtggacacagcagaacaagtctatatctcttccctggcactgttaaaaatgttaaaacatggccgtgctggagttccaatggaagttatgggtttgatgcttggagaatttgttgatgattataccgtcagagtgattgatgtgtttgctatgccacagtcaggaacaggtgtcagtgtggaggcagttgatccagtgttccaagctaaaatgttggatatgttgaagcagacaggaaggccggagatggttgttggttggtatcacagtcaccctggctttggttgttggctttctggtgtggatatcaacactcagcagagctttgaagccttgtcggagagagctgtggcagtggttgtggatcccattcagagtgtaaaaggaaaggttgttattgatgccttcagattgatcaatgctaatatgatggtcttaggacatgaaccaagacaaacaacttcgaatctgggtcacttaaacaagccatctatccaggcattaattcatggactaaacagacattattactccattactattaactatcggaaaaatgaactggaacagaagatgttgctaaatttgcataagaagagttggatggaaggtttgacacttcaggactacagtgaacattgtaaacacaatgaatcagtggtaaaagagatgttggaattagccaagaattacaataaggctgtagaagaagaagataagatgacacctgaacagctggcaataaagaatgttggcaagcaggaccccaaacgtcatttggaggaacatgtggatgtacttatgacctcaaatattgtccagtgtttagcagctatgttggatactgtcgtatttaaataaagcaacgaaaaacgctattaatgatgccttcagtgtatattcctctgttgttcctaatgctcaaaatcaagggacctctgaaggtgtacttggctaaatgtaagacatctggcatcatttgcagcactgtaacaccttcagtctcagttgtgcaattacttctgtttctttagtcagggtctttgcagattctaaagttatacatgaatacatcaaagtggacaaattttgttaagatcccatttaatatttgaaaaaatcagtagcacaaatatattttgattgtcacttacaaaataaaatacatttaccagtccccacaaacaccaccctaaccacacgccacttgcccggcccccctccggccctcgaacaactttctctaaacccatctcgttgggcgtgcccgggcccagntacgccaagcgccaccatgccccatcaccctggttttccctaaggaaaatctttggcccatgcactaccggccttggcattcctccccaattaacaaaaaccccccggcgcccaaccccaccggttctgaacaaactgcccaatgggaccttctaaaggcctttacctggcatttttccccccgtattcccaaaccgaccctcgatttcaaattcacctgcctcccccccgtaaacccccttcgaacccctggtggccccttcctttaatacctttcctcctcaactatggcaatccctccccaaaccgttttctgatgacaccctcacactcgctagccccgcctctacggcccctgtttacccccccgnatttataacttgcgcccctatggccgaaaaacacgggcgcaaatacaaacttgtat

SEQ ID NO: 355116 - DNA, 1615 bp, Homo Sapiens
agcgggggtttttaaggccgaaccctaggcaggctctgcagaggcagcggttggaggcgcggtgggtgtctgcgggggtctcgcggggcggctgcggtgtttcaccgggaaaggctcgaggagagcgcggctcacgagagataacccagctgtgctccctggaaccttcaatttcaaggcctccctgcctctactaggcgccttagctcactatggggaaccacttgactgagatggcgcccactgcctcctccttcttgccccacttccaagccctgcatgtcgtggtcattgggctggactctgctggaaagacctccctcctttaccgcctcaagttcaaggagtttgtccagagtgtccccaccaaaggcttcaacaccgagaagatccgggtgcccctcgggggatcgcgtggcatcaccttccaagtgtgggacgtcggggggcaggagaagctgcgaccactgtggcgctcttatacccgccggacagacggtctagtgtttgtggtggacgctgcggaggctgagcggctggaggaagccaaggtggagttgcaccgaatcagccgggcctcggacaaccagggcgtgccagtgctggtgctggccaacaagcaggaccagcccggggcactgagcgctgctgaggtggagaagaggctggcagtccgagagctagcagccgccactctcactcatgtgcaaggctgcagcgctgtggacggtctgggcctgcagcagggccttgagcgcctctatgagatgatcctcaagaggaagaaggcagctcggggtggcaagaagagacggtgacccaagccccccctccctttcctcccacctagtaggggtctgcacacttggacagcagggtgggaccagcctgtgacctctcagtcagactggggtgcaggacctgtccacctcaatgaaggagagaggagcatggggtgtcccgttttggtgccacactggggtggggatgggagatgggatgtctttgcatatctctctcatcctctctggagaagtgggcgctgcaggactgtggagacgtaaatgtaaactgtgactctacctcgaccctgtttcttatttttcttctctggctaaaaatttttaattggatgtgtttgggggcggggggatggaagtgacttggagaatgtgtttgggatgaaataactatctccccttcctctgtcccccaactggggagtctccccaggctgcttttctaggaataccagtcacatagtttttatttttgtgtctgtgaaagtgccaagaacccctccccacatttgtagatccatgaccctttttataagctgtgtgtgtcctctgtattattgttattaactattttttagcatttgcctgtaagttattaaagactgataactgtagctcttaccttggtctggggcattttcctctccttatcttgccccagagacaattcaagatttctatatggggttgtggcgcagggggagggagatttatcttgaagctgaatttgcaaagcaagcacatataaaaattagattgtgtgttacgggatggcctgtgaaaattataggggggagtggaaaacccctcaagct

SEQ ID NO: 355117 - DNA, 490 bp, Homo Sapiens
aggaaccatggggtgtccccgtttttggtgcccaaactggggtggggaagggaaaagggaagtccttgccaaaactctcctcaaccctctcgggagaaagtgggcgctgccaggactgtggaagacgtaaatgtaaactgtgactctacctcgaccctgtttccttaattttccttctctggcttaaaaatttttaattggatgtgtttgggggcggggggatggaagtgacttggagaatgtgtttgggatgaaataactatctccccttcctctgtccccccaactggggagtctccccaggctgcttttctaggaataccagtcacatagtttttatttttgtgtctgtgaaagtgccaagaacccctccccacatttgtagatccatgaccctttttataagctgtgtgtgtcctctgtattattgttattaactattttttagcatttgcctgtaagttattaaagactgataactgtagctctt

SEQ ID NO: 355118 - DNA, 1045 bp, Homo Sapiens
caggcaggcccagaagctgggcagcctctgccgggttccgggaaaaggagctcctgctgccactgctcttccggagcctgcagcatggggcccctgccgcgcaccgtggagctcttctatgacgtgctgtccccctactcctggctgggcttcgagatcctgtgccggtatcagaatatctggaacatcaacctgcagttgcggcccagcctcataacagggatcatgaaagacagtggaaacaagcctccaggtctgcttccccgcaaaggactatacatggcaaatgacttaaagctcctgagacaccatctccagattcccatccacttccccaaggatttcttgtctgtgatgcttgaaaaaggaagtttgtctgccatgcgtttcctcaccgccgtgaacttggagcatccagagatgctggagaaagcgtcccgggagctgtggatgcgcgtctggtcaaggaatgaagacatcaccgagccgcagagcatcctggcggctgcagagaaggctggtatgtctgcagaacaagcccagggacttctggaaaagatcgcaacgccaaaggtgaagaaccagctcaaggagaccactgaggcagcctgcagatacggagcctttgggctgcccatcaccgtggcccatgtggatggccaaacccacatgttatttggctctgaccggatggagctgctggcgcacctgctgggagagaagtggatgggccctatacctccagccgtgaatgccagactttaagattgcccggaggaagcaaactcttcgtataaaaaaagcaggccatctgcttaacccttggctccaccataaggcactgggactcggatttctctatctgatagaggtattttctgtggccctgggagctgtctgtctttcccctacccccaaggatgccaggaagacgtccaccattagccatgtggcaacctttacttctatgcctcacaagtgcctttcagagagccccaattctgctttcccacaaaataaacctaatgccatcaggcaagacgaa

SEQ ID NO: 355119 - DNA, 1096 bp, Homo Sapiens
  misc_feature (858)..(858): n is a, c, g, or t
gctggaccggtccggaattcccgggatagcctgcagcatggggcccctgccgcgcaccgtggagctcttctatgacgtgctgtccccctactcctggctgggcttcgaggtgacgctgggaggggtcgcctcggcagtgtctggggagtgagggcggagggaagagtgagcgcagggctccgggacagaggtctcgtgtaactcctggcgccgcccaaggggttaaggcaagcagggagagctccggggctgaaggtcactttgtgcttttaaacggaatagagtcgctggctccaacccgagcctttatatcccgactgcagtttcccacggtggtggaaagaggggcggctccaaacattcagggagaaatgcagaacacggccacctcttagcccaacgatggcagttttggggaaaactggccacaggagcgaagatcctggaatagatttctagtagtgaggagagttttgccaatttcaaaccaaacaatgtagggtgtccgcataacccctgctctgcacttagcgcctcccttccctttccctcggctctttcacttttccatcttgcacactggcaatcgttcttgacctctgcccgcagatcctgtgccggtatcagaatatctggaacatcaacctgcagttgcggcccagcctcataacagggatcatgaaagacagtggaaacaagcctccaggtctgcttccccgcaaaggactatacatggcaaatgacttaaagctcctgagacaccatctccagaatcccatccacttccccaaggatttcttgtctgtgatgcttgaaaaaaggaagtttgtctgccatgcgtttccctcaccgccgtgnaacttgggagcatccagagatgctgggagaaagcgtccccgggcagctgtgggatgcgcgtctggttcaaggggtgaaatgtgggggctctggggaattccctctggggaagaacctggggatggacttttctgaacttccccccaggcacggtttttcaggggtcatgaatcctgccccccgcccccggggggaatctactggccccttcccaggtaaaaccccccttttccccgaa

SEQ ID NO: 355120 - DNA, 842 bp, Homo Sapiens
tgggcagcctctgccgggttccgggaaaaggagctcctgctgccactgctcttccggagcctgcagcatggggcccctgccgcgcaccgtggagctcttctatgacgtgctgtccccctactcctggctgggcttcgagatcctgtgccggtatcagaatatctggaacatcaacctgcagttgcggcccagcctcataacagggatcatgaaagacagtggaaacaagcctccaggtctgcttccccgcaaaggactatacatggcaaatgacttaaagctcctgagacaccatctccagattcccatccacttccccaaggatttcttgtctgtgatgcttgaaaaaggaagtttgtctgccatgcgtttcctcaccgccgtgaacttggagcatccagagatgctggagaaagcgtcccgggagctgtggatgcgcgtctggtcaagggtgagtgtggggctctgggaatcctctgggaggaccttggatgactttctgaccttccccaggcacgttttcagggtcatgatcctgcccccgcccgggggatctactgtcctcccagtcacacccctctccccgcaccgccttcatgctgtcttctcttcttcccagaatgaagacatcaccgagccgcagagcatcctggcggctgcagagaaggctggtatgtctgcagaacaagcccagggacttctggaaaagatcgcaacgccaaaggtgaagacaccagctcaaggagaccactgaggcagcctgcagatacggagcctttgggctgcccatcaccgtggcccatgtggatggccaaacccacatgttatttggctctgaccgg

SEQ ID NO: 355121 - DNA, 1804 bp, Homo Sapiens
  misc_feature (17)..(17): n is a, c, g, or t
  misc_feature (1614)..(1614): n is a, c, g, or t
tgtggctgaagagctgnacctccacgggccagccccagttcccaccaacctgcacctttccgtgtccatggacagggacacagaccaggcactgttgacgctgctgcaaggcaaacgttttcaaaacctcgattccattatcatttactgcaaccggcgcgaggacacagagcggatcgctgcgctcctccgaacctgcctgcacgcagcctgggtcccagggtctggaggtcgtgcccccaaaaccacagccgaggcctaccacgcgggcatgtgcagccgggaacggcggcgggtacagcgagccttcatgcagggccagttgcgggtggtggtggccacggtggcctttgggatggggctggaccggccagatgtgcgggctgtgctgcatctggggctgcccccaagcttcgagagctacgtgcaggccgtgggccgggccgggcagtgacgggcagcctgcccactgccacctcttcctgcagccccagggcgaagacctgcgagagctgcgcagacatgtgcacgccgacagcacggacttcctggctgtgaagaggctggtacagcgcgtgttcccagcctgcacctgcacctgcaccaggccgccctcggagcaagaaagggccgtgggtggggagaggcctgtgcccaagtacccccctcaagaggctgagcagcttagccaccaagcagccccaaggacccagaagggtctgcatgggccatgagcgggcactcccaatacagcttaccgtacaggctttggacatgccggaggaggccatcgagactttgctgtgctacctggagctgcacccacaccactggctggagctgctggcgaccacctatacccattgccgtctgaactgccctgggggccctgcccagctccaggccctggcccacaggtgtccccctttggctgtgtgcttggcccagcagctgcctgaggacccagggcaaggcagcagctccgtggagtttgacatggtcaagctggtggactccatgggctgggagctggcctctgtgcggcaggctctctgccagctgcagtgggaccacgagcccaggacaggtgtgcggcgtgggacaggggtgcttgtggagttcagtgagctggccttccaccttcgcagcccgggggacctgaccgctgaggagaaggaccagatatgtgacttcctctatggccgtgtgcaggcccgggagcgccaggccctggcccgtctgcgcagaaccttccaggcctttcacagcgtagccttccccagctgcgggccctgcctggagcagcaggatgaggagcgcagcaccaggctcaaggacctgctcggccgctactttgaggaagaggaagggcaggagccgggaggcatggaggacgcacagggccccgagccagggcaggccagactccaggattgggaggaccaggtccgctgcgacatccgccagttcctgtccctgaggcccagaggagaagttcctcccagcagggctgtggcccgcatccttcccacggcatcggaagcccctgctacccggcccaggtgtacgggcaggaccgacgcttctggagaaaatacctgcacctgagccttnccatgccctggtgggcctggccacggaagagctcctgcaggtggcccgctgactgcactgcattgggggatgtcgggtagagctggggttgtcagaggctagggcagtgactgaggacctgggcaaaacctgccacagggtgtgggaacgaggaggctccaaaatgcagaataaaaaatgtctcactttg

SEQ ID NO: 355122 - DNA, 2129 bp, Homo Sapiens
  misc_feature (790)..(790): n is a, c, g, or t
agagactggatggctacgtcttggaaggccggcaaggctcccagggctgggaggtgctggacccggctgtggcaggcacagaaacagagctgctggtgccaggcctcatcaaggatgttctctacgagttccgcctcgtggccttcgcgggcagcttcgtcagcgaccccagcaacacggccaacgtctccacttccggtctggaggtctacccttcgcgcacgcagctgccgggcctcctgcctcagcccgtgctggccggcgtggtgggcggagtctgctttctgggagtggccgtccttgtgagcatcctggccggctgcctcctgaaccggcgcagggctgcccgccgccgccgcaagcgcctccgccaagatccacctcttatcttctctccgaccgggaagtcagctgcaccgtaagtgcctccacctccttggctttcttctgcctttccattgtacgtgccagtatcttctgcttccttttttgcatctttaccagggggatgttgggtgttggggaggaacaaaagtgggagagggtaagaaggggtgtgcagtggccccagcctgaggccgttccagtatggcctgtgccttccctccacccctccaccttgttggtcctttcctcgcttgttctccctagctctgctctgttgttcaccaaacctctcaaggcctgacgctggctcctgggagggggacctgcccctaccacagaccctgatctcctgtccttccccagctctgctctgggctcaggcagtcctgacagcgtggcgaantgtaagctccagggatccccagtccccagcctgcgccagagtctgctctgggggggatcctgccggaactcccagcccccacccggatcctccatctagccggggacccttacctctggagcccatttgccggggcccagacgggcgctttgtgatggggcccactgtggcggccccccaggaaaggtcaggccgggagcaggcagaacctcggactccagcccagcgtctggcccggtcctttgactgtagcagcagcagccccagtggggcaccccagcccctctgcattgaagacatcagccctgtggcaccccctccagcagccccacccagtcccttgccaggtcctggacccctgctccagtacctgagcctgcccttcttccgagagatgaatgtggatggggactggcccccgcttgaggagcccagccctgctgcacccccagattacatggatacccggcgctgtcccacctcatctttccttcgttctccagaaacccctcctgtatcccccagggaatcacttcctggggctgtggtaggggctggggccactgcagagcccccttacacagccctggctgactggacactgagggagcggctgctgccaggccttctccctgctgcccctcgaggcagcctcaccagccagagcagcgggcgaggcagcgcttcgttcctgcggcccccctccacagccccctctgcaggaggcagctacctcagccctgctccaggagacaccagcagctgggccagtggccctgagagatggccccgaagggagcatgtggtgacagtcagcaagaggaggaacacatctgtggacgagaactatgagtgggactcagaattccctggggacatggaattgctggagactttgcacctgggcttggccagctcccggctcagacctgaagctgagacagagctaggtgtgaaaactccagaggagggctgcctcctgaacactgcccatgttactggccctgagtgcccgctgtgctgcccttccggaggaaatcctggccttccgccgccgccgagatgctactagggctcggctaccagcctatcgacagccagtcccccacccccaacaggccactctgctgtgaacgtccctaatgtgaagctgtgaaaaagcatatggaccttgcaaggaggcccccaccccagacagactagtttcaaacgaggggcactgcccttgcttgcccttagtgccaagcacagaccctggtaatgggtaggtcaccttggtaatgaaagatggctgaccccctaagggagcctgggattgaacagggaactaagcttgctc

SEQ ID NO: 355123 - DNA, 401 bp, Homo Sapiens
ttcccgggatgaaaactccagaggagggctgcctcctgaacactgcccatgttactggccctgaggcccgctgtgctgcccttcgggaggaattcctggccttccgccgccgccgagatgctactagggctcggctaccagcctatcgacagccagtcccccaccccgaacaggccactctgctgtgaacatccctaatgtgaggctgtgaaaaggcatatggacctgcaaaggaggcccccaaccagacagacctagtttcaaacgagggcactgcccctgcctgcccctttggtgcccaggcacagaccctgatagtgggtttgggtcaccttggtatggaatgtatgtgctgaccccctaggtgagtctggggattggaacagggatcttaggtctgc

SEQ ID NO: 355124 - DNA, 973 bp, Homo Sapiens
tacaaattgcatcaccctcctcctctgcccagacctgggggctccaacacctttcgctaggtctggctctggcctctgagcgaaccttccgtacagtatggcggctcccgaagccccgcccctggacagagttttccgtacaacatggctgtctacagagtgcgattcccacccacttccgcctagctaccggaagtttctatttgaaacccaggcggccgacttagccggtggcacgacagttgctgcagggaatcttttaaacgagagcgagaaggactgcgggcaggaccggcgggctcctggggttcagccgtgccgcctcgttacgatgaccagtgtggttaagacagtgtatagcctgcagcccccctctgcgctgagcggcggccagccggcagacacacaaactcgggccacttctaagagtctcttacctgttaggtccaaagaagtcgatgtttccaaacagcttcattcaggaggtccagagaatgatgttacaaaaatcaccaaactgagacgagagaatgggcaaatgaaagctactgacactgccaccagaaggaatgtcagaaaaggctacaaaccactgagtaagcaaaaatcagaggaagagctcaaggacaagaaccagctgttagaagccgtcaacaagcagttgcaccagaagttgactgaaactcagggagagctgaaggacctgacccagaaggtagagctgctggagaagtttcgggacaactgtttggcaattttggagagcaagggccttgatccagctttaggcagtgagaccctggcatcacgacaagaatccactactgatcacatggactctatgttgctggtagaaactttgcaagagggagctgaagcttgttaacgaaacagccaaaaagcagatggagggagttacaggccttaaaggtaaagctggagatgaaagaggaaagagtccgattcctagaac

SEQ ID NO: 355125 - DNA, 981 bp, Homo Sapiens
actgtctttaagttctactgtagaaattgttttccattctggagatggtgagtccccagaagatccatggccaaggatgatgtcctaagtagcttcctctgagattttatgccccaagagggagcccatctggccacttgcttctttcttacatttctaatagctgctccatttccttaaggggctgttgttaaatcatttacttgattgttacataaggtttgctgttctaggaatcggactctttcctctttcatctccaagctttacctttaagggcctgtaactcctcccatctgctttttggctgtttcgttaaaaagcttcagctcctcttgcaaagtttctaacagcaacatagagtccatgtgatcagtagtggattcttgtcgtgatgccagggtctcactgcctaaagctggatcaaggcccttgctctccaaaattgccaaacagttgtcccgaaacttctccagcagctctaccttctgggtcaggtccttcagctctccctgagtttcagtcaacttctggtgcaactgcttgttgacggcttctaacagctggttcttgtccttgagctcttcctctgatttttgcttactcagtggtttgtagccttttctgacattccttctggtggcagtgtcagtagctttcatttgcccattctctcgtctcagtttggtgatttttgtaacatcattctctggacctcctgaatgaagctgtttggaaacatcgacttctttggacctaacaggtaagagactcttagaagtggcccgagtttgtgtgtctgccggctggccgccgctcagcgcagaggagggctgcaggctatacactgtcttaaccacactggtcatcgtaacgaggaggcacggctgaaccccaggagcccgccggtcctgcccgcagtccttctcgctctcgtttaaaagcctcgtgccgaattcgccacccaggcctcgctaccta

SEQ ID NO: 355126 - DNA, 1131 bp, Homo Sapiens
catgccagtgtgctgttccacctgtccatagtgtgtagtcaccgttgatctctcgaaagccgcacggcgttcctcgaggtgtcgtcattcggcggctctcgcctccccgagttggctgcgtgacattttggacacctgtttgcatgtttgggaaccacggccgttgacccagcctagccagcgtgaccctggcttccgacagaatccactactgctcacatctgaactctatgctgctgtctacaactttgcaagaggagctgagctttctaacgaacatcctcagagcagatggaggactacaggccttaaggtaaagctggagatgaaagaggaaagagtccgattcctagaacagcaaaccttatgtgaacaatcaagtacatgatttaacaacagcccttaaggaaatggagcagctattagaaatgtaagaagaagcaagtggccagatggctccctcttgggcataaaatctcagaggaagctacttaggacatcatcttggccatgatcttctgggactcaccatctccagaatgaaaacaatttctacagtagacttaaggacagtttatgctgaaatggcaattccgcatttaagcaagttttcccaaccttcaggttggtcagccctcctgagcctcacaggtggataattgaggcctacaagagaggggagcctaggagcttggattgaccttctagtcaaccacctgacttcagcacaccattacaatcgggagactaaaccaacaaccagaggatctaaaatgtcacattcagattttcaggaagaaaatcttcattacagtggagcacaaatgttccatacaagacatcattgaggagccatgctgtccccttctaacctgaaacacattctttcccatcctggttgggcttctgtacctccttattaatttatgaacctgaagttgcttgaagtgttttgggcttaataaatggggtgaaagtataggtagcagtaacacctacatgaaacaatacaccttggatcttttaatctaaattacttttcttttttaagtctacttttaaaataaatacttctgtaaatattctgactgtaacattgaggaatgaaaatagccttttaacctaaaaaaa

SEQ ID NO: 355127 - DNA, 761 bp, Homo Sapiens
  misc_feature (648)..(648): n is a, c, g, or t
agttgaagagtcttaacctttccaataatcatttaggggacttccctctggcagtctgcagtattccaaccctggcagagctgaacgtgtcctgcaatgccctgcgatcagtcccggcagccgttggagtgatgcacaacttacagacatttttgttggatggaaactttctccaatcccttcctgctgagttggagaacatgaagcagcttagttatctgggtctttctttcaatgaatttactgacattcccgaagtattggagaaattgactgctgtggataaactttgtatgtctggaaactgtgtggagacccttaggctacaggctttaagaaaaatgcctcacattaaacatgtggatctaaggttgaacgtaattaggaagctgatagcagatgaagtggactttctacagcatgttactcagcttgacctacgagacaataagcttggtgatctagatgctatgattttcaacaacattgaagttttacactgtgaaaggaatcaactggtcacattagacatctgtggctatttcctaaaagcgctctatgcctcttctaatgaacttgttcaacttgatgtttacccagttccaaattatctgtcctacatggatgtttcaaggaaccgcttagaanatgtgccttgatgggtatgtgaaagccgaaagctagaagttttggatattggccataatcaaatatgggactttctgcccgcttatttgtaaagcaggcttcgaaactactga

SEQ ID NO: 355128 - DNA, 1023 bp, Homo Sapiens
  misc_feature (879)..(879): n is a, c, g, or t
  misc_feature (960)..(960): n is a, c, g, or t
  misc_feature (963)..(963): n is a, c, g, or t
agactagaacagctggaaaaagaaaataaatcattagagcaagagacttctcaactggaaaaggataagaaacaattggagaaggaaaataagagactccgacaacaagcagaaattaaagataccacattagaagaaaataatgtgaagattggaaatttggaaaaagaaaacaaaaccctatccaaagaaattggtatatataaagaatcttgtgtccgtctggaagaactagaaaaagaaaataaggagcttgtgaaaagagcaactattgatataaaaacgttggttacactacgtgaggatttggtgagtgaaaagttgaagacccaacagatgaacaatgatctcgaaaaattaactcatgagcttgagaagatagggttaaataaggagcgactcttacatgatgaacaaagtactgatgacagtaggtataaacttttggaatcaaaattagaatccactcttaagaagtctcttgaaataaaagaagaaaaaattgctgctttagaagctcgattagaagaatccacgaattataaccagcaattgcgccaagaacttaaaacagtgaaaaaaaattatgaagctctcaaacagagacaagatgaggaaaggatggtacagagctctcctccaatatctggtgaagacaacaaatgggagcgagaaagtcaagaaacgactagagaacttctgaaagttaaagacagattaattgaagtagaaagaaataatgctacactgcaagcagagaagcaagcgttgaaaactcaactgaagcaacttgagacacagaacaataatttgcaggctcagattcttgcacttcagaggcagacagtgtcattacaaagacagaataccactcttcanacacagaatgccaagcttcaggttgaaaattccaccctttaattccaaagtacctcactcatgaaccagaatgcccaactnctnatccagcagtcttttctttatgaaatgaaaatgaatcttgtaatcaaagaagcaagaaga

SEQ ID NO: 355129 - DNA, 930 bp, Homo Sapiens
tgcagcttctggactctgtgaggcctgaggcccaggccagagatcagcttctggacgataaagcacaggccttgctgtggctttacatctgtactctggaagccaaaatgcaggaaggtatcgagcgggatcggagagcccaggcccctggtaactctggaggaatttgaagtcaatgacctgaactatgaagataaactccaggaagatcgtttcctatacagtaacattgccttcaacctggctgcagatgctgctcagtccaaatgcctggaccaagccctggccctgtggaaggagctgcttacaaaggggcaggccccagctgtacggtgtctccagcagacagcagcctcactgcagatcctagcagccctctaccagctggtggcaaagcccatgcaggctctggaggtcctcctgctgctacggattgtctctgagagactgaaggaccactcgaaggcagctggctcctcctgccacatcacccagctcctcctgaccctcggctgtcccagctatgcccagttacacctggaagaggcagcatcgagcctgaagcatctcgatcagactactgacacatacctgctcctttccctgacctgtgatctgcttcgaagtcaactctactggactcaccagaaggtgaccaagggtgtctctctgctgctgtctgtgcttcgggatcctgccctccagaagtcctccaaggcttggtacttgctgcgtgtcaggtcctgcagctggtggaagcttaccttagcctcccgtcaaacaactctcacactccctgtgggagcagtctgtgccaaaggtggcagacacctgagatagctctcatagactcccataagctcctccgaagcatcatcctcctgctgatgggcagtgacattctctcaactcaagaaagcagtgtggaga

SEQ ID NO: 355130 - DNA, 1610 bp, Homo Sapiens
aggtagcgaggcctgggtggcgaattcggcacgaggcttagcaaggcaccagaatttgaggacagcgaggaggtccggaggatctggaaccgagcaatacctctctgggagctgcctgatcaggaggaggttcagctggctgatacaatgtttggccttaccaaggttacagatgacacactcaagcgtttcagtgtgcgatatctgcgacctgctcgcagtcttgtcttcccttggttctcccctgggggctcaggattacgaggcctgaagctcctagaggctaaatgccagggggatggagtgagctacgaggaaaccactattccccgacccagcgcctaccacaatctgtttggattaccactgattagtcgtcgagatgctgaggtggtactgacgagtcgtgagcttgacagcctggccttgaaccagtccacggggctgcctacccttactctaccccgaggaacgacctgcttaccccctgccttactcccttacctggaacagttccggcggattgtattctggttgggggatgaccttcggtcctgggaagccgccaagttgtttgcacgaaaactgaaccccaaacgatgcttcttggtgcgaccaggagaccagcaaccccgtcccctggaggccctgaacggaggcttcaatctttctcgtattcttcgtaccgccctgccctgcctggcacaagtccatcgtatctttccggcagcttcgggaggaggtgctaggagaactgtcaaatgtggagcaagcagctggcctccgctggagccgctttccagacctcaatcgtatcttgaagggacatcgaaagggcgagctgacggtcttcacagggccaacaggcagtggaaagacgacattcatcagtgagtatgccctggatttgtgttcccagggggtgaacacactgtggggtagcttcgagatcagcaatgtgagactagcccgggtcatgctgacacagtttgccgaggggcggctggaagatcaactggacaaatatgatcactgggctgaccgctttgaggacctgcccctctatttcatgactttccatggacagcaaagcatcaggactgtaatagatacaatgcaacatgcagtctacgtctatgacatttgtcatgtgatcatcgacaacctgcagttcatgatgggtcacgagcagctgtccacagacaggatcgcagctcaagactacatcatcggggtctttcggaagtttgcaacagacaataactgccatgtgacactggtcattcacccccggaaagaggatgatgacaaggaactgcagacagcgtccatttttggctcagccaaagcaagccaggaagcagacaatgttctgatcctgcaggacaggaagctggtaaccgggccaagggaaacggtatctgcaggtgtccaagaaccgcttttgatgggagatgtaaggtgtccttccccgcttgagttcaacaagaaactcccctcacctttcttccattccacccaaagcaacaagggccccggctccaagaaagatcaagggaatgaacactggcaacacactggccccaagaaaggccactcctttccggggc

SEQ ID NO: 355131 - DNA, 1664 bp, Homo Sapiens
  misc_feature (128)..(186): n is a, c, g, or t
  misc_feature (1523)..(1523): n is a, c, g, or t
  misc_feature (1526)..(1526): n is a, c, g, or t
  misc_feature (1537)..(1537): n is a, c, g, or t
  misc_feature (1565)..(1565): n is a, c, g, or t
  misc_feature (1578)..(1578): n is a, c, g, or t
  misc_feature (1582)..(1582): n is a, c, g, or t
  misc_feature (1584)..(1584): n is a, c, g, or t
  misc_feature (1588)..(1588): n is a, c, g, or t
  misc_feature (1597)..(1597): n is a, c, g, or t
  misc_feature (1599)..(1599): n is a, c, g, or t
  misc_feature (1605)..(1605): n is a, c, g, or t
  misc_feature (1607)..(1607): n is a, c, g, or t
  misc_feature (1609)..(1609): n is a, c, g, or t
  misc_feature (1611)..(1611): n is a, c, g, or t
  misc_feature (1615)..(1615): n is a, c, g, or t
  misc_feature (1619)..(1619): n is a, c, g, or t
  misc_feature (1624)..(1624): n is a, c, g, or t
  misc_feature (1630)..(1630): n is a, c, g, or t
  misc_feature (1643)..(1643): n is a, c, g, or t
  misc_feature (1647)..(1647): n is a, c, g, or t
  misc_feature (1649)..(1649): n is a, c, g, or t
  misc_feature (1653)..(1653): n is a, c, g, or t
  misc_feature (1657)..(1657): n is a, c, g, or t
  misc_feature (1663)..(1664): n is a, c, g, or t
ttatttcaacgggaaaaaagtgagttaaaggctaaagaattttagactcacaataataaaggtattttccctgcaatcctttctataattaaaatgtgtctatagctatgtgtgtattttgttgttgnnnnnnnnnnnnnnnnnnnnnnnnnnnnnnnnnnnnnnnnnnnnnnnnnnnnnnnnnnntttacttttaagtaaacctctcaggagcttcccctctgtcaccagtggcctcgaccttccaaccccccagtgcacagcagactgtcactgcacaggcaccccagcccacccacagatcacaccccagcccgctgacagatcacaccccagcccgctgacaggtcccaccgcagcccaccaacagatcccaccccggcccgcggacagatcacaccccagcccggcccgcggacagatcacaccccagcccgacagatcacactgcagcccaccaacagatcacaccctggcccatagacagatcacaccccagcctgctgacagatcaccacataggcaccccagcccgccgacggatcaccacacaggcagccagcccaccggcaggctgtggagtgatctgtcggtggccggctagatatggcgtcctctttgcttgcgggcgagcgattggtgcgtgctttgggccccggcggggagctggagccagagcggctaccccgaaagctgcgggccgagcttgaggccgcgctggggaagaagcacaagggcggtgatagctccagtggcccccaacgcttggtttctttccgtctcatccgggatctgcaccagcatctgagagaaagggattccaaactatacctccatgagctcctagaaggcagtgaaatctatctcccagaggttgtgaagcctccacggaacccagaactagttgcccggctggagaagattaagatacagctggccaatgaggaatataaacggatcacccgcaacgtcacttgtcaggatacaagacatggtgggactctcagcgacctgggaaagcaagtgagatcattgaaggctctggtcatcaccatcttcaatttcattgtcacggtggttgctgccttcgtctgcacttaccttggaagccaatatatcttcacagaaatggcctcgcgggtgctagctgcattgatcgtcgcctctgtggtgggtctggccgagctgtatgtcatggtgcgggcaatggaaggcgagctgggagaactgtaactggtgcttcatcatcaagtctagagaagactttgggggcttcaggctccaattggcagtcaccgactcagtcaacccatcagacttttggtattcagctccagttagtcagaagaccagcccaggccagctgctgtttctgtgggggagccctaatcttctgtgaatttccaaagggagcattggaggagatcgagataacacatctttaaaacagaaagaactggtcttggtctatcaagtacctctccctgaatctggtaccaatctgccttctccagttcattctnaanactgctggganaggggttttccatcaggagcaaatgganccaggccttccanaagnanacanactgccttnanttgtcntntntnaaantaanacaanttttcnaacattttaatgnaacngnaatnagtnaaagcnn

SEQ ID NO: 355132 - DNA, 1426 bp, Homo Sapiens
  misc_feature (1181)..(1193): n is a, c, g, or t
  misc_feature (1393)..(1393): n is a, c, g, or t
  misc_feature (1401)..(1401): n is a, c, g, or t
  misc_feature (1408)..(1408): n is a, c, g, or t
tggtgttcccaatttcctgatatacggcgctgtttctgtccctctcttgagaaaacggggtttgccctgaacgtgttagagagctggctacctttcatctgttcggtggttccatgtcgcagttcccggaaccaaatatttccagaaggcttgcgggtcctacctattgtcgtcgccttctgtggtggtctggccgaccttaagttcatgtggcgggcatggtaggcgaacttgggagaccgtaacggtgcttcatcatcaagtctagagaagactttggggggcttcaggctccaattggccagtcaccgactcagtcaacccaatcagactttttgtattcagctccagttagtcagaagaccagcccaggccagctgctgtttctgtggggagccctaatcttctgtgaatttccaaagggagcattggaggagattgagataacacatctttaaaacagaaagaactggtcttggtctatcagtacctcttcctgaatctggtacccatctgccttctccagttcattctaaacactgctgggactagggtttttccatcaggagcaaatggaatccaggccttcccagaagtagaccatactgccttgaacttgtccatatgtacaaactaatcaccagctttctccatacatttttaatgcagacctgtaattgagttcagaagcctcccaagaaaacagaaaggatcccctttctccagtttgtgctggaagaggagctgatcagagacatcaaataagagaaagatgggttgctagaggatggtagaactggaagcaaggcagctacctttttgcaaaaggaaatggtgttaggccccttttccagaagataagacagactcatagagattaaatgatcactatggtccttcttctgttaaatggagccaaagacgcctatgttgttctgaagtcttgtaatgtttaacttctgagaacttagattagtggtgtgatgatagagtctgtataacgcattgaaaagggtatcaggcttagttatttatccaataaatatttattgtatgcagggtattcctattttaactcctgtgacaacacaaagcatagcgattttccatagttctaactgttcagggtctgctcctcctggtacactctttttggttcactgtatgtactcctgttgtcnnnnnnnnnnnnnccaaagcacttttctgttttcataaattatatactcattcactcagtgggacacttcctctacaatgtttgccagtttctgttagttggggaggaagtgtccagctgtggaaaaggaaaaagtagggtggggcatttttacagtgttttcccagtaaccccgaggccattattaaaaatttgtgggttaaaaagctacanggggggcngggggtnagggtgggcttcacaccc

SEQ ID NO: 355133 - DNA, 3096 bp, Homo Sapiens
  misc_feature (2759)..(2767): n is a, c, g, or t
  misc_feature (2808)..(2826): n is a, c, g, or t
cgtcgcgcccctttgtgcgtcacgggtggcgggcgcgggaaggggatttggattgttgcgcctctgctctgaagaaagtgctgtctggctccaactccagttctttcccctgagcagcgcctggaacctaacccttcccactctgtcaccttctcgatcccgccggcgctttagagccgcagtccagtcttggatccttcagagcctcagccactagctgcgatgcatgtgatcaagcgagatggccgccaagaacgagtcatgtttgacaaaattacatctcgaatccagaagctttgttatggactcaatatggattttgttgatcctgctcagatcaccatgaaagtaatccaaggcttgtacagtggggtcaccacagtggaactagatactttggctgctgaaacagctgcaaccttgactactaagcaccctgactatgctatcctggcagccaggatcgctgtctctaacttgcacaaagaaacaaagaaagtgttcagtgatgtgatggaagacctctataactacataaatccacataatggcaaacactctcccatggtggccaagtcaacattggatattgttctggccaataaagatcgcctgaattctgctattatctatgaccgagatttctcttacaattacttcggctttaagacgctagagcggtcttatttgttgaagatcaatggaaaagtggctgaaagaccacaacatatgttgatgagagtatctgttgggatccacaaagaagacattgatgcagcaattgaaacatataatcttctttctgagaggtggtttactcatgcttcgcccactctcttcaatgctggtaccaaccgcccacaactttctagctgttttcttctgagtatgaaagatgacagcattgaaggcatttatgacactctaaagcaatgtgcattgatttctaagtctgctggaggaattggtgttgctgtgagttgtattcgggctactggcagctacattgctgggactaatggcaattccaatggccttgtaccgatgctgagagtatataacaacacagctcgatatgtggatcaaggtgggaacaagcgtcctggggcatttgctatttacctggagccttggcatttagacatctttgaattccttgatttaaagaagaacacaggaaaggaagagcagcgtgccagagatcttttctttgctctttggattccggatctcttcatgaaacgagtggagactaatcaggactggtctttgatgtgtccaaatgagtgtcctggtctggatgaggtttggggagaggaatttgagaaactatatgcaagttatgagaaacaaggtcgtgtccgcaaagttgtaaaagctcagcagctttggtatgccatcattgagtctcagacggaaacaggcaccccgtatatgctctacaaagattcctgtaatcgaaagagcaaccagcagaacctgggaaccatcaaatgcagcaacctgtgcacagaaatagtggagtacaccagcaaagatgaggttgctgtttgtaatttggcttccctggccctgaatatgtatgtcacatcagaacacacatacgactttaagaagttggctgaagtcactaaagtcgttgtccgaaacttgaataaaattattgatataaactactatcctgtaccagaggcatgcctatcaaataaacgccatcgccccattggaattggggtacaaggtctggcagatgcttttatcctgatgagatacccttttgagagtgcagaagcccagttactgaataagcagatctttgaaactatttattatggtgctctggaagccagctgtgaccttgccaaggagcagggcccatacgaaacctatgagggctctccagttagcaaaggaattcttcagtatgatatgtggaatgttactcctacagacctatgggactggaaggttctcaaggagaagattgcaaagtatggtataagaaacagtttacttattgccccgatgcctacagcttccactgctcagatcctggggaataatgagtccattgaaccttacaccagcaacatctatactcgcagagtcttgtcaggagaatttcagattgtaaatcctcacttattgaaagatcttaccgagcggggcctatggcatgaagagatgaaaaaccagattattgcatgcaatggctctattcagagcataccagaaattcctgatgacctgaagcaactttataaaactgtgtgggaaatctctcagaaaactgttctcaagatggcagctgagagaggtgctttcattgatcaaagccaatctttgaacatccacattgctgagcctaactatggcaaactcactagtatgcacttctacggctggaagcagggtttgaagactgggatgtattatttaaggacgagaccagcagctaatccaatccagttcactctaaataaggagaagctaaaagataaagaaaaggtatcaaaagaggaagaagagaaggagaggaacacagcagccatggtgtgctctttggagaatagagatgaatgtctgatgtgtggatcctgaggaaagacttggaagagaccagcatgtcttcagtagccaaactacttcttgagcatagataggtatagtgggtttgcttgaggtggtaaggctttgctggaccctgttgcaggcaaaaggagtaattgatttaaagtactgttaatgatgttaatgannnnnnnnnaaactcatatattgggattttcaccaaaataatgcttttgnnnnnnnnnnnnnnnnnnncggatatattgagaatcaaagtagaagttttaggaatgcaaaataagtcatcttgcatacagggagtggttaagtaaggtttcatcacccatttagcactgcttttctgaagacttcagttttgttaaggagatttagttttactgctttgactggtgggtctctagaagcaaaactgagtgataactcatgagaagtactgataggacctttatctggatatggtcctataggttattctgaaataaagataaacatttctaagtgaaa

SEQ ID NO: 355134 - DNA, 423 bp, Homo Sapiens
ccaccattgagtcctcagacggaaacaggcacccccgtatatgcctcctacaaagaaatccctgtaatccgaaaagagcaacccagccagaaccccgggaacccatcaaatgccagcaaccctgtgccacagaaatagtggagtacacccagcaaagatgaggttgcctgtttgtaatttggcttcccctggccctgaatatgtatgtcacatcagaacacacatacgactttaagaagttggctgaagtcactaaagtcgttgtccgaaacttgaataaaattattgatataaactactatcctgtaccagaggtatgaatagatttctctgcttattggtaattattgaaatccaaattgaaaggaatcaatcatgatcttcaagtcatcatttaaatggttatcaataaaatggtttgag

SEQ ID NO: 355135 - DNA, 619 bp, Homo Sapiens
  misc_feature (506)..(506): n is a, c, g, or t
  misc_feature (558)..(558): n is a, c, g, or t
  misc_feature (580)..(580): n is a, c, g, or t
  misc_feature (586)..(586): n is a, c, g, or t
gggatttggattgttgcgcctctgctctgaagaaagtgctgtctggctccaactccagttctttcccctgagcagcgcctggaacctaacccttcccactctgtcaccttctcgatcccgccggcgctttagagccgcaggtccagtcttggatccttcagagcctcagccactagctgcgatgcatgtgatcaagcgagatggccgccaagaacgagtcatgtttgacaaaattacatctcgaatccagaagctttgttatggactcaatatggattttgttgatcctgctcagatcaccatgaaagtaatccaaggcttgtacagtggggtcaccacagtgggaactaggatactttggctgctgaaacagctggcaaccttggactactaaggcaccctggactatggttattcctgggcaggccaggattcgctgttctctaaacttggcacaaaggaaacaaaggaaagttgtttcagtggatgttgatgggaaggacctnttattaacttaacattaaatcccacataattgggcaaacaattcttcccctnggtggggccaagttcaacattngggtanttgtttttgggccattaaagttcggctggaatt

SEQ ID NO: 355136 - DNA, 1241 bp, Homo Sapiens
aagagagggcggaggggtggagataagaatattgtagagtcctaagaaaggagccggggtttatactgaccatatatgacggggagagcaagggagagatcatcgagaagggtagagagtgaaggcggctttcttctattttaccgaggaacaagaggaaacgccaaactaaggctgtaggggggagcaaacgtgcaaaaccttcaaaggtcacagatggggaaggctggcccgccgcacgaggcactctcgagaggaagggcttcctgattaccaaggggatccccgcctgccaagtttcaagaagcatggggcaccctggagaggcccctccaaaaggcaagcgcgctttaggcgccccggggcgtcacccgtcgatccagacaaaggcccccgcgggctgtcactcggggagggtgatgctgggcacccagtcgttaacgctgcggctctcctcgcaaaacaggctgagcttctccaaggcgggatccttccaggcgtcctcgttggggttcgaaatgaggatgcagtgcaggtcgcccggcgcacccgcctcctcgccggcgcccacgatagccgccagccgctgcacatcgcccacgcgcactatgtcgatgtcgttctcgcagcagaaagcctggatcagcgtaaaatggatctgcagcgcgatgtcgccctcgtcctcctcacccgcagccagcacacagaaggtcacattgtcaggggtccacgttcaagactttggctgactcgtagacgccggcagtgaggcagccctgacgctgcgccgacagcagcaactcatgcagcgctttcccggcaccctgcatcctgcggaggagccagcgcagtgagcgggagccggccggagggcgcggcggagaccccagccccggccaccaggcacacacccttggctccccaactccaaccacactccaatcccggctcagcgcctgcaccccggctctccaaccgggatctggcgcccggacccccgcgctcccctcctaccccgcggattcccaccactggaaaaccctgacggtcgccgaccgaccagcggctttctcagcgccctgaaacccacctggctgtgctttccggaactgtgtcctggccgcggacttcttcacagagtcatagtgcgatcaaccagcagctagttatccacaagcggagagcgcggaggggacgcgggcgaacacactgacagccagagctcagcctcgtgccgatta

SEQ ID NO: 355137 - DNA, 1061 bp, Homo Sapiens
gtggtgggcgcgccgtgctgagctctggctgtcagtgtgttcgcccgcgtcccctccgcgctctccgcttgtggataactagctgctggttgatcgcactatgactctggaagaagtccgcggccaggacacagttccggaaagcacagccaggatgcagggtgccgggaaagcgctgcatgagttgctgctgtcggcgcaggtgcagggctgcctcactgccggcgtctacgagtcagccaaagtcttgaacgtggaccccgacaatgtgaccttctgtgtgctggctgcgggtgaggaggacgagggcgacatcgcgctgcagatccattttacgctgatccaggctttctgctgcgagaacgacatcgacatagtgcgcgtgggcgatgtgcagcggctggcggctatcgtgggcgccggcgaggaggcgggtgcgccgggcgacctgcactgcatcctcatttcgaaccccaacgaggacgcctggaaggatcccgccttggagaagctcagcctgttttgcgaggagagccgcagcgttaacgactgggtgcccagcatcaccctccccgagtgacagcccggcggggaccttggtctgatcgacgtggtgacgccccggggcgcctagagcgcggctggctctgtggaggggccctccgagggtgcccgagtgcggcgtggagactggcaggcggggggggcgcctggagagcgaggaggcgcggcctcccgaggaggggcccggtggcggcagggccaggctggtccgagctgaggactctgcaagtgtctggagcggctgctcgcccaggaaggcctaggctaggacgttggcctcagggccaggaaggacagactggccgggcaggcgtgactcagcagcctgcgctcggcaggaaggagcggcgccctggacttggtacagttgcaggagcgtgaaggacttagccgactgcgctgctttttcaaaacggatccgggcaatgcttcgttttctaaaggatgctgctgttgaagctttgaattttacaataaactttttgaaacaaaaaaaa

SEQ ID NO: 355138 - DNA, 1024 bp, Homo Sapiens
  misc_feature (70)..(70): n is a, c, g, or t
  misc_feature (93)..(93): n is a, c, g, or t
  misc_feature (156)..(156): n is a, c, g, or t
  misc_feature (182)..(182): n is a, c, g, or t
  misc_feature (187)..(187): n is a, c, g, or t
  misc_feature (198)..(198): n is a, c, g, or t
ttatcaagtgcattctcaacaagtgccactgcggttgcattctaagaacggaagagagaaagaagcggcnagccctatcttcctatcagacgntcttggtgccaccccgcatacaggtctccacttgcgaccgcaccacgttcacttgcacgagcngcagtggattcttcccggcttccagnaagcngttctgcactntggaggtacagaagcttgaagggcttgtgaaagaggcagctgcaacaccttcttgcagaaactggttgtactcgtcgatgctgcagcgagagaccttgcggggcaggtagaactcagtgtcctccatgatgcagcccagccagatgtctggacacttgcagtcccctgccgagctccgctgtttgttccacatcatgcccaggtttctgtcccagcgttctgggcaagggtcacgggccattcgcctcccatgtttgccgtactcgttcacaccaccgccattgggacagggagcatatgccccccacgtaggctgccccgctgctcgtgctctggaaggtcctgcccgagaagaggtgggtggcatcactgggctcaggcagaccctcccgtcggtagaccatgagccgggccagggtctccaggaggtcatcctgcacctggatcttgtccccatctgcccatgtttccatggcaaccaggacgatgcgagtgttgagctgctccttgtatatcacatcggccaggttcaccacggacttggcaaagttgctggtgaggaccaccgactgtcgcatctgctcgaacagctggtggtcgttgatcacaattagctccacatacttggtttcactgtgcactgtagggtggccccggcggacctgccttttccttctcagcctcggccggtttggaggagccgactgggcaggcacagcaaacaggcagcctggttccctgcatccgaggggatctgggaggagaggggtccggtaaatgaggtggggaaggggtccctgaggggctccccaaggttcagcccgct

SEQ ID NO: 355139 - DNA, 1367 bp, Homo Sapiens
  misc_feature (256)..(264): n is a, c, g, or t
  misc_feature (293)..(308): n is a, c, g, or t
gtccggattccgggatccgttgaatttcggattttccatcagggctgctgaatctgtaaatccagtgcagtattccgaaatccaaacacttctagtcccaggcatttcagataagggttactcaacctgatttaagtataacagaattgttcatttctattattgtgtgatcaaggccagaaaggggttgatttcacttctagaagtcagggtggaaggaagcagtaaatttagtgaacttctaagaagtaccaannnnnnnnnccttccagcatactcttcttttgggtgannnnnnnnnnnnnnnnaatggaaaatcgacagtgaagatgcctatcctgcttcagtacaacacgaaaaatgcatacaccctgcagcagctgactcgacagcacccaaattaaaatggacattttggcgcaagttttacagattttattaaagtcgaagctattggtcttggaagatgaaaatgcaaatgttgatgaggtggaattgaagccagataccttaataaaattatatcttggttataaaaataagaaattaagggttaacatcaatgtgccaatgaaaaccgaacagaagcaggaacaagaaaccacacacaaaaacatcgaggaagaccgcaaactactgattcaggcggccatcgtgagaatcatgaagatgaggaaggttctgaaacaccagcagttacttggcgaggtcctcactcagctgtcctccaggttcaaacctcgagtccctgtgatcaagaaatgcattgacattctaattgagaaagaatatttggagcgagtggatggtgaaaaggacacctacagttacttggcttaacccttctggaagggtctgactgtgtgacccgcagcaaatagttcatgttggaaagaatgaaaacaactcaagttcatagcagccagcctgccgccattggacctcccttttaaaaactgagaccaagactcccatcagctggtctcggatttacatcggaactgctcaggattgatacatttcaagtctgtaaatacggacaccaacgccatttaccctaatttaagaacagcggggactgaccctccgtgccgagggctgcatgctaccgcactaagtcaatacatgggctccccgattcgcagctgtcgtcttggcagcacttgtcacgttggcagcactttgagagcaagtctgagtggacccacatgtaacctgctatgaaaaccatttgtatagtgtgtttcattttttaatgtgtgaaaataaagaaaattaaaggatttctgtacaagtcgcattgggttttgttttaagttttactaatttctatatgtaaataaaagatataatgattgtgcaaattt

SEQ ID NO: 355140 - DNA, 698 bp, Homo Sapiens
  misc_feature (619)..(619): n is a, c, g, or t
aaaatctaataagtagatggcccttgaccatagacacgtcccccgggagccctagcacggatctcagtattgttacaaaccaagggagaccggggactcagtgtgaagcgacaggcactaggctgggagtgtgaggtaggcctttgattccattcagcgagcctgatgtttctccaattctgagcttctgggatttttattattttggcaaataagtctccttaaatggctcaccaagaaaagtttggacctttgtgtccaagtggcttgattttatctcacttgacaaaatttgggagagcagattagggacctggattttctgtaatgtggatgtccctgttaatggccgagtaggaaactaggccatgatcggactctacccagtgctgggtagaggacattttcacggagagctcacagaaatcaacattctcccctctgtctagggaagcagggcacttcttaaaggttgaaaaatagaaagcagccttcactgcctaccttttaatataatagtgatcggtttcctcatttttcttgatagtaagaaattaagggttaacatcaatgtgccaatgaaaaccgaacagaagcaggaacaagaaaccacacacanaaacatcgaggaaagccgcaacctactgattcaggccggcatcgtgagaatcatgaagatgaggaagggtctgaaccac

SEQ ID NO: 355141 - DNA, 924 bp, Homo Sapiens
ctctctcagcctttctcacatgtggcaactggaagcaagccctctgtgtggcagcccagcttaactttaccaaagaccagctggtgggcctcggcagaactctggcaggaaagctggttgagcagaggaagcacattgatgcggccatggttttggaagagtgtgcccaggattatgaagaagctgtgctcttgctgttagaaggagctgcctgggaagaagctttgaggctggtatacaaatataacagactggatattatagaaaccaacgtaaagccttccattttagaagcccagaaaaattatatggcatttctggactctcagacagccacattcagtcgccacaagaaacgtttattggtagttcgagagctcaaggagcaagcccagcaggcaggtctggatgatgaggtaccccacgggcaagagtcagacctcttctctgaaactagcagtgtcgtgagtggcagtgagatgagtggcaaatactcccatagtaactccaggatatcagcgagatcatccaagaatcgccgaaaagcggagcggaagaagcacagcctcaaagaaggcagtccgctggaggacctggccctcctggaggcactgagtgaagtggtgcagaacactgaaaacctgaaagatgaagtataccatattttaaaggtactctttctctttgagtttgatgaacaaggaagggaattacagaaggcctttgaagataacgctgcagttgatggaaaggtcacttccagaacatttggactcttacttaccagcagaattcagctaccccggttctaggtccccaattctactgcaatagtatcatggcatcttatcagcaacagaagacttcggttcctgttcttgatgcctgagctttttataccaccaaaagatcaaacagaagaac

SEQ ID NO: 355142 - DNA, 1247 bp, Homo Sapiens
  misc_feature (776)..(776): n is a, c, g, or t
  misc_feature (896)..(896): n is a, c, g, or t
  misc_feature (979)..(980): n is a, c, g, or t
  misc_feature (1144)..(1144): n is a, c, g, or t
aagaagctatgcttgtagtgtgttgggaagacttaatctgagcaaaacccatgattcttcaagacatatactctataacacacatggaaaaagtttgacacaaaactcagctccaagcataacttatttaataaagaatcctaataagtttcatggttatcaagaaccatattttcttaaacatcaaatagctcataccatagaaaaaaactgtgtgtataatgaatgtggcaaagcttttcattataagtcacaactcattatacatctcataattcatacaggatatagaccttatcaatgcagtaaatgtcaaagaaccttcactaccaactcaaaccttaatgctcatcagagacttcatacaggagaaaaaccctactcatgtactgagtgcgagaaggtcttctctttcaagtcacagctcattggccatcaagaaattcacacaggagggaaaccctatagctacaataaatgtcggaaaacctacagttagaaatcacagcttcttttacaccagagaagtcacacaggagtgaaaccgtatgaatgcagcgaatgtgggaaagcctttagtttgaagtctccattcgttgtacaccagagaactcatacaggagtgaaaccccataaatgcagtgaatgtgggaaagcctttaggagtaagtcctatctccttgttcacatccgaatgcatacaggagaaaaaccctatcaatgcagtgattgtgggaaagccttcaatatgaagacacaactcattgtacatcagnggagttcacacaggaaataatccttatcaatgcggtgaatgtgggaaagcctttggtaggaaggaacagctcactgcacatctgagagctcatgcaggagagaagccctatggatgcagngaatgtgggaaggctttcagcagcaagtcataccttgttatacataggagaacacacaccggagagagacctatgaatgtagnnttgtgggagagagccttttgtggaaaatcacagctgattatacatcagagaactcattcaactgagaagccctatgaatgcaatgaatgggaaaaagcctaccctaggaaggcatcacttcagatacaccgaaaactcattcggagagaaacctttaatgccgngaagtggaaaaagcttactccaaatctctcttcatgacacacgaaggtacacggggagaaccctggaagctctatgtgggaaacctctgtggaaaaaggctct

SEQ ID NO: 355143 - DNA, 906 bp, Homo Sapiens
cccacgcgtccgcccacgcgtccgcccacgcgtccgcagaatgctgcaaactgaccacgctggaacgtggtcaatgtattaattcatgcagaaaatgatgaaaaacctgaaggtctatctccaaatctaaacaggtttttaggaaatagagattttaaccaattttcttcaggggaaaaaaatatcttcttggcaagttttgttcatgaatattcaagaagacatcctcagcttgctgtctcagtaattctaagagttgctaaaggataccaggagttattggagaagtgtttccagactgaaaaccctcttgaatgccaagataaaggagaagaagaattacagaaatacatccaggagagccaagcattggcaaagcgaagctgcggcctcttccagaaactaggagaatattacttacaaaatgcgtttctcgttgcttacacaaagaaagccccccagctgacctcgtcggagctgatggccatcaccagaaaaatggcagccacagcagccacttgttgccaactcagtgaggacaaactattggcctgtggcgagggagcggctgacattattatcggacacttatgtatcagacatgaaatgactccagtaaacccttggtgttggccagtgctgcacttctttatatgccaacaggaggccatgcttcacagctttggggggggagaaacatatagtccttcctgattctcttaggacaaggttcatttttcttaaagaacctgtggcaattcaaaggtgaagcggtgcaaccgaagaacaaggagttcttatttaacctttgaaagcaaaccccaataacagaggacaccttgggttgcattgcaaaatcttaagccgttggagaatcctgcaaggccagaaagaaagatgtttctt

SEQ ID NO: 355144 - DNA, 1091 bp, Homo Sapiens
ggggctacacccggaagtgtcttcagggagaggaagccggcggcctcactgctatgggccgcaacaagaagaagaagcgagatggtgacgaccggcggccgaggctcgttcttagcttcgacgaggagaagaggcgggagtacctgacaggcttccacaagcggaaggtcgagcgaaagaaggcagccattgaggagattaagcagcggctgaaagaggagcagaggaagcttcgggaggagcgccaccaggaatacttgaagatgctggcagagagagaagaggctctggaggaggcagatgagctggaccggttggtgacagcaaagacggagtcggtgcagtatgaccaccccaaccacacagtcaccgtgaccaccatcagtgacctggacctctcgggggcccggctgctcgggctgaccccacctgagggaggggctggagacaggtctgaggaggaggcgtcatccacggagaaaccaaccaaagccttgcccaggaagtccagagaccccctgctctctcagcggatctcctccctcacagcatcactacatgcacacagccgcaaaaaggtcaagaggaaacatccccgacgggcccaggactccaaaaagcccccaagggcccctcgtaccagcaaggcccagcgccgccgtctcacaggcaaagcacggcacagcggggagtgagaccgagaacgaagcggtgccccagtctaggctgcggggacctgtccttgctcagcttggctgtccctgtagcccagcctgcacctaggtaatgactgcacagctcaaggttgggaagccaggacctctctggcctggggccagctgcctttgcctggggtcagctgccttttgcctggggtttgaattccccgaaaggagcaggcagctgagagcagccctccccccaggaagagcctccagagccacgtggggcaattttcctgtgcaccccacctgcactcatcagatttgtgcgcttgtgaattgttggccctgaatccacgcacacgggcaccgttttgggttgctggaatgggccaggcccatgggtctgttttccagttgcccctgggt

SEQ ID NO: 355145 - DNA, 393 bp, Homo Sapiens
  misc_feature (30)..(30): n is a, c, g, or t
  misc_feature (58)..(58): n is a, c, g, or t
  misc_feature (81)..(81): n is a, c, g, or t
gtgcctcaagcctgctgtgaagcaggaaanagctgaagtccccaggggttcttgcaanacagcagggctcgggtttgaaancccaggctctgcctgcttggtcgcctgcagtgagcttccggctgtgctgacctctctggtttgtctcgtcatgtgtaaggtgacaccagatacctaccgtcttagggctgccccgagactaaaataagaccatgtgcatgaaccacttaccaaagtgcctgttgctctccaggtgtgcctaccgcatgttgccgctgctgtttctgctgggacgtctgactccagttccttctcccctctccagtgacaaggtcatttacaacttacatttacaatttatagtgtttaccagtattaaattctcagccactc

SEQ ID NO: 355146 - DNA, 726 bp, Homo Sapiens
  misc_feature (111)..(111): n is a, c, g, or t
  misc_feature (344)..(344): n is a, c, g, or t
gggcccagcggcttggggggctgccccagggccaccaggcctctcctcgcaggcggcatgggggccacaagcctccccatcggtgcagggagacgcgggcagcgtgtggtnggagagcactggggccctccggggccggggcgtcggcgcttccgtggccgcactcggggctggggctgaggcagccactggagccagaggggtgaggtgtctgggcgggcgctgcaggctggcaggcgcaggggctggcaggcggcgcagaatgggtcccggcgcagcggggatgggtgcacgcaggcccgagggcccagcaggccctgtcggctgccactgtcccaggcctntgctgcagccgccgcttggtctcacgcagctggtacttgtccaggggccgtggtggcaaagcgggctccctaggcctggttcggaaagctccttcacctttcctctcacaggtgtggcattcacagtgctcattcttctcgccgaagaagccctcgccgtagaagcatgtcacctcgtccccaggctcaatgtcccggagcacctgtcacgcaggctgcgttcccatctgcaggcacaaactaagggccaagcccactcagcgcctggcccagggcacaggggagggctcacccactccccacacctggccgggcacctggcccggagcgtcctctcctggaatggggcaacagctgagcccctaaaagtggcactcccgct

SEQ ID NO: 355147 - DNA, 1436 bp, Homo Sapiens
ggcctgggtggcgaattccgcacgaggccgtaagtggctgtggagctggggtcactgcgcggtgggaccatggcctcggagaagccgctggcggcagtcacttgtacagcgccggtcaacatcgcggtcatcaagtactggggcaagcgcgatgaagagctggttctgcccatcaactcctccctgagcgtcactctgcaccaggaccagttaaaaaccaccacaacagccgtcatcagcaaggacttcaccgaggaccggatttggctgaatggccgggaggaggatgtggggcagccgaggctgcaggcctgcctgcgggagatccgctgcctggcccggaagcggaggaactcacgggatggggacccgctgccctccagcctcagctgcaaggtgcacgtggcatcggtgaacaacttccccacggctgcgggcctggcctcctcagcggcgggctatgcctgcctagcctacaccctggcccgtgtctacggcgtggagagtgacctctcagaagtggctcgccggggctcaggcagcgcctgccggagcctgtatgggggctttgtggagtggcagatgggagagcaggccgacgggaaggacagcatcgctcggcaagtggcccccgagtcacactggcctgaactccgcgtgctcatccttgtggtgagcgctgagaagaagctgacaggcagtaccgtgggcatgcgggccagtgtggagaccagccccctgcttcggttccgggccgagtccgtggtgcccgcgcgcatggcggagatggcccgctgcatccgggagcgagacttccccagctttcgcccagctgaccatgaaggacagcaaccagttccacgccacctgcctcgacaccttcccgcccatctcttacctcaatgccatctcctggcgcatcatccacctggtgcaccgcttcaacgcccaccacggggacaccaaggtggcgtacacctttgacgcgggccccaatgccgtgatcttcaccctggacgacactgtggctgagtttgtggctgctgtgtggcacggctttcccccaggctcgaatggagacacgtttctgaaggggctgcaggtgaggccggcccctctctcagctgagcttcaggctgcgctggccatggagccgacccccggtggggtcaaatacatcattgtcactcaggtggggccagggcctcaaatcctggatgacccctgcgcccacctcctgggtcctgacggcctgccgaagccagctgcctgactgcctcagcagggaccgcatgccgcttggagaaggggtggcctcgccggagctagggagcggatgtggtgggctggccggactcctgggacatgtgggtggtggcttgaccccgggcccatgggcagcttgctgtggggcagtgcagggtagtcctcggtcc

SEQ ID NO: 355148 - DNA, 439 bp, Homo Sapiens
  misc_feature (420)..(420): n is a, c, g, or t
tggccggggtcaagccaccacccacatgtcccaggagtccggccagcccaccacatccgctccctagctccggcgaggccaccccttctccaagcggcatgcggtccctgctgaggcagtcaggcagctggcttcggcaggccgtcaggacccaggaggtgggcgcaggggtcatccaggatttgaggccctggcccacctgagtgacaatgatgtatttgaccccaccgaggtcgggctccatggccagcgcagctgaaagctcagctgagagaggggccggcctcacctgcagccccttcagaaacgtgtctccattcgagcctggggggaaagccgtgccacacagcagccacaaaactaaggccacagttttcgttccaggggtgaagatcctcgtggccgaattattgggctttnaggagcaaaatttacctat

SEQ ID NO: 355149 - DNA, 482 bp, Homo Sapiens
  misc_feature (274)..(274): n is a, c, g, or t
acttccctgtcactgccccacagcaagctgcccatgggcccggggtcaagccaccacccacatgtcccaggagtccggccagcccaccacatccgctccctagctccggcgaggccaccccttctccaagcggcatgcgctccctgctgaggcagtcaggcagctggcttcggcaggccgtcagacccaggaggtgggcgcaggggtcatccagggatttgaggccctggcccacctgagtgacaatgatgtatttgaccccacccgggtcggnctccatgggccagcgcagctgcaagctcagctgaggagagggggccggcctcacctgcagcccctttcagaaacgtgttctccatttcggagcctgggggggaaagccgtgccacaacagcagccacaaattcagccacagtgttcttccagggttgaagttcaacggctttgggggcccgcttcaaagttttacgccactttggttt

SEQ ID NO: 355150 - DNA, 1560 bp, Homo Sapiens
  misc_feature (1431)..(1431): n is a, c, g, or t
  misc_feature (1438)..(1438): n is a, c, g, or t
  misc_feature (1447)..(1447): n is a, c, g, or t
  misc_feature (1466)..(1466): n is a, c, g, or t
  misc_feature (1470)..(1470): n is a, c, g, or t
  misc_feature (1480)..(1480): n is a, c, g, or t
  misc_feature (1485)..(1485): n is a, c, g, or t
  misc_feature (1494)..(1494): n is a, c, g, or t
  misc_feature (1501)..(1501): n is a, c, g, or t
  misc_feature (1515)..(1515): n is a, c, g, or t
  misc_feature (1518)..(1518): n is a, c, g, or t
  misc_feature (1534)..(1534): n is a, c, g, or t
  misc_feature (1538)..(1538): n is a, c, g, or t
  misc_feature (1548)..(1549): n is a, c, g, or t
  misc_feature (1554)..(1554): n is a, c, g, or t
tcccgggatctgcagctcagcatggctagggtactgggagcacccgttgcactggggttgtggagcctatgctggtctctggccattgccacccctcttcctccgactagtgcccatgggaatgttgctgaaggcgagaccaagccagacccagacgtgactgaacgctgctcagatggctggagctttgatgctaccaccctggatgacaatggaaccatgctgttttttaaaggggagtttgtgtggaagagtcacaaatgggaccgggagttaatctcagagagatggaagaatttccccagccctgtggatgctgcattccgtcaaggtcacaacagtgtctttctgatcaagggggacaaagtctgggtataccctcctgaaaagaaggagaaaggatacccaaagttgctccaagatgaatttcctggaatcccatccccactggatgcagctgtggaatgtcaccgtggagaatgtcaagctgaaggcgtcctcttcttccaaggtgaccgcgagtggttctgggacttggctacgggaaccatgaaggagcgttcctggccagctgttgggaactgctcctctgccctgagatggctgggccgctactactgcttccagggtaaccaattcctgcgcttcgaccctgtcaggggagaggtgcctcccaggtacccgcgggatgtccgagactacttcatgccctgccctggcagaggccatggacacaggaatgggactggccatgggaacagtacccaccatggccctgagtatatgcgctgtagcccacatctagtcttgtctgcactgacgtctgacaaccatggtgccacctatgccttcagtgggacccactactggcgtctggacaccagccgggatggctggcatagctggcccattgctcatcagtggccccagggtccttcagcagtggatgctgccttttcctgggaagaaaaactctatctggtccagggcacccaggtatatgtcttcctgacaaagggaggctataccctagtaagcggttatccgaagcggctggagaaggaagtcgggacccctcatgggattatcctggactctgtggatgcggcctttatctgccctgggtcttctcggctccatatcatggcaagacggcggctggggtggctggacctgaagtcaggagcccaagccacgtggacagagcttccttggccccatgaaaaaggagaccgagccttgtgtatggaaaagtcccttggccctaactcatgttccgccaatggccccggcttgtacctcatccatggtcccaatttgtactgctacagtgatgtggagaaactgaatgcagccaaggcccttccgcaaccccagaatgtgaccagtctcctgggctgcactcactgaaggggccttctgacatgagtntgggctnggcccaccntcttagttcctcataatanaganagattgcttnttcgnctctcactnagtgggnctcttgaatgagtntgnctggcccactccccgngttntataataaannaattngttctt

SEQ ID NO: 355151 - DNA, 1375 bp, Homo Sapiens
cacaaaggagggcgtaacccggtctcaccaaatgcctgttgattgattggacaaaggtgaccgcgagtggttctgggacttggctacgggaaccatgaaggagcgttcctggccagctgttgggaactgctcctctgccctgagatggctgggccgctactactgcttccagggtaaccaattcctgcgcttcgaccctgtcaggggagaggtgcctcccaggtacccgcgggatgtccgagactacttcatgccctgccctggcagaggtgagaaagccctagcacttgagacctgtcagaattcatccactttccctgagcttgtggatctcacgtgtcctagctctcactttaactccgtgttgcgacaccttggcccttaatctagccccaatttccattctggattttcccattgccctcatatggggaaacccacaccccactaaccccagccatctcttccaccttggacctcactctgacctctggcctccttctgtgttctcctcacccatttctctctccaggccatggacacaggaatgggactggccatgggaacagtacccaccatggccctgagtatatgcgctgtagcccacatctagtcttgtctgcactgacgtctgacaaccatggtgccacctatgccttcagtgggacccactactggcgtctggacaccagccgggatggctggcatagctggcccattgctcatcagtggccccagggtccttcagcagtggatgctgccttttcctgggaagaaaaactctatctggtccagggcacccaggtatatgtcttcctgacaaagggaggctataccctagtaagcggttatccgaagcggctggagaaggaagtcgggacccctcatgggattatcctggactctgtggatgcggcctttatctgccctgggtcttctcggctccatatcatggcaggacggcggctgtggtggctggacctgaagtcaggagcccaagccacgtggacagagcttccttggccccataagaaggtagacggagccttgtgtatgaaaaagtcccttggccctaactcatgttccgccaatggtcccggcttgtacctcagccatggtcccaatttgtactgctacagtgatgtggagaaactgaatgcagccaaggcccttccgcaaccccagaatgtgaccagtctcctgggctgcactcactgaggggccttctgacatgagtctggcctggccccacctcctagttcctcataataaagacagattgcttcttcgcttctcactgaggggccttctgacatgagtctggcctggccccacctccccagtttctcataataaagacagatgcttcttcact

SEQ ID NO: 355152 - DNA, 926 bp, Homo Sapiens
gggattgaaggcgaggccaagatggcggtgctgtcagctcctggcctgcgcggcttccggatccttggtctgcgctccagcgtgggcccggctgtgcaggcacgaggtgtccatcagagcgtggccaccgatggcccaagcagcacccagcctgccctgccaaaggccagagccgtggctcccaaacccagcagccggggcgagtatgtggtggccaagctggatgacctcgtcaactgggcccgccggagttctctgtggcccatgaccttcggcctggcctgctgcgccgtggagatgatgcacatggcagcaccccgctacgacatggaccgctttggcgtggtcttccgcgccagcccgcgccagtccgacgtcatgatcgtggccggcacactcaccaacaagatggccccagcgcttcgcaaggtctacgaccagatgccggagccgcgctacgtggtctccatggggagctgcgccaacggaggaggctactaccactattcctactcggtggtgagcgggctgcgaccgcatcgtgcccgtggacatctacatcccaggtagggccgggaccgaccgaccacgagggagcctggagacagggccaagctgccacacggagcccggcggcccctgtgagggagtcccaaacccccagcagacggcgggtccccaatcctatggaatggcgccgactcggagcgctgctctcagtggagcctgtcccctgcgagcaagcccggaacaattccggggctccccacgcgaccccagcgcacccagcgcgaccgccacagcgaccccctcgcccacacccccgccgcacaccgcgccccctacggcccacctcgcccaccccaagacctgcagccacacccacaaccaacaacggcccgccgcccacgcaccaccccgcccca

SEQ ID NO: 355153 - DNA, 1068 bp, Homo Sapiens
  misc_feature (980)..(988): n is a, c, g, or t
ggaccggtccggaattcccgggatcggacctcagaggttgtctgaaggccgaggccaagatggcggtgctgtcagctcctggcctgcgcggcttccggatccttggtctgcgctccagcgtgggcctggctgtgcaggcacgaggtgtccatcagagcgtggccaccgatggcccaagcagcacccagcctgccctgccaaaggccagagccgtggctcccaaacccagcagccggggcgagtatgtggtggccaagctggatgacctcgtcaactgggcccgccggagttctctgtggcccatgaccttcggcctggcctgctgcgccgtggagatgatgcacatggcagcaccccgctacgacatggaccgctttggcgtggtcttccgcgccagcccgcgccagtccgacgtcatgatcgtggccggcacactcaccaacaagatggccccagcgcttcgcaaggtctacgaccagatgccggagccgcgctacgtggtctccatggggagctgcgccaacggaggaggctactaccactattcctactcggtggtgaggggctgcgaccgcatcgtgcccgtggacatctacatcccaggctgcccacctacggccgaggccctgctctacggcatcctgcagctgcagaggaagatcaagcgggagcggaggctgcagatctggtaccgcaggtagcgccgcgccgccgcgccggagcctgtcgccgtcctgtccccagcctgcttgtgtcccgtgaggttgtcaaataaacctgccctcgggctgccgccaaaatgcccgcaggtcaaacaaaactataccctgtcggccggcctcggccccccaagaaacctttctaaaaccattcttttgggccgcccgggcccccaaaaggtaagtgaaccatgggccaataggcctgttttccctagaaaaaccccctgggccatcgaaaaagggggctttgggaatttnnnnnnnnnaaataaaaaaagccggcccgcggacgggccaaaacccgtagcccgctcttctggaaaacaaaaacttccctggacaggac

SEQ ID NO: 355154 - DNA, 497 bp, Homo Sapiens
  misc_feature (391)..(410): n is a, c, g, or t
ggccggggttagtgaggtcagcgtcttgtccgagaggtccctgtgacagcccgggatgagccacgggtggagggcagtggggccttgcccaggggaggaccccactcttcctgcagggacctcccctgcgccggctcccagtccctggcactgcgcccacccagggctgtcagcctccaccttcaaaggccggcaccgggaaacccttccaaaagccgaaccggctgcgctgtgcaaccggtcacgcgggctccggctgcgggaaacgagactgaggcaaggtccctgcaggctgcccacctacggccgaggccctgctctacggcatcctgcagctgcagaggaagatcaagcgggagcggaggctgcagatctggtaccgcaggtaagnnnnnnnnnnnnnnnnnnnngagcctgtcgccgtcctgtccccagcctgcttgtgtcccgtgaggttgtcaataaacctgcccctgcgggccgcctcccaaaaaaaa

SEQ ID NO: 355155 - DNA, 929 bp, Homo Sapiens
  misc_feature (610)..(610): n is a, c, g, or t
  misc_feature (684)..(684): n is a, c, g, or t
  misc_feature (761)..(762): n is a, c, g, or t
agaaacctcatgaatgtagtgaatgtgggaaagtctttagccagaggtcccaccttgtcacacaccagaaaatccacactggagagaagccctatcagtgcactgaatgtgaaaaagccttcaggcggcgttcactccttattcaacgtcggagaattcatagtggtgagaaaccctatgaatgtaaggaatgtgggaaactcttcatgtggcacacagctttcctcaaacatcagagactgcatgctggagagaaacttgaagaatgtgagaaaaccttcagcaaggatgaggagcttaggggagagcagaaaattcaccaagaagagaaagcttattggtgtaatcagtgtggtagggctttccagggcagctcagacctcatcggacatcaggtaactcatacaggagagaaaccatatgaatgtaaagaatgtgggaaaactttcaatcagagctcagaccttctgagacatcatcagaattcacagtggcagaaaaaccttacgtatgcaacaacatgtgggaaatcttttaggagcagctcagatcttattaaacaaccatcgtgttcatactgggagagaaaccctatgaatgccctgaatgntggaaggccttcagtcagaactacaccttgtcagtcatcaaagaattcataccagagagaaccctttgaatgancaactgtggtaagggcttcagtgggggaccagttttcttaacaccaaaacttacattggaaggaatttgagacgggnnaatctacaacaggcctattttattaggagagaaacctatgattgccgtaactagaaaaggctgtgggacccctcttatgcctaaaagaggtttttagaaaaaccatggagggggaagccgaaataccccgggttttaaagaggtaataaggggaaacaaactttgga

SEQ ID NO: 355156 - DNA, 1725 bp, Homo Sapiens
agcggatccttagacccacccggaccgaggcgcaggctgcgcgcacgcgcggccccgagtccccgcctccctgccgcgcctgtcgggggcggggcgccgctgggggcgggtcctgcggcaccgcccgggaagctgcgcgagggtcgacagcctccgccacatcctccacctctcttggtccagcgagcgttgccgggccagggtcaagcggagggctccgacggcgcggacggagcgaagcgccgagccatggcgcaccaaacgggcatccacgccacggaagagctgaaggaattctttgccaaggcacgggctggctctgtgcggctcatcaaggttgtgattgaggacgagcagctcgtgctgggtgcctcgcaggagccagtaggccgctgggatcaggactatgacagggccgtgctgccactgctggacgcccagcagccctgctacctgctctaccgcctcgactcacagaatgctcagggcttcgaatggctcttcctcgcctggtcgcctgataactcccccgtgcggctgaagatgctgtacgcggccacgcgggccacagtgaaaaaggagtttggaggtggccacatcaaggatgagctcttcgggactgtgaaggatgacctctcttttgctgggtaccagaaacacctgtcgtcctgtgcggcacctgccccgctgacctcggctgagagagagctccagcagatccgcattaacgaggtgaagacagagatcagtgtggaaagcaagcaccagaccctgcagggcctcgccttccccctgcagcctgaggcccagcgggcactccagcagctcaagcagaaaatggtcaactacatccagatgaagctggacctagagcgggaaaccattgagctggtgcacacagagcccacggatgtggcccagctgccctcccgggtgccccgagatgctgcccgctaccacttcttcctctacaagcacacccatgagggcgacccccttgagtctgtagtgttcatctactccatgccgggggtacaagtgcagcatcaaggagcgaatgctctactccagctgcaagagcccgcctcctcgactccgtggagcaggacttccatctggagatcgccaagaaaattgagattggcgatggggcagagctgacggcagagttcctctacgacgaggtgcaccccaagcaacacgccttcaagcaggccttcgccaagcccaagggcccagggggcaagcggggccataagcgcctcatccgcggcccgggtgaaaatggggatgacagctaggaggctggagcagggccggccacgtgtggactgtggggctgcccaccttccgctccctgccaccatcctccttcctgggctccaggaaagtgtttctgggaggtcaggagggctggcagctgaacgcacttgcagcgtccgagggccaccgggctggcattttgtgacccttccctgttgctgtccctgcatctcgtctgtgtgcccagggtgtccggggaccctgcctggctggcttaagggggctgggtcaggggcctggcatgaacctggcctcccggggagctgagactagggtcccagcacagcccagaaacctttggccacaagaagtggggtcagtcagggctggggcaggggtcactgcagtttgggatggttgaatgctgtattttctaaagaataaaatatttttaaatcaaaa

SEQ ID NO: 355157 - DNA, 825 bp, Homo Sapiens
gcacagaagtgattcaactcttccccgagaaaggaaatatgggaaagatcctccccgaatacctcagcaactggaccatggaaaaagtcagacgagagggggttaaggtgatgcccaatgctattgtgcaatccgttggagtcagcagtggcaagttacttatcaagctgaaagacggcaggaaggtagaaactgaccacatagtggcagctgtgggcctggagcccaatgttgagttggccaagactggtggcctggaaatagactcaaatttggtggctttccggtaaaaggcgaagtaccaggccgcttttacctttgggtgggaagaagaggctgaatgctctaacgatataaagttgggaaggaggcggttagagcaccatgatcacgctgttgtgaatgaaagattgcctggagaaaatatgactggagctgctaacccgtactgacatcagtcaatgttctggagagatttgcgccccgatgttgcctatgaagctattgctcttgtggacagtaatttgcccacagttggtgtgttttgcaaaagcaactgcacaagacaaccccaaatctgccacagagcaatcaggaactggtatccgaacagagagtgagacagagtccgaggccttaaaaattacaaattcctcccacaccccggaagttccacaggctctcgtccagggggaggactacggcaaaggtgtcattttttacctcagggacaaaggggccggggggattgggttatggaacatctttaccggatgccaatggcaggaagtatattagggacggtgagcgctttgaagatctcag

SEQ ID NO: 355158 - DNA, 1475 bp, Homo Sapiens
cgcggtcgggtgaggcgggacggagttggggccggtggggaggggcatgaggcgctcgcaggcacctcgagaagcaggccccgaccgctcgccgacgaagcctcgtccgggcctcctgggagcggggtgtcaggtaccgtggcgcctcctcgcgttggtcttgctggttctcggcccccgaagcggagcgacggagacacagctgtggaagcatctggatccgctgcccaggtccccgagcttcccggaacccgaggccgcaggacactgaaggctgccattcccgagtaggtcacgctggacgccaccctaagctgggcccagaggctcccgtccaggagggctgcagtcggcgcagacaccgcgcgtgtggagacgggagacccatcctcctcggccgttccgagagtaggcgcggccggtcagattcgatgcagagccgaatgcgggagaaagaagacaaaacaagccccagaccagacaatgccgggctgaagcgagaggttcttaaatccccacccacccataccccacatagccaagtgagtgcagtaaagaccggtaaggcccacgcagaagaaacactgaggaaagaagacacttccaaagtaacaaatgggaggaagcagccaacgcccgaggacaacatggcaagaaggagcctttggattccggactgggatggaaagagagttgattgaatcccggaatttggaaaccccagatacggagggcggacggtacaaccggagctgtcaggtcgatttccaaggctttgaagtgagatgtacctgaaacttatggtggcctagactccacagtatcccctcttaggtaagtgagtgcagtaaagaccggtaaggcccacgcagaagaaacactgaggaaagaagacacttccaaagtaacaaatgggaggaagcagccaacgcccgaggacaacatggcaagaaggagcctttggattccggactgggatggaaagagagttgattgaatcccggaatttggaaaccccagatacggagggcggacggtacaaccggagctgtcaggtggatttccaaggctttgcattggctgtacctgaaacttatggtggcctagactccccagtatccactcttccttatcttggtaaacaagcccagttctgagtcacatccctgctctgcctacttacaggggcatgtggtcccaatctaagcaacgtagcataattccaacctaaatcagcagaatcccattccctgccacagttattggctggcaatgagcgtaacatatttgggccaatgagaggagcaatttcctggtctttgttgggaaaagtttttctttcattttctgagagcgcttcagaggtaacccattctttctgcatgtcctcaaaaaaacgggtcccctggatggtgggtagccatcttccaaatacaagtctagccgggttaaaataaagaagacatcaagaaaac

SEQ ID NO: 355159 - DNA, 271 bp, Homo Sapiens
tctagaggatgcttataggcggagatgcttgactcaggagtcagagattgagtgagtcgagatcgtgtcatgcactctaatttgggcaaaagagtgagactcaagataaggaagagtggatactggggagtctaggccaccataagtttcaggtacagccaatgcaaagccttggaaatccacctgacagctccggttgtaccgtccgccctccgatatctggggtttccaacattccggcgattcacatcaactctcgtttccagttcca

SEQ ID NO: 355160 - DNA, 1648 bp, Homo Sapiens
cccagatctacccagacccggagctggaagtacaagtattgggcctgcctatccgctgcatccacagtgaggagggctgccgctggagtgggccactacgtcatctacagggccacctgaatacctgcagcttcaatgtcattccctgccctaatcgctgccccatgaagctgagccgccgtgatctacctgcacacttgcagcatgactgccccaagcggcgcctcaagtgcgagttttgtggctgtgacttcagtggggaggcctatgagagccatgagggtatgtgcccccaagcgcactcagccctgcacctactgcactaaggagtttgtctttgacaccatccagagccaccagtaccagtgcccaaggctgcctgttgcctgccccaaccaatgtggtgtgggcactgtggctcgggaggacctgccaggccatctgaaggacagctgtaacaccgccctggtgctctgcccattcaaagactccggctgcaagcacaggtgccctaagctggcaatggcacggcatgtggaggagagtgtgaagccacatctggccatgatgtgtgccctggtgagccggcaacggcaggagctgcaggagcttcggcgagagctggaggagctatcagtgggcagtgatggcgtgctcatctggaagattggcagctatggacggcggctacaggaggccaaggccaagcccaaccttgagtgcttcagcccagccttctacacacataagtatggttacaagctgcaggtgtctgcattcctcaatggcaatggcagtggtgagggcacacacctctcactgtacattcgtgtgctgcctggtgcctttgacaatctccttgagtggccctttgcccgccgtgtcaccttctccctgctggatcagagcgaccctgggctggctaaaccacagcacgtcactgagaccttccaccccgacccaaactggaagaatttccagaagccaggcacgtggcggggctccctggatgagagttctctgggctttggttatcccaagttcatctcccaccaggacattcgaaagcgaaactatgtgcgggatgatgcagtcttcatccgtgctgctgttgaactgccccggaagatcctcagctgagtgcaggtggggttcgaggggaaaggacgatggggcatgacctcagtcaggcactggctgaacttggagagggggccggacccccgtcagctgcttctgctgcctaggttctgttaccccatcctccctcccccagccaccaccctcaggtgcctccaattggtgcttcagccctggcccctgtggggaacaggtcttggggtcatgaagggctggaaacaagtgaccccagggcctgtctcccttcttgggtagggcagacatgccttggtgccggtcacactctacacggactgaggtgcctgctcaggtgctatgtcccaagagccataagggggtgggaattggggagggagaaagggtagttcaaagagtctgtcttgagatctgattttttccccctttacctagctgtgccccctctggttatttatttccttagtgccaggagggcacagcaggggagccctgatttttaataaatccggaattgtatttattaaaaaaa

SEQ ID NO: 355161 - DNA, 1089 bp, Homo Sapiens
  misc_feature (968)..(968): n is a, c, g, or t
  misc_feature (1011)..(1011): n is a, c, g, or t
  misc_feature (1013)..(1013): n is a, c, g, or t
  misc_feature (1018)..(1018): n is a, c, g, or t
  misc_feature (1029)..(1029): n is a, c, g, or t
  misc_feature (1031)..(1031): n is a, c, g, or t
  misc_feature (1051)..(1052): n is a, c, g, or t
  misc_feature (1055)..(1055): n is a, c, g, or t
  misc_feature (1059)..(1060): n is a, c, g, or t
  misc_feature (1062)..(1062): n is a, c, g, or t
  misc_feature (1068)..(1068): n is a, c, g, or t
  misc_feature (1072)..(1072): n is a, c, g, or t
  misc_feature (1083)..(1083): n is a, c, g, or t
agtcggcgccgcccggagccgggagcgccgctccagcgaggcgcgggctgtggggccgccgcgtgcctggccccgctcgcccgtgccggccgctcgcccgccatgcctggcttcgactacaagttcctggagaagcccaagcgacggctgctgtgcccactgtgcgggaagcccatgcgcgagcctgtgcaggtttccacctgcggccaccgtttctgcgatacctgcctgcaggagttcctcagtgaaggagtcttcaagtgccctgaggaccagcttcctctggactatgccaagatctacccagacccggagctggaagtacaagtattgggcctgcctatccgctgcatccacagtgaggagggctgccgctggagtgggccactacgtcatctacagggccacctgaatacctgcagcttcaatgtcattccctgccctaatcgctgccccatgaagctgagccgccgtgatctacctgcacacttgcagcatgactgccccaagcggcgcctcaagtgcgagttttgtggctgtgacttcagtggggaggcctatgagagccatgagggtatgtgcccccaggagagtgtctactgtgagaataagtgtggtgcccgcatgatgcggcggctgctggcccagcatgccacctctgagtgccccaagcgcactcagccctgcacctactgcactaaggagttcgtctttgacaccatccagagccaccagtaccagtgcccaaggctgcctgttgcctgccccaaccaatgtggtgtgggcactgtggctcgggaggacctgccaggccatctgaaggacagctgtaacaccgccctggtgctctgcccattcaaagactccggctgcaacacaggtgccctaagctggcaatggcacggcatgtggaggagagtgtgaagccacatctggccatgatgtgtgccctggtgagccggcaacgnagggagctgcaggagcttcggcgagagctggaggagctatcantngggantgatggcgtgncntctggaaaatggcactatgnncgnggcnnangaggcnaagncaaccaacttnattctt

SEQ ID NO: 355162 - DNA, 1150 bp, Homo Sapiens
cggtccggaattcccgggatccggagccgggagcgccgctccagcgaggcgcgggctgtggggccgccgcgtgcctggccccgctcgcccgtgccggccgctcgcccgccatgcctggcttcgactacaagttcctggagaagcccaagcgacggctgctgtgcccactgtgcgggaagcccatgcgcgagcctgtgcaggtttccacctgcggccaccgtttctgcgatacctgcctgcaggagttcctcagtgaaggagtcttcaagtgccctgaggaccagcttcctctggactatgccaagatctacccagacccggagctggaagtacaagtattgggcctgcctatccgctgcatccacagtgaggagggctgccgctggagtgggccactacgtcatctacagggccacctgaatacctgcagcttcaatgtcattccctgccctaatcgctgccccatgaagctgagccgccgtgatctacctgcacacttgcagcatgactgccccaagcggcgcctcaagtgcgagttttgtggctgtgacttcagtggggaggcctatgagagccatgagggtatgtgcccccaggagagtgtctactgtgagaataagtgtggtgcccgcatgatgcggcggctgctggcccagcatgccacctctgagtgcccccaagcgcactcagccctgcacctactgcactaaggagttcgtctttgacacccatccagaaccaccagtaccagtgcccaaggctgcctgttgccctgccccaaccaatgtggtgtgggccactggggctcgggaggaactggcaggccatctgaaggacagctgtaacaccggccctggtgctctgccccattcaaaaactcccggctgcaaacaccagtggcccttaacttggcaaatggcccccgccattttggaaggacaaatgttaaaacccccttccttggccaaggatggtgggccccctggttgaacccggcaaacccgcaagagagcctgccaggaaagctttctggcaaaaaacttgtaagggaacctatacccagtgggtccactggaaaggccccgcgctctctctcttgggaaaacactcggcccccccttttggcacggcccgccccttaacggagcgg

SEQ ID NO: 355163 - DNA, 855 bp, Homo Sapiens
  misc_feature (330)..(330): n is a, c, g, or t
gagcagtgtccggccatggccggagcccgcaggctggagctaggcgaggccctggcgctggggtcgggctggcgtcatgcgtgccacgctctcctctacgcgccggaccctgggatgctcttcggccgcatcccgctgcgctacgccatactgatgcagatgcgcttcgatggacgcctgggcttccccggcggattcgtggacacgcaggacagaagcctagaggacgggctgaaccgcgagctgcgcgaggagctgggcgaagcggctgccgctttccgcgtggagcgcactgactaccgcagctcccacgtcggggtcagggccacngccgttgtggcccactttctatgccaagcgtctgacgctcgaggagctgttggctgtggaggcccggcgcaacacgcgccaaggaccacgggctggaggtgctgggcctggtgcgagtgcccctgtataccctgcgggatggtgtaagaagcctgcctaccttcctggagaattcctttattggctctgcgcgggagcagttacttgaaagctctccaggacttgggactgctgcagtctggctctatttcaggccttaagaatccagctcatcactagaggcagccccccatggacccatgaaaactgagatgaagaccttggtactagggagggagggaaagacgtgggaatgttttcttattggatctgagagatgatacatgataccagatgacacgacggagaagtgtgtaccatatgtttgagcagaggaccctccaacttatggcatcaggcgcaaaaagtcacagttatccacgcaacctggcaggttctcagagcctgctcctccctgtttatatc

SEQ ID NO: 355164 - DNA, 1039 bp, Homo Sapiens
  misc_feature (8)..(8): n is a, c, g, or t
  misc_feature (18)..(18): n is a, c, g, or t
  misc_feature (26)..(26): n is a, c, g, or t
  misc_feature (32)..(32): n is a, c, g, or t
  misc_feature (39)..(39): n is a, c, g, or t
  misc_feature (49)..(49): n is a, c, g, or t
  misc_feature (983)..(983): n is a, c, g, or t
tattagtntataattatnttcccacnttgctntaaactntagtgctacncctcaagatgtatcatacctttcaccagtgttgtcaaatgtgtcctcagatattgcatcagcattatttggaacttttgaaactacaaattctcaggttcctctccccccgccccaccaccaatgcaggaatgctgagagaaatcgctattttaataagacgcccccgatgattctgctacctgccaaattttgagaaccaccttcatacataatctatctactagccctgcctgaaatatcagggccacatctcctacacaagaaaagcaaaccccaagaataaaacctaggttgccacacctagataatgtgataatctatcacactgtcaatagggaacagcagagagacatggatgagtgtgttctagaaaggatctctcctggtaaagggtgggaaagacctttacagaaagcccaggttggcagtactaattcagagtatagatgatcacgatcccaactccaccaagaaagctggggagagggcaaggtcagaggggcaaagacttttctccagggatgctttcttgggggagagaaagctttgggagaagaggaaattgggaaagggacagagtcccaggctggtcccacctccagcccgtggtccttggcgcgtgttgcgccggcctccacagccaacagctcctcgagcgtcagacgcttggcatagaagtgggccacaacgcgtggccctgacccgacgtgggagctgcggtagtcagtgcgctccacgcggaaagcggcagccgttcgcccagctcctcgcgcagctcgcggttcagcccgtcctctaggcttctgtcctgcgtgtccacgaatccgccggggaagcccaggcgtccatcgaagcgcatctgcatctgcgggagggggaagcggggattggcaggggcgccccagaggagaccaccagagagggtgcggggntcaggcagaaagtggccgggcgcgcccccttctcaccagtatggcgtagcgcagcg

SEQ ID NO: 355165 - DNA, 1009 bp, Homo Sapiens
  misc_feature (67)..(134): n is a, c, g, or t
  misc_feature (136)..(136): n is a, c, g, or t
  misc_feature (205)..(205): n is a, c, g, or t
  misc_feature (318)..(318): n is a, c, g, or t
  misc_feature (409)..(409): n is a, c, g, or t
  misc_feature (874)..(874): n is a, c, g, or t
cctaaacaaagggtgggtgtttttgtttttctcccaggggccccgggcgcttaaattttttttccgnnnnnnnnnnnnnnnnnnnnnnnnnnnnnnnnnnnnnnnnnnnnnnnnnnnnnnnnnnnnnnnnnnnntntttccccggcctgctggggtttatttgtctagctggggcagggtagggagggtcccagtcccaacagcntgggccttgggacagggcgggggcagtgatggcccctggagccctactgggggtggtagatgtggtcttggtcttcctccggtcccaggagcacctggtgatttggcatcacnccacaaccggggcctctcctcgccctggtcctcctcaggcggagggtggtacaggctgtcatggtcgggctcgggactcaggacacggccncagggtgtcctcggtctccatccaggccttggtgcctggaaggatggggcccctgccctgacctcgtggcttctcctcggtggtcaagagtttcggcttctggacagggaacagcaccaccagctggtcgtccttctccggaggctccaccacacgggcgccccaggccctgttctctgggtcctgctctgagggccagtgtttgacttgcatcttgatagggaccttgggtgctgggactgcacctgcctcccacagcagcacaaccaccaggctggtgaccaggaggagcctcctcatgtctggggtccgcgtctctgtagagagtgctcagggagctgcagtggctgatcccagtatctggcacccggcccagctcctcctgcccaggcccaggccaattggggctttgttgctgccgcttggggcgtgtcaggacagaggtcggggccagggatcccaccntgggtagctcaggtgactggctctgcagccgcccagcccactcgggcctggatctgagcgggacacccagctgcctgctcagggcctgccacacgactcaggaagagtcttcagcaccggggtgggtggtctggg

SEQ ID NO: 355166 - DNA, 931 bp, Homo Sapiens
  misc_feature (673)..(736): n is a, c, g, or t
gcagcgggcggcgagcgggaggcactggcctccagagcccgtggccaaggcgggcctcgcgggcggcgacggagccgggatcggtgcctcagcgttcgggctggagacgaggccaggtctccagctggggtggacgtgcccaccagctgccgaaggccaagacgccaggtccggtggacgtgacaagcaggacatgacatggtccggtgtgacggcgaggacagaggaggcgcgtccggccttcctgaacaccttaggctggtggggctgcggcaagaagcgggtctgtttctttacttcctccacggagtcggcacactatggctgccctctgggctcccagaacccacaacatgaaagaaatggtgctacccagctcaagcctgggcctttgaatccggacacaaaaccctctagcttggaaatgaatatgctgcactttacaaccactgcactacctgactcaggaatcggctctggaaggtgaagctagaggaaccagacctcatcagcccaacatcaaagacaccatcggaacagcagcgcccgcagcacccaccccgcaccggcgactccatcttcatggccaccccctgcggcggacggttgaccaccagccaccacatcatcccagagctgagctcctccagcgggatgacgccgtccccaccannnnnnnnnnnnnnnnnnnnnnnnnnnnnnnnnnnnnnnnnnnnnnnnnnnnnnnnnnnnnnnnttctgagagattcaaagcctccacgactctgtttccccccgtcccttctggaatttaatttgcactaagtcattttgcacctggtttggaatttgtggaagacggcccctgaagtcttcattaccaaatgttgccgttgaattggtgaacccacccttttggccaagagtgccctggttgcagggggcccccggt

SEQ ID NO: 355167 - DNA, 2282 bp, Homo Sapiens
gcctgggtggcgaattcggcacgaggccgaggggcaccaggggaagatggggtgctggaggagagcttgtgggagccaaggagcaccttggacatctggagtctggcaggagtgatgacgggtggaggggctagctcgaggcagggctggtggggcctgaggccagtgaggagtgtggagtaggcgcccaggcatcgtgcagacagggcgacatcagctggggacgatgggcctgagctagggctggaaagaagggggagccaggcattcatcccggtcacttttggttacaggacgtggcagctggttggacgaggggagctggtgggcagggtttgatcccagggcctgggcaacggaggtgtagctggcagcagcgggcaggtgaggaccccatctgccgggcaggtgagtcccttccctccccaggcctcgcttccccagccttctgaaagaaggaggtttaggggatcgagggctggcggggagaagcagacaccctcccagcagaggggcaggatgggggcaggagagttagcaaaggtgacatcttctcggggggagccgagactgcgcaaggctggggggttatgggcccgttccaggcagaaagagcaagagggcagggagggagcacaggggtggccagcgtagggtccagcacgtggggtggtaccccaggcctgggtcagacagggacatggcaggggacacaggacagaggggtccccagctgccacctcacccaccgcaattcatttagtagcaggcacaggggcagctccggcacggctttctcaggcctatgccggagcctcgagggctggagagcgggaagacaggcagtgctcggggagttgcagcaggacgtcaccaggagggcgaagcggccacgggaggggggccccgggacattgcgcagcaaggaggctgcaggggctcggcctgcgggcgccggtcccacgaggcactgcggcccagggtctggtgcggagagggcccacagtggacttggtgacgctgtatgccctcaccgctcagcccctggggctggcttggcagacagtacagcatccaggggagtcaagggcatggggcgagaccagactaggcgaggcgggcggggcggagtgaatgagctctcaggagggaggatggtgcaggcaggggtgaggagcgcagcgggcggcgagcgggaggcactggcctccagagcccgtggccaaggcgggcctcgcgggcggcgacggagccgggatcggtgcctcagcgttcgggctggagacgaggccaggtctccagctggggtggacgtgcccaccagctgccgaaggccaagacgccaggtccggtggacgtgacaagcaggacatgacatggtccggtgtgacggcgaggacagaggaggcgcgtccggccttcctgaacaccttaggctggtggggctgcggcaagaagcgggtctgtttctttacttcctccacggagtcggcacactatggctgccctctgggctcccagaacccacaacatgaaagaaatggtgctacccagctcaagcctgggcctttgaatccggacacaaaaccctctagcttggaaatgaatatgctgcactttacaaccactgcactacctgactcaggaatcggctctcgaaggtgaagcgagaggaaccagacctcatcagcccaacatcaaagacaccatcggaacagcagcgcccgcagcacccaccccgcaccggcgactccatcttcatggccaccccctgcggcggacggttgaccaccagccaccacatcatcccagagctgagctcctccagcgggatgacgccgtccccaccacctccctcttcttctttttcatccttctgtctctttgtttctgagctttcctgtctttccttttttctgagagattcaaagcctccacgactctgtttcccccgtcccttctgaatttaatttgcactaagtcatttgcactggttggagttgtggagacggccttgagtctcggtgcgagtgtgcgtgagtgtgagccaccttggcaagtgcctgcgcagggcccggccgccctccatctgggccgggtgactgggcgccggctgtgtgcccgaggcctcaccctgccctcgcctagtctggaagctccgaccgacatcacggagcagccttcaagcattccattacgccccatctcgctctgtgcccctccccaccagggcttcagcaggagccctggactcatcatcaataaacactgttacagcaaaa

SEQ ID NO: 355168 - DNA, 1377 bp, Homo Sapiens
cggtccggaattcccgggatctcgcgaggacggacgccattatcgcatctccccgacaaacaccacgagaattccgcagcccacacggtgaccaaaagccagccccactgtgagttgaactctttcgtgttgaccggccactctcctgtgctctggatgatgtcggaacacgacctggccgatgtggttcagattgcagtggaagacctgagccctgaccacccagttgttttggagaatcatgtagtgacagatgaagacgaacctgctttgaaacgccagcgactagaaatcaattgccaggatccatctataaagtcattcctgtattccatcaaccagacaatctgcttgcggttggatagcattgaagccaaattgcaagccctggaggctacttgtaaatccttagaagaaaagctggatctggtcacgaacaagcagcacagccccatccaggttcccatggtggccggctcccctctcggggcaacccagacgtgcaacaaagtgcgatgcgtcgtcccccagactacagtaatactcaacaatgatcggcagaacgccattgtagccaagatggaagaccccttgagcaacagggcaccggattccctggaaaatgtcattagcaacgctgtgcctgggcgtcggcagaacaccattgtggtgaaggtgccgggccaagaagacagccaccacgaggacggggagagcggctcggaggccagcgactctgtgtccagctgtgggcaggcgggcagtcagagcatcgggagcaacgtcacgctcatcaccctgaactcggaagaggactaccccaatggcacctggctgggcgacgagaacaaccccgagatgcgggtacgctgcgccatcatcccctccgacatgctgcacatcagcaccaactgccgcacggccgagaagatggcgctaacgctgctggactacctcttccaccgcaaggtggcaggctgtgtccaaccctctcggggcaaggcaagcacggggaaaaaacagctgggacccgctcaccatctacggcatccggtgtcaccttttctataaatttggcatcacagaatccgactggtaccgaatcaagcagagcattgactccaagtgccgcacggcgtggcggcgcaagcagcggggccagagcctggcggtcaagagcttctcgcggagaacgcccaactcgtcctcctactgcccttcagagccgatgatgagcaccccacctcctgccagcgagctcccgcagccacagccgcagccgcaggccctgcactacgcgctggccaacgcacagcaggtgcagatccaccagatcggagaagacggacaggtgcaagtaatcccacagggacacct

SEQ ID NO: 355169 - DNA, 1056 bp, Homo Sapiens; identical to SEQ ID NO: 97689

SEQ ID NO: 355170 - DNA, 821 bp, Homo Sapiens
agcgggtcactgcgttcggacccagacccgctgcaggcagcagcagcccccgcccgcgcagcagcatggagctctggggggcctacctcctcctctgcctcttctccctcctgacccaggtcaccaccgagccaccaacccagaagcccaagaagattgtaaatgccaagaaagatgttgtgaacacaaagatgtttgaggagctcaagagccgtctggacaccctggcccaggaggtggccctgctgaaggagcagcaggccctgcagacggtctgcctgaaggggaccaaggtgcacatgaaatgctttctggccttcacccagacgaagaccttccacgaggccagcgaggactgcatctcgcgcgggggcaccctgagcacccctcagactggctcggagaacgacgccctgtatgagtacctgcgccagagcgtgggcaacgaggccgagatctggctgggcctcaacgacatggcggccgagggcacctgggtggacatgaccggcgcccgcatcgcctacaagaactgggagactgagatcaccgcgcaacccgatggcggcaagaccgagaactgcgcggtcctgtcaggcgcggccaacggcaagtggttcgacaagcgctgccgcgatcagctgccctacatctgccagttcgggatcgtgtagccggcggggcgggggccgtggggggcctggaggagggcaggagccgcgggaggccgggaggagggtggggaccttgcagcccccatcctctccgtgcgcttggagcctctttttgcaaataaagttggtgcagcttcgcggaaaaaa

SEQ ID NO: 355171 - DNA, 749 bp, Homo Sapiens
  misc_feature (611)..(673): n is a, c, g, or t
cggcttagcccagagcctggcctcctctgtaagagtggaaaacctgggttccttctgccctcatcttattagtagctgtgatgggcacacactcagccaagcactgagatgttgtgaacacaaagatgtttgaggagctcaagagccgtctggacaccctggcccaggaggtggccctgctgaaggagcagcaggccctgcagacggtctgcctgaaggggaccaaggtgcacatgaaatgctttctggccttcacccagacgaagaccttccacgaggccagcgaggactgcatctcgcgcgggggcaccctgagcacccctcagactggctcggagaacgacgccctgtatgagtacctgcgccagagcgtgggcaacgaggccgagatctggctgggcctcaacgacatggcggccgagggcacctgggtggacatgaccggcgcccgcatcgcctacaagaactgggagactgagatcaccgcgcaacccgatggcggcaagaccgagaactgcgcggtcctgtcaggcgcggccaacggcaagtggttcgacaagcgctgccgcgatcagctgccctacatctgccagttcgggatcgtgtagccnnnnnnnnnnnnnnnnnnnnnnnnnnnnnnnnnnnnnnnnnnnnnnnnnnnnnnnnnnnnnnntggggaccttgcagcccccatcctctccgtgcgcttggagcctctttttgcaaataaagttggtgcagcttcgcgg

SEQ ID NO: 355172 - DNA, 792 bp, Homo Sapiens
  misc_feature (740)..(752): n is a, c, g, or t
ggactgcatggtaacctgggcttgaccctgaagcccctgcctggcaggccacaggacctctcctgcccacttggtgctatctcttccagtgaccacccagcacgggtgagcactggccagcctggagcctgcaatccaggtggaacagactgtcctccatgtcagttccttctggcttcaggccctcaattatttccctttgagcttttttagaccctagatctcctaggcccaggctctctcttgaccccagagaagccactgtcaggaaaggaagtgaaccctactgaagccagagaattcaccccggccaaagcaggccctctgggtccagcccctcattccacaccacgccagtattgcatccatctactgcagctacacatcctgagggcagcaccacccactctggcctgctggcccatcgcaggactagcccaggcacctgccgggcattgcaggatatccagtggggcctgtgactgctccctgatgcgtcagaagagaagtgttgcactttagtggaggagctgaggagcacctgcccccttgtagcttgagttccttttggtaacagtagcagcctccatggtggtgtctgggatgcacgtgcacccgctgccttcagctgtatgtgtgtgttcctgctggagttgtgttactgacaggataatgacattacaaagaaattgtgttatattcaactttgccttgataattattgtaaacactttgttcannnnnnnnnnnnnattcacaaactaaatccaccaggaaattataaagttattt

SEQ ID NO: 355173 - DNA, 1261 bp, Homo Sapiens
  misc_feature (147)..(147): n is a, c, g, or t
  misc_feature (245)..(245): n is a, c, g, or t
  misc_feature (247)..(247): n is a, c, g, or t
  misc_feature (357)..(357): n is a, c, g, or t
  misc_feature (552)..(552): n is a, c, g, or t
  misc_feature (1022)..(1030): n is a, c, g, or t
gttcctggaggacaacgtctgctcgcgctgccgtgtggcgtgccacttagccccgctcgcggtctggatttgacaaccagaaggtgtacgccgtgtaccggagcccggaggaattgggcgccgggcccgagagcccccgcgcgcccnccgcgactggggcgcgctgttgctccacaaggcccagatcctggcgctggcagaagacatatctgaccttgaaaacagtgtgatgcagaagaaaatananatccccaagctttctcttaatcatgtagaagaagatggagaggttaaagattatggcgaagaagatttacagcttagacacatcaagagacctgaggggcggaagccgangcgaagtggcgcacaagagcatcgaggcagtggtggctcggctagagaagcagaacgacctgagcctgggccatagcacgtgtccggaagagggtcttcgtggaagcctcgccaggcacagaggacatggacagtctagaagatgctgtggtgccccgggctctgtatgaggagctgctgcgcaactaccagcangcaacaggaagagatgcgccacctccagcaagagctggagcgggactcggaggcagctggtacaacaggccaagaagctcaaggagtacggggcacttgtgtctgaaatgaaggagctccgtgaccttaaccggaggctccaggacgtgctgctcctgaggcttggcagcggtcccgccattgatctggaaaaagtaaagtcagaatgtctcgagcccgagccggagttacggagcactttcagtgaggaagcaaatacgtcgtcctattaccccgctcctgcgcctgtcatggacaagtatatcctagacaatggcaaggtccatctgggaagcgggatttgggttgatgaggagaaatggcaccagctacaagtaacccaaggagattccaagtacacgaagaacttggcagttatgatttggggaacagatgttctgaaaaacagaagcgtcacaggcgtcgccacnnnnnnnnngaaagatgcagtccctaaaccacccctctcgcctcacaaactaagcatcgtcagagagtgtttgtatgacagaatagcacaagaaactgtggatgaaactgaaattgcacagagactctccaaagtcaacaagtacatctgtgaaaaaatcatggatagcaataaatcctgtaaaaatgaagaacgaagggaagcaaaatacaatttgcaataaactttggatttttcata

SEQ ID NO: 355174 - DNA, 1311 bp, Homo Sapiens
gggagagtgcgcgcgcgcacgttgtgcgcaggttcgaatctccgccgcttcgcggttgcttctcaacgtccgggccgcatctcggcggcggcgagggctgagcgcgggagctgcctccgagccggagccccagccctaggccctgcgcgagctgccccgccctaccccctccagcgtcctgtcgcctcctcgcccgacttcggcctgtccctctctcacgcgctcagtcctcgctcttcgccccccgcagctatcggcactcggtctcccgcgcctggcgggctccgcccgagcctctgggcccatggccaagcggcgtgcggccgagccggtgacgttccacgtgccttggaagcggctcctgctttgcgacttcgctgagcagccgccgccaccgcctctctggatccggccgcccggggtcgcgcatgctgggcagctcctcggcgtcccagagcagcaccgaaagcgcaaaatcgacgcagggaccatggcagagccctcggcttcgcccagcaagcgccgtgacagcggggacaacagcgccccgagcggccaggagcgtgaggaccacggtctggagacaggcgatccgccgctgccgccgccgcccgtactgccggggccgggggaggagctcccgggcgcccggctcccggggggcggtggcgacgacggggcggggcgcgcaggacccccgcggggagactggggggtcgcatcgcgccagcacaatgaagaattttggcagtataataccttccagtactggaggaatcctttgcctcctattgatctggcagacattgaagatttaagtgaagacaccctgacagaagcaacacttcagggcaggaatgaaggggctgaggttgacatggagtcctgatgtaaggagccgaagcagtgggattggctgatttgaggagatgtctctaagtgaattctcgtattcttaagggaaaagttattttccatacttgaagttatatttccaaacctgagaaatgaagaaagattgttctgacattaaatacctacagttactactgaacctcttaataaggatttgtcaaggatagagtacagttgtaggggaagtattttatgtatgcattcttagagcaaaaagttttgtttaaattctagaattgaaggtactgatcttataaaaagaaattctagcagttttagaaataggtgggaaaaactcaaatattcctcctatctgcaccaaaaagtttatttgtggtatataaaatgaatattgttttataataacttgttaataaagtactttctaatacattc

SEQ ID NO: 355175 - DNA, 1829 bp, Homo Sapiens
  misc_feature (1258)..(1259): n is a, c, g, or t
  misc_feature (1263)..(1273): n is a, c, g, or t
  misc_feature (1279)..(1281): n is a, c, g, or t
  misc_feature (1289)..(1290): n is a, c, g, or t
  misc_feature (1354)..(1354): n is a, c, g, or t
  misc_feature (1564)..(1564): n is a, c, g, or t
cagaagttccacctcaccatcaagaaaggccctggtccaggatgtgcaaggtgtgatgaaagtcacagggctggggaaggtcagctcggggtcacaagaagcctgatgggcaggaaagagcatgaaagccccagccagcctcacctgtgcggctgggaggactcacagaaaccctctgtacccagtcatgggccaaagacaccgtcatgcaagggggtgaaggctccacactcgtcccggccccgggcgtggaagcaggacctcgagcagtctctggcagcagcctatgtgccggtcgttgtggactctaaggggcagaatccggacaagctcagggtacagtctcccctggggctgcaaggatttagtggagactcttaacaccagttctctggcatctgtgagtttgagtgtgggccatcatcttcttccttctgctctctccctctccacatttcccggtaccatctgatccatcaggcccttctttgctcaggcctgaaggactcaggcctgtgagagaggacggccccgttgtcggccaagacacctttgggcgaggagcagcgaacagggcctgtccatctcagacgtcagccccctgaaggcctgagcaatgggcaacgtgatggagggaaagtcagtggaggagctgagcagcaccgagtgccaccagtggtacaagaagttcatgactgagtgcccctctggccaactcaccctctatgagttccgccagttcttcggcctcaagaacctgagcccgtcggccagccagtacgtggaacagatgtttgagacttttgacttcaacaaggacggctacattgatttcatggagtacgtggcagcgctcagcttggtcctcaaggggaaggtggaacagaagctccgctggtacttcaagctctatgatgtagatggcaacggctgcattgaccgcgatgagctgctcaccatcatccaggccattcgcgccattaacccctgcagcgataccaccatgactgcagaggagttcaccgatacagtgttctccaagattgacgtcaacggggatggggaactctccctggaagagtttatagagggcgtccagaaggaccagatgctcctggacacactgacacgaagcctggaccttacccgcatcgtgcgcaggctccagaatggcgagcaagacgaggagggggctgacgaggccgctgaggcagccggctgagtgcaccgcccggctgcttctgactagcggtggggnntttnnnnnnnnnnncctgtnnnggggggtnnttttggttttccccttggatggaatttattgaactcagagggcttagcttggctttttagggtncatggtggcagcagagaggcagaagtggggagtccagagccaggaacagtgaaggatggttcctggcccctctgagtgacagctggtggcagcactccttgctggggggcactggtaaacatccctctgccggcgggtgaccccctaacctttctgactctcttccagcttttcccagctttcccactgagcttttcagccatgcttttntggacgtggactcttgaagaaaactgaacttttcagccttttatgaatctgcaatccaggggctgagtttaatccagggctgaatacacatcatcttgccttgggacccggaagctactgggcgctttgattaattgatgaccccccttaacagcttactggcgcctcatgccaaagctaagagtaaggccaaaaaaactttcatccttagaactaaagctatggggacacccgcccacttttttaaaaatgctaggaaaataag

SEQ ID NO: 355176 - DNA, 947 bp, Homo Sapiens
gctgggtggcgaattcggcacgaggccggggacggctgctggagcggcgcccgccgcggctcagcgcattcccgctctccgcttccctctccgctgcgtccccgcgcgaagatggcaaccgaggggctgcacgagaacgagacgctggcgtcgctgaagagcgaggccgagagcctcaagggcaagctggaggaggagcgagccaagctgcacgatgtggagctgcaccaggtggcggagcgggtggaggccctggggcagtttgtcatgaagaccagaaggaccctcaaaggccacgggaacaaagtcctgtgcatggactggtgcaaagataagaggaggatcgtgagctcgtcacaggatgggaaggtgatcgtgtgggattccttcaccacaaacaaggagcacgcggtcaccatgccctgcacgtgggtgatggcatgtgcttatgccccatcgggatgtgccattgcttgtggtggtttggataataagtgttctgtgtaccccttgacgtttgacaaaaatgaaaacatggctgccaaaaagaagtctgttgctatgcacaccaactacctgtcggcctgcagcttcaccaactctgacatgcagatcctgacagcgagcggcgatggcacatgtgccctgtgggacgtggagagcgggcagctgctgcagagcttccacggacatggggctgacgtcctctgcttggacctggccccctcagaaactggaaacaccttcgtgtctggggggatgtgacaagaaagccatggtgtgggacatgcgctccggccagtgcgtgcaggcctttgaaacacatgaatctgacatcaacagtgtccggtactaccccagtgggagatgcctttgcttccagggatcagatgacggctacgtgtcgcctctatgacctgcggggcagataagggaggttgccaaca

SEQ ID NO: 355177 - DNA, 1738 bp, Homo Sapiens
  misc_feature (264)..(333): n is a, c, g, or t
  misc_feature (940)..(956): n is a, c, g, or t
  misc_feature (992)..(1002): n is a, c, g, or t
  misc_feature (1154)..(1154): n is a, c, g, or t
  misc_feature (1196)..(1196): n is a, c, g, or t
  misc_feature (1233)..(1233): n is a, c, g, or t
ggaggggcgggggaaaggaggcggagccaggctgtgtcccctgaccgttggagcgtctgcgacccccgtaatccccgcaccgctcaaggcacctccaaatgatgatgatgggttgtggggagtcagagctgaagtcggcggacggggaagaagccgcggcggtcccggggccacccccggagccccgaaatcccgcaactccgagccccagtgcccgagcccggcctggacttgagcctgagcccgcggccgacagccctcagnnnnnnnnnnnnnnnnnnnnnnnnnnnnnnnnnnnnnnnnnnnnnnnnnnnnnnnnnnnnnnnnnnnnnnaggtccgcttccgcctgacgccgccctccccggtgcggtccgagccgcagcctgcggtgccgcaggagctggagatgcccgtgctgaagagcagcctggcgcttgggcctggagctgcgggccgcagccgggagccactttgatgctgcgaaggccgtggaggaacagctgagaaagtcgttccagatccgctgcggcctgcaggagagcgtgtccgaggggctgaacgtgccgcgctccaagcggctcttccgggacctggtgagcctgcaggtgccggaggaacaggttctgaatgccgcgctcagggagaaattggctctcctgccgccacaggctcgagccccgcacccaaaggagccacctgggcctgggccagacatgaccatcttgtgtgacccagaaacgctattttatgaatctccacacctgaccctggacggtctgccccctctccgacttcaactccggccccgcccttcagaggacaccttcctcatgcaccggacactgaggcgatgggaagcgtagaccccaaagatccctggagggctagttcgtatttttgtgttaaactatttgttagaataaagtaattttgctaatnnnnnnnnnnnnnnnnncacacgccaccccggaaacagctttcacaccagacnnnnnnnnnnntaaacacactttgttgggccccctcggcccccccaaaaaatttttcaaaaaccatttctttatgtgggcgcgggggccccccgcaaggaaaaaggggaacccgggggcccaaaacggttgtgtttcccatagggaaaaatcccgcggggtcnaatgaaactaaaaggggtctttgggacaatctcccacacccnataaataacaaaaaaacacgcgccccccgcgaggggngtccaacacaccacaataccgcgttctctccccgtagaaaccacacaacatctccgccaacaatagagtggagacgaatctctcgtggaggacgaggggctcactattttatcatgcgcggggagatttctctttgtctcacaacacgcgggggaggcgtcgccgaagctcgcgggagcaccttcccggagaatatatctccaatttgttgtcgcgcggccgccggggtctcgttgggagacgagtctcttctgtccgcgcaaacaaacgtggggcgcgggaaattgtccacgctacagaggcgttcttctcgtgcgcgcacacacgcggtataacaccctctcttccagataacggcgcccgtggaagagcacacacctgagccagcgccccccgcgggcggccatataatacaccctcctgtggctcgcccctggcggcaataaaaaatatttcgtcccccttggtggtaaaaacccgcggcacgcaaagaaaacttggctct

SEQ ID NO: 355178 - DNA, 635 bp, Homo Sapiens
gggaaagacccgtgccagcgggcgtgtggccgcgggtttcgcacggtccaataagggagggcggcgtggcccggcctggtagcgacgaggacgcgcctgcgcagaggcggcagcaccaccggggttgactccgggggcgcggcgaggagagacatgaggctgagctggttccgggtcctgacagtactgtccatctgcctgagcgccgtggccacggccacgggggccgagggcaaaaggaagctgcagatcggggtcaagaagcgggtggaccactgtcccatcaaatcgcgcaaaggggatgtcctgcacatgcactacacggggaagctggaagatgggacagagtttgacagcagcctgccccagaaccagccctttgtcttctcccttggcacaggccaggtcatcaagggctgggaccaggggctgctggggatgtgtgagggggaaaagcgcaagctggtgatcccatccgagctagggtatggagagcggggagctcccccaaagattccaggcggtgcaaccctggtgttcgaggtggagctgctcaaaatagagcgacgaattgagctgtaaccagactggggaggggcagggggagaggcccccatcagggaccagactgttcc

SEQ ID NO: 355179 - DNA, 1785 bp, Homo Sapiens
  misc_feature (1334)..(1356): n is a, c, g, or t
  misc_feature (1403)..(1419): n is a, c, g, or t
gcggcgctgaagagaccggttgccgccatgatagaacagcagaagcgtaagggcccagagttgccgctggttccagtcaagcggcagcggcatgagttgctgttgggagcggggtctggcccaggagccgggcagcagcaggcgacgccgggagccttgctgcaagcgggacctccaagatgttcctcccttcaagccccaatcatgctgctctctggacatgaaggggaagtctactgctgcaagttccaccccaacggatccaccttagcatctgcaggatttgaccgactgatattactgtggaatgtctatggtgactgtgataactatgccacactgaagggacacagtggagcagtgatggaattgcattacaacacagatggcagtatgcttttctcagcatccacagataaaaccgtggctgtgtgggatagtgaaacaggtgagagggttaaaaggctaaagggacatacttcctttgtgaattcctgttatccagccaggagaggccctcagcttgtctgcactggcagtgacgatggcacagttaagctttgggacatccggaagaaagcagccatccagacatttcagaacacgtaccaggtgttagctgtgaccttcaatgacacaagtgatcagattatttctggtggaatagacaatgatatcaaggtctgggacctgcgccagaacaagctaacctacaccatgagaggccatgcagattcagtgactggcctgagtttaagttctgaaggctcttatcttttgtccaatgcaatggacaatacagttcgtgtctgggatgtccggccatttgcccccaagagagatgtgtaaagatatttcaaggaaatgtgcacaactttgaaaagaaccttctgagaatgttcttgggtcacctgatggaagcaaaatagcagctggctcagccgacaggtttgtttatgtgtgggataccacaagcaggagaatattgtataagctgcccggccatgctggctccatcaatgaagtggctttccaccctgatgagcccatcattatctcagcatcgagtgacaagagactgtatatgggagagattcagtgaagatatggactggaagactccaaggccgcttgtctttgagacctcagactgcataagtgatgccaaatgttggatgtccaggctagcaccctcccttcagatgaccattgctagcaagaaacaggaggcggtggccatattccaaaaaccacttctgtcccatttcaccaggatgactaaggcaagctccctgtggcctctaaaaaccacctgccagatttcagggactgcnnnnnnnnnnnnnnnnnnnnnnncctgttttctaatgcaggcccaatgtgacaaatttgttggttgggannnnnnnnnnnnnnnnnggaactgggcttgaatgaaaatttttctttctgggatttcctcaatattccttttgggaattaaaagcccaaataagatgcccttttcttcgccccgtattacctcgccccctgtagcaccaaaaacctcgagggtcttctttggtcggggggccgggaatacaaaggggtaattaaaaatggcccacctgggcccataaacttgttttccctggaccccaacctttttcttggaacaaagggtgggaaatatttgcccggttcccccctaataaggggaccccgtatataatttcttccaaaaaccagaggtttaaaccctggatttaaatggaaaatcgggttcgaaaaaaccgcggggaaatc

SEQ ID NO: 355180 - DNA, 396 bp, Homo Sapiens
  misc_feature (76)..(76): n is a, c, g, or t
  misc_feature (136)..(136): n is a, c, g, or t
  misc_feature (280)..(280): n is a, c, g, or t
  misc_feature (353)..(353): n is a, c, g, or t
  misc_feature (368)..(368): n is a, c, g, or t
  misc_feature (374)..(374): n is a, c, g, or t
accggttgccgccatgatagaacagcagaagcggaagggcccagagttgccgctggttccagtcaagcggcagtcnattgagttgctgttgggagcggggtctggcccaggagccgggcagcagcaggcgacgcgnggagccttgctgcaagcgggacctccaagatgttcctcccttcaagccccaatcatgctgctctctggacatgaaggggaagtctactgctgcaagttccaccccaacggatccaccttaggcatctgcaggattttgaccgantgatattactgtgggaatgtctatgggtgactgtggataactatggccacacttgaaggggacacagttggancagtgatgggaattncatttnccaacacagatggggcagtatt

SEQ ID NO: 355181 - DNA, 1054 bp, Homo Sapiens
cctgagtggcgaattcggcacgagggcgagtcgggcgccaagcgcggggccggagcggccttcccggagtcctttgcgcggcacctggcgacaaaatggctgcccgagggagacgggcggagcctcagggccgggaggctccgggccccgcgggcggtggcggtggcgggagccgttgggctgagtcgggatcggggacgtcgcccgagagcggggacgaggaggtgtcgggcgcgggttcgagcccggtgtcgggcggcgtgaacttgttcgccaacgacggcagcttcctggagctgttcaagcggaagatggaggaggagcagcggcagcggcaggaggagccgcccccgggtccgcagcgacccgaccagtcggccgccgccgctggccccggggatccgaagaggaagggcggtccgggctccacacttagcttcgtgggcaaacgcagaggcgggaacaaactagccctcaagacgggaatagtagccaagaagcagaagacggaggatgaggtattaacaagtaaaggtgacgcgtgggccaagtacatggcagaagtgaaaaagtacaaagctcaccagtgcggtgacgatgataaaactcggcccctggtgaaatgacgcccctcccccacctgcccatggcctgggactctctgcgatgtacataactatttaatgcagcggcagcggcgacagccttccctgagaggacttaaaagcagaaggaaaccgagatgcttcccgcagccgtggacgattctccaggactctttttttaccttgagcacttgcctcgtgagacttcatagaacagtggtttactgtcccccccttctcacctcctcattctctctggctctttctgtcttcctcttctcaccctcctccctccccttagccatcacttctgggaagtaaagaacttgacttagtgccggaaaaagtagaacacagaaaacaggggggcgggcctaaaggtatcctgaggggcgcaagtttagggagtaccggcttttgggcacaaggggccaaagggggggataaag

SEQ ID NO: 355182 - DNA, 415 bp, Homo Sapiens
  misc_feature (53)..(114): n is a, c, g, or t
  misc_feature (180)..(180): n is a, c, g, or t
  misc_feature (211)..(211): n is a, c, g, or t
ccggacactaagtcaagttctttacttcccagaagtgatggctaaggggaggnnnnnnnnnnnnnnnnnnnnnnnnnnnnnnnnnnnnnnnnnnnnnnnnnnnnnnnnnnnnnnacagtaaaccactgttctatgaagtctcacgaggcaaagtgctcaaggtaaaaaaagagtcctggnagaatcgtccacggactgacgggaaagcatnctcggtttccttctgcttttaagtcctctcagggaaggctgtcgccgctgccagctgcattaaatagttatgtacatcgcagagagtcccagggccatgggcaggttgggggaggggcgtcatttcaccaggggcacgagttttatcaatcgtcactcagcactggtgagcatttgtacatttttcacttctgccatgttactt

SEQ ID NO: 355183 - DNA, 498 bp, Homo Sapiens
  misc_feature (11)..(11): n is a, c, g, or t
  misc_feature (32)..(32): n is a, c, g, or t
  misc_feature (41)..(41): n is a, c, g, or t
cacactcaatnaaaagcctgaataccaaaacngcagggaanaaggctgggcgcaaaaagctggaagggaaaaggcaaatgtgggtggaccccctgcaccaagctggctcacctcatcctccgtcttctgcttcttggctactattcccgtcttgagggctagtttgttcccgcctctgcgtttgcccacctgggtgaagggacagaagactgcaacggttacaggagccggcgcagcccttggcggcgctgaggcccactacaccttcctagccccgcctggtggcccgtcctgacgccgcgcccagctccgccagccggccgacctgcgcagcaatcagagaggagcacacgcgactcagcgcctgccctgggcccgcggtgccctcccagggagcaagaagagtgtccacctcagtagggaccagctctgttctcactttccacgccaaggcctcaccctccctagcagggaccacaagaggtggcaacagctccc

SEQ ID NO: 355184 - DNA, 1719 bp, Homo Sapiens
  misc_feature (324)..(324): n is a, c, g, or t
gtttctagcttcccttcaacttctgtccgcaacccaatgcagttccccagcccccagacgggctccggggggttgtccgcctggctttggggtgctgggaaagcactgtgggcgggcaccctgtccactgcctgccacctgttgggtcctgaggcttctgagggagagaaggacaaggatgggaggaaggggagggcaggggcctggaacccaccctagcttcttggtggagcctgggtctcaggttctggaaggctggagggcaagtcctgcctcctcccttctgcctgggggtccccttctccctggttcccgccctccagncagctcttggggggtccctgaggaagacccaccatgacccgtgatgttgtcgtgggagccccgctcccgggccgcagccaccagctcctcggcgacacggagcccgctgccctgctgcctggtcaggtggctctggaccaggccaacaacttcctggtggggtacgacgtcaaagaagccatcacaggcaagcagcaggtagtcctcggagcccgtcagcgcccgggaagctgcatcggcctccccagacacgtagggcttctggaagacatccccgatggctctggagacggccagggtcccgttgactctccagcagtccatgtgagacacaaagccacccaatgcttcaatgcgcgccttctcatcctgccgttctggtctgtgtggctccatcagcttcaccacctgtccctgctgtaccaaaatgacctgggaatccccgagccaggcgacggtgccagggggtttttccggcctttcccccgttggccaaaattggagcgcacacacacctgtggtccgctctgcagccgctctcgcttggcttccctgagaaacatctggtcggtgcgccggaaggcttctctgagggctccctcagggtctgtggccagctctgggctggcgggcagcgttggtgtgcacgtggacagcggcgtacctcgcagcatccacgcctccgtgaccatcaaacacagcaaagtaggcgcggttcacagggtcagacaagccgaagagctggttgaaggaagggagggacacgtgccggtcctccatcttgcggcgagtgttccggatggcgtggatggagaccagccactgccgctgtgaggcccgggcagccaatggcacctgcttctgccactggccggcgacttcccaaaggcggttaaagaaactctgtgccaggctttgggcatccagcaaggtcacaggggccttttcctcctcgtcatcgtcctcctcctcttcttcttcctccctgggcaacttcctgaattcggaaaggtctgtctgtagcagctgtgaaactgcttcgtgggccagagcagcagcaagtggtggcggggccttcctgctgcccagaaagcccatggccagctcagccagctcgccctccacctcctcctggctgagcaccgtccctggggccttccatggcagagggtcctctgggttcagcagggctgggaagtcttgcaggagcgtgtccaggaagcctggggtctcctcagctccactggccattgggctgctcttctgtggggctccagaggacatgcccaaagcatcccgggggcctgcagctaggccagggcaagagggtctccaggcttcacccctggtctccgcgggcctcagctgtctcctcgcggctccgtgtcccgcccc

SEQ ID NO: 355185 - DNA, 1176 bp, Homo Sapiens
  misc_feature (1042)..(1042): n is a, c, g, or t
  misc_feature (1114)..(1114): n is a, c, g, or t
agcggagtgctgctgcccgctgggtggtactgctacctagtgggtcttggggaccttcgaaatcgccgcgctctcacaatggcttgggtccagactgcgccacagcctctcgggagacgtgggccctcggaacctttttagtgccggactccgggccgcaggcagtcccgcggcagcaggatcacagctcttgaggctagtgcgcctctaggcaagatgtccctgcccatcgggatataccgccgggcagtcagctatgatgataccctcgaggaccctgcgcccatgactcctcctccatcggacatgggcagcgtcccttggaagccagtgattccagagcgcaagtatcagcacctcgccaaggtggaggaaggagaggccagtctaccctcccctgccatgaccctgtcatcagccattgacagtgtggacaaggtcccagtggtgaaggctaaagctacccatgtcatcatgaattctctgatcacaaaacagacccaggaaagcattcagcattttgagcgacaggcagggctgagagatgctggctacacaccccacaagggcctcaccaccgaggagaccaagtaccttcgagtggccgaagcactccacaaactaaagttacagaagtggagaggtaacaaaagaagagaggcagccttgcatcagcccagtccaccccaagcaccactccgcactcttcacctaagcagaggcccaggggctggttcacttctggttcttccacagccttacctggcccaaatcctagcaccatggactctggaaagtggggaataaggacagaaactttgtcagataagtggagcctctttggaccgagatcccttcagaagtacgattctggaagttttgccacccaggcctaccgaggagcccagaagccctctccattggaactgatacgtgcccaggccaaccgaatggctgaagatccagcagccttgaagccccccaagatggacatcccagtgatggaaggaaagaaacagccaccacgggcccataacctcanaccccgtgacctgaatgtgctcacacccactggcttctagagccctctttccagggattctggtaaggtggnttcttgcatcccactccccttttacctttgcttttgacataggaaggtatatttaaaaactt

SEQ ID NO: 355186 - DNA, 920 bp, Homo Sapiens
gggaccttcgaaatcgccgccgctctcacaatggcttgggtccagactgcgccacagcctctcgggagacgtgggccctcggaacctttttagtgccggactccgggccgcaggcagtcccgcggcagcaggatcacagaacctctggatggactcttcctgggaagctttgctactttgcagcagctggaccatgttcctcattaacatctgtctgtccgcttagtcatcacatcatttcactgtggtggcagggactcagctcggaattctgtatagaaaaagcacctggatcccagtctttcaatggcttcaagacaaccagaagtgcctgctcttgaggctagtgcgcctctaggcaagatgtccctgcccatcgggatataccgccgggcagtcagctatgatgataccctcgaggaccctgcgcccatgactcctcctccatcggacatgggcagcgtcccttggaagccagtgattccagagcgcaagtatcagcacctcgccaaggtggaggaaggagaggccagtctaccctcccctgccatgaccctgtcatcagccattgacagtgtggacaaggtcccagtggtgaaggctaaagctacccatgtcatcatgaattctctgatcacaaaacagacccaggaaagcattcagcattttgagcgacaggcagggctgagagatgctggctacacaccccacaagggcctcaccaccgaggagaccaagtaccttcgagtggccgaagcactccacaaactaaagttacagagtggagaggtaacaaaagaagagaggcagcctgcatcagcccagtccaccccaagcaccactccgcactactacacctaagcagaggcccagagcgctggtccacttctggctcttccacagcccttacctggcaccac

SEQ ID NO: 355187 - DNA, 928 bp, Homo Sapiens
agcgggtgtggtactgctacctagtgggtcttggggaccttcgaaatcgccgccgctctcacaatggcttgggtccagactgcgccacagcctctcgggagacgtgggccctcggaacctttttagtgccggactccgggccgcaggcagtcccgcggcagcaggatcacagaacctctggatggactcttcctgggaagctttgctactttgcagcagctggaccatgttcctcattaacatctgtctgtccgcttagtcatcacatcatttcactgtggtggcagggactcagctcggaattctgtatagaaaaagcacctggatcccagtctttcaatggcttcaagacaaccagaagtgcctgctcttgaggctagtgcgcctctaggcaagatgtccctgcccatcgggatataccgccgggcagtcagctatgatgataccctcgaggaccctgcgcccatgactcctcctccatcggacatgggcagcgtcccttggaagccagtgattccagagcgcaagtatcagcacctcgccaaggtggaggaaggagaggccagtctaccctcccctgccatgaccctgtcatcagccattgacagtgtggacaaggtcccagtggtgaaggctaaagctacccatgtcatcatgaattctctgatcacaaaacagacccaggaaagcattcagcattttgagcgacaggcagggctgagagatgctggctacacaccccacaagggcctcaccaccgagaagaccaagtaccttcgagtgggccgaagccactccacaaaacttaagttacaggagtgtgacaagggtaccaacagacagagaaggcagcctggattcagcccagtccaaccggaagcaacacatccggactcttccactaagcagaggccaggggctggttcac

SEQ ID NO: 355188 - DNA, 1758 bp, Homo Sapiens
  misc_feature (1684)..(1684): n is a, c, g, or t
  misc_feature (1700)..(1700): n is a, c, g, or t
  misc_feature (1733)..(1733): n is a, c, g, or t
agcgggacttcgacgtctagggagttgtagccgctaccagaaatatcgatgagcctttaccctgaggtttagaaaggcagctctttctggggcaaatacaaagagcgtgtttcttcctacaaattagtggcatcctcccgctgtatggattcagctggcaaagtaactcaagccttgtcctgactgcaagggtgggcggggtggacggctcggtgttctgcccgttgtgtcttacgctccaggtgctggtctacgcgggcctggacagtcaggggtaggagcgggagccgagaggaggcggaggagatggcgtcccagccgccacctccccccaaaccctgggagacccgccgaattccgggagccggaccgggaccaggaccgggccccactttccaatctgctgatttgggtcctactttaatgacaagacctggacaaccagcacttaccagagtgcccccacctattcttccaaggccatcacagcagacaggaagtagcagtgtgaacacttttagacctgcttacagttcattttcttctggatatggtgcctatggaaattcattttatggaggctatagtccttatagttatggatataactgggctgggctacaaccgcctccgtgtagatgatcttccacccagtagatttgttcagcaagctgaagaaagcagcaggggtgcatttcagtccattgaaaagtattgtgcatgcatttgcctctgtccagtatgatgatgggatgctaccttttcagctgttctataaccaggttcaaggctgtattggatgtagcaaatcacttttcccgattgaaaatacactttacaaaagtgttttcagcttttgcattggttaggactatacggtatctttacagacggctacagcggatgttaggtttaagaagaagctcctgagaatgaagacctctggccagagagtgaaggaactgtggcatgccttggtgctgaggaccgagcagctacctcagcaaaatcttggccaatattcttgttctttgctgttatccttggtggtccttacctcatttggaaactattgtctactcacagtgatgaagtaacagacagcatcaactgggcaagtggtgaggatgaccatgtagttgccagagcagaatatgattttgctgccgtatctgaagaagaaatttctttccgggctggtgatatgctgaacttagctctcaaagaacaacaacccaaagtgcgtggttggcttctggctagccttgatggccaaacaacaggacttatacctgcgaattatgtcaaaattcttggcaaaagaaaaggtaggaaaacggtggaatcaagtaaagtttccaagcagcaacaatcttttaccaacccaacactaactaaaggagccacggttgctgattctttggatgaacaggaagctgcctttgaatctgtttttgttgaaactaataaggttccagttgcacctgattccattgggaaagatggagaaaagcaagatctttgatatctttcatgtttgcctgcagttgaacaatactttagagtactttttaaattatttctcacaaagaaatgaatgtacaatccaatgaaaacatttgttattggctatttcaggtgttttgctgctagaaattattaaagtacacactagtttgttggnccctggtgaccctgtntacattttaatatccacatttattggaccatanggacattttgttcacctagattttt

SEQ ID NO: 355189 - DNA, 1250 bp, Homo Sapiens
  misc_feature (110)..(173): n is a, c, g, or t
  misc_feature (341)..(401): n is a, c, g, or t
aattcccgggatgtggccaatagacgcattcggaaatcggcggctgcccgggtgacttggttatatgtcacagaataacattcgagaatgggacatggaatgaggcgacnnnnnnnnnnnnnnnnnnnnnnnnnnnnnnnnnnnnnnnnnnnnnnnnnnnnnnnnnnnnnnnntgctctcccgccgcccggagaggctctgcagccatgaagccaaccgtcccgaggcaccgccggtaagcagggagcctccgcggagctcccgccgccgctcccccttggtgagtcctgccgcagcgagaggcatggagaaggccgcccccgcggggcgctgatcccctnnnnnnnnnnnnnnnnnnnnnnnnnnnnnnnnnnnnnnnnnnnnnnnnnnnnnnnnnnnnnagtacctcgctccccgtccaggccccaccatgaccggctccgcggccgacactcaccgctgcccccaccccaaaggcgccaaaggcacccggtcccggagcagccacgcgcggcccgtgagcctcgccaccagcgggggctcacaggacgatgacccctaccgtggggtgctgtcccacccccattacagcggcttcgccatggacgcccactaccgcggaccgcctggtggatgcacgtggaccaacgcggcactctatggggggcaaaaacgccggggggcccccaagggaaaggtcgccccccgccggcaaaaggcttattttggcgccccccaacgaacaacaggaaacgcctctttctgggccgcggcaaattcccacaccgggggaaccctttctccgctgcctaccccatggaatctgacaactccacgtcacaacaaaccggccgcgccaccgaaaacaaatatacggcatataaacggcagattcgtaagaaacctcccctcaatctctcttttaccctgttgcgcacacgcagcaatacgcccacgcgcggcggacgccacatttcttcgcggcctttgtacgcggggcccacacacgggaaccatccctcttttgattgccgcgggcggggggggcagtattcgccggccgcttcggttcttggcgcgcccccacaaaacactcgtcttcctatgccccacaataattcccgagagagcggcgccccacgcgggggggaaaggaaaaacgggacgtatgaaggaagccccttttcgcgagactaccctaccaacaggggacccaccactatgcgccccccgccgcgatgtgcactcat

SEQ ID NO: 355190 - DNA, 1629 bp, Homo Sapiens
aggaagctctgcagatcatccacagtgccgagccccggctcctcccagatggggcggccgacggcagcttctacctccactcccctgaggggccctccaagccatccctggcctccccctacctgcccgaggggacctccaaaccactgtccgacaggcccaccaaagcaccagtgtacatgccacaccccgagaccccctcgaaaccatctccctgtctggtgggggaggcatcgaaaccgccagccccatccgaggggtccccgaaggcggtggcttcgtccccagcagccaccaactccgaggtgaaaatgaccagctttgcagaacgcaagaaacagctggtgaaggcagaggctgaggcccggagcgggtcccccacgtccactccggccccgccggaggccctgagctcggagatgagtgagctcagcgcccggctggaggagaaacgcagagccatcgaggctcagaagcgacggattgaggccatattcgccaagcaccgccagcggcttgggcaaaagcgccttcctgcaggtgcagccgcgggaagcctctggggaggccgaagcagagccggagaaggccgattccgggtccagtccctggtggggagccgcccgcaggcgagggccaggtgagccaacctcacggcccaaggcagtgaccttctctgccagacctgggcccggtgccccacgaggggctgggggaaataacaatcgaagcggtcagcaagcttgagttgcccgccttttgaagccttcgctgcaagcggggaccattgccaggaagcttcacgggagccagcaagcaagcggctccctttggcccggcccgaatggcccccgagattcccggccccaagccatccgtttgcattagcggttggggttcaattccctctgtccccccaccgaaccgggggcgcaaaagcttggtattcccgcaaaggagccgggcccggggggaatgttcccggggcaaccccagggcggccaaccccttggggccccgggggcccaagcccaggtaagaccccaggagaggcccaggaaaatcacataggccggggccaaagcgggataggcctatgacgggttggggaaccgcccttttgggaaccaaggggggttggcattaacggcccaaacacccagagaaaacggttagaaacaagggacggtatcacaccccaagcgatggtagtgccaagaggttctatccggcccagaaggcaccaggggttgcccccggattggcaaggaagagccgagccatacattatacccaaattaccattcccttaggggcggggaaaggacagaaacgggacgcccaccacgggaagggggaaagaccccaagatgcgagcccacgggagcccgtggggggggcgcattcatagattcggaaggaaataccgcccggtgttttgggggcaaggggccctagagagcagggaaattcccccggggcagcggcccggagcgagaccggagggggcgaacagacgcgcgagaaggcccccccggagtttagcgttgcttgaggggaattttcccctttgtgaagagaaggagagaggggggatgatatatcgggaaagtgtgtgggaaggccccg

SEQ ID NO: 355191 - DNA, 1832 bp, Homo Sapiens
  misc_feature (835)..(835): n is a, c, g, or t
  misc_feature (841)..(841): n is a, c, g, or t
  misc_feature (852)..(852): n is a, c, g, or t
  misc_feature (871)..(871): n is a, c, g, or t
  misc_feature (877)..(877): n is a, c, g, or t
  misc_feature (880)..(880): n is a, c, g, or t
  misc_feature (900)..(900): n is a, c, g, or t
  misc_feature (912)..(912): n is a, c, g, or t
  misc_feature (944)..(944): n is a, c, g, or t
tcctctccccatcctctcccaaccaccccaaggataccctaactctgaggccacgagtccggaattcccgggatgcggcggtagcagcagcgggcccggctggggcgcgagcgcggcgcagcccagcccagcccagtccgagcgcggacccggcgcccgcagccccggcgcccccatggtggaggcggcgccccccgggcccgggccgctgcggaggacctttctagtgcccgagatcaagtcgctggaccagtacgatttctcgcgggccaaggcggcggccagcctggcgtgggtgctgcgggccgcgttcgggggcgcagagcacgtgcccccggagctgtgggagcccttctataccgaccagtacgcgcaggagcatgtgaagcccccggtgacacggctgctgctctcagccgagctctactgcagagcctggcgccaggcactgccacagcttgaaacaccccccaacccctctgcactgctggccctgctggcgcggaggggcacagtgcctgctttgcccgagcgcccggtgcgcgaggccgacctgaggcaccagcccattctcatgggagcccaccctagctgtcattgatgccctcatggctgcctttgccttcgagtggacaaagaccctgccaggtcccttagaccctaaccagcttagagcacaaagctgcttttctgggtggacacgaccgtccggcggctgcaggagaagaccgaacaggaagcggcccagcgagcctctccagcagcccctgcagacggggcggccccggcgcagcctcgtgccctacgcgctggtactggaagctggttcctcacncaattnccttctgtttnaaggagtcggggagcaaanccccanganccgataccgcaagaccgtgnggtggcgcgacntgcccctgcttcccgacggtgaccacctccangacctggccagtggggccgcgctggccgccaccatccactgctattgtccccagctgcttcgacttgaggaggtgtgcttgaaggaccccatgtctgtggcggacagcctgtacaacctccagctcgtgcaggatttctgtgcctctcgccttcctcgtggctgccccctgtcccttgaggacttgctgtacgtcccaccgccactcaaggtcaacttggtggtgatgctggccgagttgttcatgtgttttgaggtgctcaagcccgactttgtgcaagtgaaggacttgcccgatggtcacgctgcctccccccggggcactgaggcctccccacctcagaacaacagcggcagtagttctcctgtcttcaccttccgccacccgcttctgtcatcgtggtggccccctagtccccactccgaggatccacaggctccctgaagtcttccccgtccatgtcccatatggaggccctgggcaaggcctggaaccggcagctcagccgtcccctctcccaggctgtgtcattcagcaccccctttggcctggacagcgacgtggatgtcgtcatgggagaccctgtgctcctccgctctgtgagctcggacagcctgggagcaggggagggccgagccggcggtgagaggcacgagaagggccccgatatgggacatggacggggaagcactgcagggagccgtggatccacggagtggggcacccgggggccaccagatgacagaagcggatggcggcaggtgcagaccagcccacactaacgcaagacgccagtacagagcaggcgaggccgcagcagcagactaagggaaataaaggaacagagaaccccagacacaacaagacaaaaccatgacaacagcaaca

SEQ ID NO: 355192 - DNA, 1105 bp, Homo Sapiens
cccaactgctggccttgattgtcaatcttgagctctgccaggggtttcattatctcttaacgccatcaatcagtgccaggaatccccaactcccgtgataaagttggactccaccatttaagctcttcaaaagtttgttcactttcaggcatttctgcaaaaagcagtagcaacaggggtcattgctccggggtgggctgcaaagacttgaaaacatttcacatgtgtgttggtttccaaagcctttgcaaaatcttttagggttggaattgggatattctttatattattcaaattaacttcaaacaagatgagcatcgttttctttagttctcttcaaactctcttctacattggttggatttggtggctcatcaaataccggaagaatcttttcacctttgaccacatttgaaaaatgttcttggtcaacacccattactacttcccattatattacagaactttgtattcgttatcaaattgtacatcccaagaattactgcgaggtcacacaattatgtatcagaagcactggtcaaagcttcttctaagtctggatcaagagacactttttcttctgtaaaagtctatacaggtttctgtttggggataaatattttcccttttttgtctccagggtagggcacatagtcttccctgtctttatgctccgatgcttctttgctccagatatgaaaggagatgctctctatcaaatggccctgtggtggactttgatgtctggttcttgtgccggaaccctgcaggcagaagggcattctcggggtcaagatcatccaaaacagtttccagttgtttcagttctgtttctgacagattcccaaggagctcatcttcatcaaggtctttgtacttttctaagtccttacggaatggcagtgccatgatgtgcagggcagcaagtcacttaatttttgctgttcagtacagtcagaagtgatctctactttttcttaaagctgactggcgcccgcaggggccgccgacctcttcacagacccacggaaactgccggccgcaagccgaggctcggttcccagcacccgccggtccgcccgcgtcggcctcccagaagagttgc

SEQ ID NO: 355193 - DNA, 1200 bp, Homo Sapiens
  misc_feature (975)..(975): n is a, c, g, or t
cgggactcgaacggaagttccggcgggggcggcgagggggaagagtgtgtctgcgggagaaagaggagaatcgcccaagcggcctcggaagtcccagggagtggaggcccccgccgtggagccgtgtggtgtatgtgtggtaacaccatgtctgtgcccctgctcaccgatgctgccaccgtgtctggagctgagcgggaaacggccgcggttatttttttacatggacttggagacacagggcacagctgggctgacgccctctccaccatccggctccctcacgtcaagtacatctgtccccatgcgcctaggatccctgtgaccctcaacatgaagatggtgatgccctcctggtttgacctgatggggctgagtccagatgccccagaggacgaggctggcatcaagaaggcagcagagaacatcaaggccttgattgagcatgaaatgaagaacgggatccctgccaatcgaatcgtcctgggaggcttttcacagggcggggccctgtccctctacacggccctcacctgcccccaccctctggctggcatcgtggcgttgagctgctggctgcctctgcaccgggccttcccccaggcagctaatggcagtgccaaggacctggccatactccagtgccatggggagctggaccccatggtgcccgtacggtttggggccctgacggctgagaagctccggtctgttgtcacacctgccagggtccagttcaagacatacccgggtgtcatgcacagctcctgtcctcaggagatggcagctgtgaaggaatttcttgagaagctgctgcctcctgtctaactagtcgctggccccagtgcagtaccccagctcatggggggactcagcaagcaagcgtggcaccatcttggatctgagccggtcgagcccctgtccccacccctcctgacctgtccttttcccacaggctctgggggggcaggtggncaaggcctggcccgggccttcctttcctggcccttagcccacctgggctctggcctgcaaccaggggcagggctgcttttctttatccaattttccctgggaagggggggcccccccctgggcagcaataattggaagggggctaacaggcaaacttgggaagaaaaaggggccccaacccgcttgaaacccactccacttcagggacccttcacttcactatag

SEQ ID NO: 355194 - DNA, 1401 bp, Homo Sapiens
atccggtacggtccggaatttccaggatttcctcctgagcatgatgggccccctggctctctttccccaggcctaggatccctgtgaccctcaacatgaagatggtgatgccctcctggtttgacctgatggggctgagtccagatgccccaaaggacgaggctggcatcaagaaggcagcagagaacatcaaggccttgattgagcatgaaatgaagaacgggatccctgccaatcgaatcgtcctgggaggcttttcacagggcggggccctgtccctctacacggccctcacctgcccccaccctctggctggcatcgtggcgttgagctgctggctgcctctgcaccgggccttcccccaggcagctaatggcagtgccaaggacctggccatactccagtgccatggggagctggaccccatggtgcccgtacggtttggggccctgacggctgagaagctccggtctgttgtcacacctgccagggtccagttcaagacatacccgggtgtcatgcacagctcctgtcctcaggagatggcagctgtgaaggaatttcttgagaagctgctgcctcctgtctaactagtcgctggccccagtgcagtaccccagctcatgggggactcagcaagcaagcgtggcaccatcttggatctgagccggtcgagcccctgtccccacccttcctgacctgtccttttcccacaggcctctgggggcaggtggcaaggcctggccgggccttccttcctggccttagccacctggctctgtctgcagcaggggcaggctgctttcttatccatttccctggaggcgggcccccctggcagcagtattggaggggctacaggcagctggagaaaggggcccagccgctgacccactcactcaggacctcactcactagccccgctttgggccccctcctgtgacctcagggtttggcccatggggccctcccaggcccctgccccaactgattctgcccagataatcgtgtctcctgcctccactcagctgcttctcagtcatgaatgtggccatggccccggggtccccttgctgctgtgggctccctgtccctgggcaggagtgctggtgaggaggtggagccttttgaggggggccttccctcagctgtttccccacactggggggctgggccctgcctccccgttaccctccttccctgcaggcctggagcctgtagggctggactgaggttcaggtctccccccagctgtctcacccccactttgtccccactctagagcagggaggcagtgggggaggagttgtgtctcgtcttctgtctccatgtggtttttgggtgtttttcttgttgtgtcctggattccgataaaattaaagaaattgcttcctcaaaaaa

SEQ ID NO: 355195 - DNA, 579 bp, Homo Sapiens
  misc_feature (31)..(31): n is a, c, g, or t
tggtgggggcaagtgaaggcccgtgtaaaangggaaaaggccccgcccctgtgaaaaaacctccccaaggacgaattcgaattggcaagggatcccgttcttcatttcatgctcaatcaaggccttgatgttctctgctgccttcttgatgccagcctcgtcctctggggcatctggactcagccccatcaggtcaaaccaggagggcatcaccatcttcatgttgagggtcacagggatcctaggcgcatggggacagatgtacttgacgtgagggagccggatggtggagaggccgtcagcccagctgtgccctgtgtctccaagtccatgtaaaaaaataaccgcggccgtttcccgctcagctccagacacggtggcagcatcggtgagcaggggcacagacatgtgttaccacacatacaccacacggctccacggcgggggcctgcatacatcggggcggcggtcaagagcaaaaccaggcacaggacacactccctgcccaatgagccaccaggccatcagccccacacagcacccaggttctgtcctgctgctgctgccactgactgcaaa

SEQ ID NO: 355196 - DNA, 984 bp, Homo Sapiens
  misc_feature (933)..(933): n is a, c, g, or t
  misc_feature (939)..(939): n is a, c, g, or t
  misc_feature (959)..(959): n is a, c, g, or t
  misc_feature (963)..(963): n is a, c, g, or t
ggagccccctcggcttggcattcacagtgtccatgtccactggtggcctccagagggtcattccggagagcctcatgaaaaggccgggccccttcttcctccgctcgccttcctcctccaagtctatcgtcgtcccgccaacttctgatttcgttcacccttctggcggctgctccctcttacctccatctgctcctccattacctccttctccgccaggccttccttcaccaccacctcagcgctctccctctcagccacggctgctgagacggtggcgcactttcctgtcttcacctcctccgcctcagcctccgcccccgccgtcagctcagacgcggatctctgggcgccacagatttctagggccttctctccaccctgaacgccctttttcaggctgcggtcggctgccatcaccacagaagcggctgccaggccttcggcgggaggctggccctcttcctgcccggctttgatcgccacatgaccgcgacccccaacaactcggatctggggagtaccgccacggcccgcggcatcctggggtacgcccccctcctctgaaggcggtggaggcgggagcgcgacggtctccgagcctccctcacccggctccgccatcacctgtgtcgcctcgctttggtcgcggagcctcaggtactggtgtgcgtcctggtcgctcgggacttggtcagaaataatgatgctgtgggtttggaggggagtggtcctcttgaccccatccaggccgctcatgttgctaacagtcggaccaaccgcaggcgaacgcccgttttcctcagaggccgaactgggagctaaccgccgctcgcaccgcccaccctacagtctcccgctctcgacgattcgagctcgccgattgcctgatcatactcgatatgataatcgagtatcgcgcacacagacggntaaacngcctcgcgagggttcgcccncaantcgtaggtcatgatacagtgc

SEQ ID NO: 355197 - DNA, 1648 bp, Homo Sapiens
  misc_feature (593)..(671): n is a, c, g, or t
gacagcttatagaaagttgagatggtcctaatgtaggtaaatagaaatctcaaactgatattgatactttcaggatattttgaataatcttgaatcatgtgaccttgaggatgatgatcttatgcttgatgtggatctgcctgaggatgcacctcttgaaaatgtggagtgtgacaatatgaaccgctttgaccgaccagacagaaatgttcggcagcctcaggaaggtttttggaaaaggccaccccagaggtggagtggacaggagcattaccacctcagccaccctgaccactatcatcaccatggaaaaagtgacttgagcagaggctctccctatagagaatctcctttgggtcattttgaaagctatggagggatgccctttttccaggctcagaagatgtttgttgatgtaccagaaaatacagtgatactggatgagatgacccttcggcacatggttcaggattgcactgctgtaaaaactcagttactcaaactgaaacgtctcctgcatcagcatgatggaagtggttcattgcatgatattcaactgtcattgccatccagtccagaaccagaagatggtnnnnnnnnnnnnnnnnnnnnnnnnnnnnnnnnnnnnnnnnnnnnnnnnnnnnnnnnnnnnnnnnnnnnnnnnnnnnnnntccaactattagaacttcagcttgcaactcagcatatctgccaccaaaaatgtaaagaggaaaaatgcacttatgctgataaatatacccaaacaccctggagacgaattcctcctcaagtactacagccttccagcagccttcccagacccacagatcacacccagggaaaactaataaagccacaacgtatcgaggcccgcagtgaatgctcaatccaagacatgcatcagggcggtgcacatccggaagaaagctttacacacgtcttgcaccaagaaagcaactatggtttggaagagcagcctttttcatcaggcccacaattaacaatggatgtggctaagagtacaccttctgaagcaaacttaaacattactgtaaatgctcaagagccttatcatttggcaaacaatcaaattagtgacatgcagtttatacccacttctcttcagacacctcccgagtcaagtacagtagaccaggctaagagagttggaagaaatcagtctccgccagtgggttatatgtctcaggcccaaagtccttgcagcttttaaagccatccatatggagttctttggtaccgcctccagtttctgaatcatctccaagtaggactcccacttgtaaaaagtcaccaataatcacaacatgtaattcagcaaaacttcagccaacatctagtcaaacaaatcttgcaaataatcagaatctgaaagcatctaagctccggcccccctcaggctctttcaaacaaaaacaaacaaacagaccccaactagagcctcaaagcttccaggccaagacaagcatcccaagggccactaacacaacgaaaagaaatcatgcagaatcccaaatggcaatttgcattcttggggattgtttggcctctaatcgatattctcgtcttcctaaaccaaagatacattaagtacataggcatcacctgccaatttgtttctttaaaaaca

SEQ ID NO: 355198 - DNA, 1221 bp, Homo Sapiens
  misc_feature (429)..(429): n is a, c, g, or t
  misc_feature (1211)..(1211): n is a, c, g, or t
agggtggctgaggtggtaatgctcctgtccactccacctctggggtggccttttccaaaaaccttcctgaggctgccgaacatttctgtctggtcggtcaaagcggttcatattgtcacactcccccatttcaagaggtgcatcctcaggcagatccacatcaagcataagatcatcatcctcaaggtcacatgattcaagattattcaaaatatctatgctgttcatttcagaggactcatagctcccaactggatggacatttccaatgggttccaagccttcttcatcccacatgtatgttccatcagagctatcagatggagagagttcaaacgaagaaccagctctgtagtctgtatctggtgaaaccaaaattattcccagaagtatgttttgtacattcactcctgtcagagacacttatantctatccattcatcagttttactgaaggctttttcattttccttgggggaatcaaacatatcctgtggtggcccattttcatgtttctcttctttgagagacatttcctctggagttattctagttctgttggagtcttctatatctataaaatcatcactaaagtcttcacttaaatcattcttatcagaagatgacaaagacgacaaggaaatgtcatccacatcatcactcaggtatctcattttagcatcatgtttcatggtctggttgttttttgttctataactttcattttcaatcagttcttggtccttattagcagctctgtccttagccaaaactgtagcatcttcctctacacatgtgtcagcaggtgaatttttatttccatcaactgtcatagtcccagaaaatggagatcggctagatttcagtagagagggatgaaccattctataacctaaagtagaagttacacctgggccatttggtaaagccaacttctttccaccagcagcataaggcctattaaatccataccccaaatgttcattcccattgagtacttctggctgccgggaatttcttgttagcatacttgaccgtagaggcactctaatggatagctgttggttctgataaggctttgtaagatccacagctctattaaaggaatgtgatctggttatagatgaaggtggaaggaatgaattctgaatggaatgtgaaaaactttgtgaccttaccattttttcacaattaatagatttactactgtntggggattga

SEQ ID NO: 355199 - DNA, 518 bp, Homo Sapiens
gagtcctggagccgggtgtcccagtggcaccactaggtgcctgctgctccacagtggggttcacacccagggctccttggtcccccacaacctgccccggccaggcctgcagacccagactccagccagacctgcctcacccaccaatgcagccggggctggcgacaccagccaggtgctggtcttgggccagttctcccacgacggctcaccctcccctccatctgcgttgatgctcagaatcgcctacctgtgcctgcgtgtaaaccacagcctcagaccagctatggggagaggacaacacggaggatatccagcttccccggtctggggtgaggagtgtggggagcttgggcatcctcctccagcctcctccagcccccaggcagtgccttacctgtggtgcccagaaaagtgcccctaggttggtgggtctacaggagcctcagccaggcagcccaccccaccctggggccctgcctcaccaaggaaataaagactcaagccattttggggtg

SEQ ID NO: 355200 - DNA, 2403 bp, Homo Sapiens
  misc_feature (2371)..(2371): n is a, c, g, or t
tttaaaggaaattcctcctgccgacatccccaaaaataaaaaacttctaactgatggctatgcttgtgaagttagatgccaaaatatctacttaactacaggttatgctggcagcaagaatgggtccagggatcgagctacagagctagctgtaaaactcttgcagaaacgtattgaagttagagttgtccggcggaaattcaagcatacatttggagaggacctcgtggtgtgtcagattggcatgtcctcctatgaatttcctccagctctgaagccaccagaagacctggtggtgctgggtaaagatgcttccgggcagccaatttttaatgcttctgccaaacactggaccaattttgtcattacagaaaatgcaaatgatgcaattggtatccttaacaattctgcctcattcaacaagatgtcaattgaatacaaatatgagatgatgccaaatcgcacatggcgttgtcgagtgtttttacaagatcactgcttagctgaaggttatggaaccaagaaaacaagtaaacatgcagctgccgacgaggctttgaaaattcttcaaaaaacacagcccacttatccatctgtcaaaagttcacaatgccatacaggctcttcacccagaggatctggaaagaagaaagatataaaggatcttgtagtttatgagaattcttcaaatcccgtgtgcacgctgaacgacacagctcagtttaaccgaatgacagttgagtatgtctatgaaaggatgacaggcctccgctggaaatgcaaagtgattctagagagtgaagtaattgcagaagcagttggggtgaagaaaactgtcaaatatgaagctgctggggaagctgtgaaaaccctcaaaaagacccagccaactgtcattaacaacttgaagaaaggagctgttgaagatgtgatttcaagaaatgaaattcagggccgctcagcagaggaggcttacaaacagcaaatcaaagaagataatattggaaatcagctgctgagaaagatgggttggactggtggtggtttaggtaaatctggtgagggcatacgggagcctatctcagtgaaagagcagcataagcgggaagggcttggtctggatgtagagagggtgaataaaattgccaagagagatattgaacagatcatcagaaactacgcccgctccgagagccacacagatttgactttctctagagagctgactaatgatgaacggaagcaaatacatcagattgcccagaagtatggtcttaagagtaagtctcatggggtgggccatgataggtacctagtggtaggtagaaaaagacggaaggaagacctactagatcagctcaaacaggaaggccaagtgggccattacgagcttgttatgcctcaagcaaattgagatcttactaatttattttgtaaatgcctaatgaggcagatttttgaattaaagaaatgctacatgttccggttgcagagtatattcataagatgtctcaccttgttcatttcacatagtggtttattagatattggaacctaaagaattctgtccacttgtattagcttaatccagcagatgatattgtgcagttactgtttgtgtctttgatattgctgtgtccctcagattttagtagtttgacaagcaagaacacatatccaaatggaattttaccctgagaaattatcattttaaagggcatagcacagcaatctgcaacaatatgtaaagttgatattgactacaataaaaatccagtcttaattccagatttactgaaaatgtcagatcattttgtattaatctattttcatctttgggtgaagccagttatagaatgtttgacaataaattgtgctgtacacgtaaatgcccttaccaactaaatgatgtaaaactttccttaaagtaattttagtgttccatttatttataacttcctacccatgtgatttcccagactattggaagtgatttactgtatcttgtgatatatgggttttaacaaatcctagtcttcacgctgagagagcactacttgagagagcagttgaaagtttcaaaaactttggttcaatctgaagaaaggaagcttgaactgtttgttcttggtgccttgcagagagactcacagcaactctccattatagctttcacacggtttggatgtgcagcacatccaaggcaaccacagctgtggtagagcttggtaaaagactgaagatacattggtgctttgatgaaaaggtcagttggctggtccctctctcaaaaagcttattaagcctgaaaagccaactttgtaacatatttaaaactgctattttcgcttatttctggaatgtaaaaaanaaaaatgtataaaaagaattagtgatgctcct

SEQ ID NO: 355201 - DNA, 288 bp, Homo Sapiens
  misc_feature (100)..(100): n is a, c, g, or t
  misc_feature (225)..(237): n is a, c, g, or t
gagagactcacagcaactctccattatagctttcacacggtttggatgtgcagcacatccaaggcaaccacagctgtggtagagcttggtaaaagactgnagatacattggtgctttgatgaaaaggtcagttggctggtccctctctcaaaaagcttattaagcctgaaaagccaactttgtaacatatttaaaactgctattttcgcttatttctggaatgtnnnnnnnnnnnnntgtataaaaagaattagtgtatgcttcctgaataaaaaggagccaaagttg

SEQ ID NO: 355202 - DNA, 2653 bp, Homo Sapiens
  misc_feature (291)..(334): n is a, c, g, or t
  misc_feature (533)..(533): n is a, c, g, or t
  misc_feature (1473)..(1490): n is a, c, g, or t
  misc_feature (1987)..(2000): n is a, c, g, or t
tctccggctgatcgctgccgctccgccaatacaatagagccagccactaccagcagcctggccctcttcctccttctccagagagaccaatccagccgaactcggggtttgccgtgaggacttaacgcttatctcttaaaagccagatctgttttagcctccccgcaccaccaccacctccccttccatttaccattttttggatccccggttgctacatctcaattttctctctctggatcgggtggctggggaggaggtggtgggatcttggaacaaggaaggtgtggnnnnnnnnnnnnnnnnnnnnnnnnnnnnnnnnnnnnnnnnnnnngttatttcttccattccagaaagggataaacagcacttccagggggagaaaaaaaatcatgttatcagaaagcaaagaaggtgaggagaaggaggaagtgaccatggacacaagtgaaaacagacctgaaaatgatgttccagaacctcccatgcctattgcagaccaagtcagcaatgatgaccgcccggagggcagntgttgaagatgaggagaagaaagagagctcgctgcccaaatcattcaagaggaagatctccgttgtctcagctaccaagggggtgccagctggaaacagtgacacagaggggggccagcctggtcggaaacgacgctggggagccagcacagccaccacacagaagaaaccttccatcagtatcaccactgaatcactaaagagcctcatccccgacatcaaacccctggcggggcaggaggctgttgtggatcttcatgctgatgactctcgcatctctgaggatgagacagagcgtaatggcgatgatgggacccatgacaaggggctgaaaatatgccggacagtcactcaggtagtacctgcagagggccaggagaatgggcagagggaagaagaggaagaagagaaggaacctgaagcagaacctcctgtacctccccaggtgtcagtagaggtggccttgcccccacctgcagagcatgaagtaaagaaagtgactttaggagataccttaactcgacgttccattagccagcagaagtccggagtttccattaccattgatgacccagtccgaactgcccaggtgccctccccaccccggggcaagattagcaacattgtccatatctccaatttggtccgtcctttcactttaggccagctaaaggagttgttggggcgcacaggaaccttggtggaagaggccttctggattgacaagatcaaatctcattgctttgtaacgtactcaacagtagaggaagctgttgccacccgcacagctctgcacggggtcaaatggccccagtccaatcccaaattcctttgtgctgactatgccgagcaagatgagctggattatcaccgaggcctcttggtggaccgtccctctgaaactaagacagaggagcagggaataccacggtccctgcannnnnnnnnnnnnnnnnnggtccagccaccacagcacccccgggcagagcagcgggagcaggaacgggcagtgcgggaacagtgggcagaacgggaacgggaaatggagcggcgggagcggactcgatcggagcgtgaatgggatcgggacaaagttcgagaagggccccgttcccgatcaaggtcccgtgaccgccgccgcaaggaacgtgcgaagtctaaagaaaagaagagtgagaagaaagagaaagcccaggaggaaccacctgccaagctgctggatgaccttttccgaaagaccaaggcagctccctgcatctattggctcccactgactgacagccagatcgttcagaaagaggcagagcgggccgaacgggccaaggagcgggagaagcggcgaaaggagcaagaagaagaagagcaaaaggagcgggagaaggaagccgagcgggaacggaaccgacagctggagcgagagaaacgtcgggagcacagtcgggagagggacaggnnnnnnnnnnnnnnaagggagcgggacaggcgggaccgagatcgggatagggaaagggaccgagaacgaggcagggaaagggatcgcagggacaccaagcgccacagcagaagccggagtcggagcacacctgtgcgggaccggggtgggcgccgctagctgggaaaacactagagctgcaggtaccagccactcggccccagggggttatggccacagagggataggcacagtctccaccaccctggagccaagggtctttcacatcacctatccctacatacataccaaatggaaaagtggccatccttttccccccaaacacacccccttaacctatctcttgggacttagcccgaccctccctctcatttcccattaagtctgagaggcaagagctaggttaggcaaggaggtggttggccagagatggggaacagccaggtgccccagtcctctgatttttcctccatcctgcttaccacctccctgggtacttacagccttctcttgggaacagccggggccaggactgggtcacctatgagctgaatcagcatctcctcctgagtcccagggcccctgcagttcccagtctcttctgtcctgcagcccttgcctctttcccacaggttccactttatatccaccttttccttttgttcaa

SEQ ID NO: 355203 - DNA, 2178 bp, Homo Sapiens
  misc_feature (655)..(655): n is a, c, g, or t
  misc_feature (660)..(660): n is a, c, g, or t
  misc_feature (1745)..(1770): n is a, c, g, or t
cgactaggaaccgtgcagaggagtctagggtctgagcccctggggatttaatgctgatgacagcccagcccatgtgtcaccacttgctcatcagatggactttcctttggtccctgttgtccatggtgaagggcagcatgttggttgctccaacttctcctccatccctggaggcagggactcatttcatccacctgactggaaccactgtctcagctggagtccctgaggagatgccagccacaactctccgaagagaagtattctgaccttgctgctgaatgtctgccaggtcctggggtattcacctacccccaggctaccttcatcagaggctccatgatcccactcggtgagaggaccccctccccagttacaggcagaggagaaagggactctggagtcatcacctggattccaagtattgggtggtgttattgctgcagcttgccactggtggacatagggtcctgcctgcctctcacgataaaaggcaaggatcattcctgctactcacaggccatctcatcagggactgcaagatgatgtcccttcagggccaggactgatgtctctgcccctttcccccctctatccctcgctgagcctggccaccgccagtgaactgtcttgacatcatggaaactgggcagcnttttnccacacgttttcctcccgccccccctgcgcccctgggaggactctggcagtgccgtgctgactaccacgccgtgcgcccaccttttttgccaacccaaccccccaccaattgcacagcgcctagcagggagggctcattctgattggaccggcggttgactagatacagtacacagtgagagctcgctgcccaaatcattcaagaggaagatctccgttgtctctaccaaggggggtgccagctggaaacagtgacacagaggggggccagcctggtcggaaacgacgctggggagccagcacagccaccacacagaagaaaccttccatcagtatcaccactgaatcactaaagagcctcatccccgacatcaaacccctggcggggcaggaggctgttgtggatcttcatgctgatgactctcgcatctctgaggatgagacagagcgtaatggcgatgatgggacccatgacaaggggctgaaaatatgccggacagtcactcaggtagtacctgcagagggccaggagaatgggcagagggaagaagaggaagaagagaaggaacctgaagcagaacctcctgtaccctcccaggtgtcagtagaggtggccttgcccccacctgcagagcatgaagtaaagaaagtgactttaggagataccttaactcgacgttccattagccagcagaagtccggagtttccattaccattgatgacccagtccgaactgcccaggtgccctccccaccccggggcaagattagcaacattgtccatatctccaatttggtccgtcctttcactttaggccagctaaaggagttgttggggcgcacaggaaccttggtggaagaggccttctggattgacaagatcaaatctcattgctttgtaacgtactcaacagtagaggaagctgttgccacccgcacagctctgcacggggtcaaatggccccagtccaatcccaaattcctttgtgctgactatgccgagcaagatgagctggattatcaccgaggcctcttggtggaccgtccctctgaaactaagacagaggagcagggaataccacggnnnnnnnnnnnnnnnnnnnnnnnnnnggtccagccaccacagcacccccgggcagagcagcgggagcaggaacgggcagtgcgggaacagtgggcagaacgggaacgggaaatggagcggcgggagcggactcgatcagagcgtgaatgggatcgggacaaagttcgagaagggccccgttcccgatcaaggtcccgtgaccgccgccgcaaggaacgtgcgaagtctaaagaaaagaagagtgaggaagaaagagaaagcccaggaggaacccacctgccagctgctggatgaccttttccgaaagaccaaggagctccctgcatctattggctccactgactgacagccagatcgttcaaaaagaggcagaacgggcccaaccggccaaaggaccgggaaaaaccgcgaaaggggccagaagaaaaaaacca

SEQ ID NO: 355204 - DNA, 512 bp, Homo Sapiens
tgtctcagtttcgggacggtccaccacagaggcctcggtgataatccagctcatcttgctcggcatagtcagcacaaaggaatttgggattggactggggccatttgaccccgtgcagagctgtgcgggtggcaacagcctcctctactgttgagtacgttacaaagcaatgagatttgatcttgtcaatccagaaggcctcttccaccaaggttcctgtgcgccccaacaactcctttagctggcctaaagtgaaaggacggacctgccaatgaaaatagactttcagggtctagcagaaggcaagacaaccacccaatctttagatttcccgagctgctgtcacaggagtatagtttcaaggtttgggggagggcagagagtttaggaaccttgcagtaagaatgtgagaagagtggtggtgcttcccagcactaattgagacgttgtatgtgaggccttctgcaagtcctcaaaacaaccctgcagggcaacagcttttccccctcatt

SEQ ID NO: 355205 - DNA, 1234 bp, Homo Sapiens
  misc_feature (65)..(128): n is a, c, g, or t
  misc_feature (916)..(929): n is a, c, g, or t
ccgcggctgccgccgccatttcgggcgctgctgtgaagctgaaaccggagccggtccgctgggcnnnnnnnnnnnnnnnnnnnnnnnnnnnnnnnnnnnnnnnnnnnnnnnnnnnnnnnnnnnnnnnnagccatggcgggcaacttcgactcggaggagcggagtagctggtactgggggcggttgagtcggcaggaggcggtggcgctgctgcagggccagcggcacggggtgttcctggtgcgggactcgagcaccagccccggggactatgtgctcagcgtctcagagaactcgcgcgtctcccactacatcatcaacagcagcggcccgcgcccgccggtgccaccgtcgcccgcccagcctccgcccggggtgagcccctccagactccgaataggagatcaagagtttgattcattgcctgctttactggaattctacaaaatacactatttggacactacaacgttgatagaaccagtttccagatccaggcagggtagtggagtgattctcaggcaggaggaggcggagtatgtgcgagccctctttgactttaatgggaatgatgaggaagatcttccctttaagaaaggagacatcttgagaatccgggacaagcctgaagagcagtggtggaatgcggaggacagcgaaggcaagagagggatgattccagtcccttacgtcgagaagtatagacctgcctccgcctcagtatcggctctgattggaggtcggtgagctggtaaaggttacgaagattaatgtgagtggtcagtgggaaggggagtgtaatggcaaacgaggtcacttcccattcacacatgtccgtctgctggatcaacagaatcccgatgaggacttcagctgagtatagttcaccagttttgctgacagatgggaaacatcnnnnnnnnnnnnnnccaactgccatctatacaattttcttacagatgtcaaaagcagtctagtttatataagcattctgttacctgggaatattttttagactgaactgctccattccctagtcttaattaccctattcagggtaccaacctggagaggcttggggtgttaccctcctgaattgggccattgggagggcggggaagggggcccccgccctggtgggggattccagaaaggggataagggtaatcctgggccctctcctttctcccccagggggagtggaaaaaattcccccctggggggggaaaaacca

SEQ ID NO: 355206 - DNA, 1116 bp, Homo Sapiens
  misc_feature (44)..(80): n is a, c, g, or t
  misc_feature (1022)..(1022): n is a, c, g, or t
  misc_feature (1057)..(1057): n is a, c, g, or t
  misc_feature (1064)..(1064): n is a, c, g, or t
gatgatcgatatataggggaccggaggtcacgcggtggcggcgnnnnnnnnnnnnnnnnnnnnnnnnnnnnnnnnnnnnnatcaggccaaatcggccgagctcgaattcgtcgagagcggggcggcggcaccccagcgtttaggcgcggaggcagccatggcgggcaacttcgactcggaggagcggagtagctggtactgggggaggttgagtcggcaggaggcggtggcgctgctgcagggccagcggcacggggtgttcctggtgcgggactcgagcaccagccccggggactatgtgctcagcgtctcagagaactcgcgcgtctcccactacatcatcaacagcagcggcccgcgcccgccggtgccaccgtcgcccgcccagcctccgcccggggtgagcccctccagactccgaataggagatcaagagtttgattcattgcctgctttactggaattctacaaaatacactatttggacactacaacgttgatagaaccagtttccagatccaggcagggtagtggagtgattctcaggcaggaggaggcggagtatgtgcgagccctctttgactttaatgggaatgatgaggaagatcttccctttaagaaaggagacatcttgagaatccgggacaagcctgaagagcagtggtggaatgcggaggacagcgaaggcaagagagggatgattccagtcccttacgtcgagaagtatagacctgcctccgcctcagtatcggctctgattggaggtaaccaggagggttcccacccacagccactgggtgggccggagcctggggccctatgcccaacccagcgtcaacactccgctccctaacctccagaatgggcccatatatgccagggttatccagaagcgagtccccaatgcctacgacaagacagccttggctttggaggtcggtgagctggtaaaggttacgaagattaatgtgagtggtcagtgggaaggggagtgtaatggcaaacgaggtcacttcccattnacacatgtccgtctgctgggatcaacagaatcccnatgaggnctttcagctgagtatagttcaacagtttttgcttgacagatggggaacaatc

SEQ ID NO: 355207 - DNA, 1201 bp, Homo Sapiens
  misc_feature (42)..(42): n is a, c, g, or t
  misc_feature (58)..(58): n is a, c, g, or t
  misc_feature (319)..(319): n is a, c, g, or t
  misc_feature (411)..(411): n is a, c, g, or t
  misc_feature (1086)..(1086): n is a, c, g, or t
  misc_feature (1122)..(1122): n is a, c, g, or t
  misc_feature (1126)..(1126): n is a, c, g, or t
gatagtctaggcaagaggcagtaatgtcctgaacaaggggantgccagatgggagacntaaatgaatgtattatagatgtgtttaggagagatctgtggaacttgatggttgattggatatggttgtgggaggcaggaagttgggtcatagtgaaggggaggtatcaaggatgaatctcaggattctggcttaagcagttgagtgagtggtgttagttctcactgagatagcaaataggaagacaggtttgggggaaggtaatagtttgcctatagatttgttgaatttggggtgcctggggaaaatttgagagggaanatctctgaagcagtttggatatgttgggcaaggccttcccctaactctgactgctagtcccacagtaaccctgacagctgctgctccttgcnttctcctgaacagattattgttcatgctttatccccagaacatttgttgaacacaagtgataatgttacaggtgcagtgtcacacaccaagagtcatcattcagactgttgccacagaggacatcacttcttccatatcccaagcagaactgacagtcgatagtgatattcagtcatctgattttcctgagcctccagacgccctagaagcagacactttcccagatgaaattcatcaccctaagatgactgtggagccatcatttaatgatgctcatgtatccaaattcagtgaccaaaataggcacagaactgatgaatagtgttatggtcagaacagaagaagaaatctctgacaccgaccttaaacaagaggaatcaccctctgatttagccagtgcttatgttactgagggtttagagtctcccactatagaagaacaagttgatcaaacaattgatgatgaaacaatacttatcgttccttcaccacatggctttatccaggcatctgatgttatagatactgaatctgtcttgcctttgacaacactaacagatcccatactccaacatcatcaggaagaatcaaatatcattggatcatccttgggcagtcctgtttcagaagattcaaggatgtcgaagatttgtaaactgtcattagaataattncttagaataggcagttcaagcaaagaggcacactgntaantacaacctcttcaagaaaaggagccacccccaagaggctattttaccaatttaaaagccacaggccttaagccaa

SEQ ID NO: 355208 - DNA, 444 bp, Homo Sapiens
tcagctcggtaccgggtgtcatgaaacaaatagctgagaccagaccatagaaatacacaggagcaaagagcagcctcttaaaccttcaggctaggtaatgacttgagacgattatgccctacattgtattacttgttcgcaccttcacaatgggtaagtacatttgtgtctagtaaactaaactcagtccgtttttgtatataaaagtagacttaatcattgttaaactatctttcctttttcctttagtctttccatctacagcccactggcactccaggcacctacctacttcaaacaagctcaagccaaggccttcccctaactctgactgctagtcccacagtaaccctgacagctgctgctcctgcttctcctgaacagattattgttcatgctttatccccagaacatttgtttcatgacacacggtaccgagctcga

SEQ ID NO: 355209 - DNA, 422 bp, Homo Sapiens
aagtcgtgtcggtaccggtgtgtcatgaaacagatagctgagaccagaccatagaaatacacaggagcaaagagcagcctcttaaaccttcaggctaggtaatgacttgagacgattatgccctacattgtattacttgttcgcaccttcacaatgggtaagtacatttgtgtctagtaaactaaactcagtccgtttttgtatataaaagtagacttaatcattgttaaactatctttcctttttcctttagtctttccatctacagcccactggcactccaggcacctacctacttcaaacaagctcaagccaaggccttcccctaactctgactgctagtcccacagtaaccctgacagctgctgctcctgcttctcctccattattgttcatgcttatccccgtacatccgttccatg

SEQ ID NO: 355210 - DNA, 1607 bp, Homo Sapiens
  misc_feature (34)..(34): n is a, c, g, or t
  misc_feature (123)..(123): n is a, c, g, or t
  misc_feature (152)..(153): n is a, c, g, or t
ctcccctcttaaggcttatgagctcgcccactcntggtctatctgtctagggatcttcctcattctgctgctgtatcacttccctggagctccttttcattcttgtagcgcaagcacaagggnctggttcagcttctctatgtctgcttctnntgccttctggactttcctgatgctgttcttcctgggcctgcagcctagcttgcagctcacaaatttttcgctgcagagtcctgatggcttcttctttagactcttgtagcagggaacaaagactctgaagctcagtagtcataatactcatttctgccaggctctcctccatgcctggggtctctgcgggctgaagggaaaccattgatgctactcgggtgaaagcactcttgtcacttccaagcaagggcacaggagttgattctggctcttcatctgccactgctgtcaagatgcttcccaggaaggtcctgtcattaggcagagggtgttcctgggtgggaggacaggctgtactcagcagaagggtctcttgttcagtcttctcctttagttttgtctgtagaaagagagtcaggctctgtagttgctcagtcagcagccctagcttttgagagtactgccgtgttttctccagatcttgctcctggttatctgctatggtgctggccagtttagccgttaggttctctacagtgtccttgaggttctcacactgcaagctgcgctcccggagcacttccagtgtggttttcaattgacactcaacctgacccagctccaggtgagcaacctgattctcctggtctgcaaactccaaggtctctttcaggtcccgcacctctttggccaggacagcttgttgctgctgcagttctgcctgcatgtgttttagtgccatctcttccttttgccattgagcagcctgctcctcattgctctgggtaagctggcagagtaactcatccttcatagccaggtcctgggcacaatgggtatgctgactctgtagctcttttagctggctgtccatgttggccagaatctgcaactgagcccggagatctgttgctagacgactgttttccaactccagttgttctgtttggcctttgcactcctctaactgggcagagacttgttccagcaccctagaaacctcctgcttttcctcaattgccacatcacgttcctgcagggcttgctggctcttgactgtgagtttctctgtgagttgtcgggaccgactcagcaaagctgtccatgttgtataatccagttgcatggacctccagtcttgttgcaaggtagaagtaagactcactgtctgctgaaccagctcttcttgcttggcatgaagccctaccgcatccttgcctctgagagccatttcctctctgtgccttgcctcctccctttctgctttgaggctctggagctttgccctcaatttcttcagcaaatcaaaacagcaacagaccaatgtttctgcacgccgagactcctgactcacagtagtcttatcttcttctaaatgcaacagggatagggaagcaaggatatcagctctttagagataacctcgtgccgaattcgccacccaggcctcgctt

SEQ ID NO: 355211 - DNA, 754 bp, Homo Sapiens
aaacccaggacagtagcacacagacttgacacatctcacagtgggataactaataaacttcagcatcttaaggagagccatgagatgggacaggccctacagcaggccagaaatgtcatgcaatcatgggtgcttatctctaaagagctgatatccttgcttcacctatccctgttgcatttagaagaagataagactactgtgagtcaggagtctcggcgtgcagaaacattggtctgttgctgttttgatttgctgaagaaattgagggcaaagctccagagcctcaaagcagaaagggaggaggcaaggcacagagaggaaatggctctcagaggcaaggatgcggcagagatagtgttggaggctttctgtgcacacgccagccagcgcatcagccagctggaacaggacctagcatccatgcgggaattcagaggccttctgaaggatgcccagacccaactggtagggcttcatgccaagcaagaagagctggttcagcagacagtgagtcttacttctaccttgcaacaagactgggaggtccatgcaactggattatacaacatggacagctttgctgagtcggtcccgacaactcacagagaaactcacagtcaagagccagcaagcccctgcagggaacgtggatgtgggcaaattggaggaaaaagccagggagggtttcctaggggggctgggaaacaaattccccctgccccaattttaaaagggaagggcaaaagggccc

SEQ ID NO: 355212 - DNA, 1314 bp, Homo Sapiens
gagcgaggcctgggtggcgaattcggcacgaggagtgacgtcacggcgccactttccggccggtgacagagtccagcggagttgtgggggccggaggcgccatgggagccactggcgacgccgagcagccgcggggacccagcggggccgagaggggcggcttggagctgggggatgcgggcgcagcggggcagctggttcttacgaacccttggaacataatgataaagcaccggcaggtgcagcggaggggccgccgctcacagatgacaacaagtttcacagatcctgccatctccatggatctcctccgagctgtcctgcagcccagcatcaacgaggagatccagactgtcttcaacaagtacatgaagttcttccagaaggcagcactgaacgtgcgagacaatgttggggaggaggtggacgcagagcagctgatccaggaagcctgtcggagctgcctggagcaggctaaactgctcttttcagatggagaaaaagtaatacccagattgacccatgagcttccaggaataaagcgtggccgtcaggcagaagaagaatgtgcccatcgaggaagcccccttcctaaaaagaggaaaggacggcctcctggacacatcctgtcaagcgaccgggcagccgccggcatggtatggaaaccaaaatcctgtgaaccaattcgccgggaaggccccaagtgggacccagctcgcctgaatgaatctaccacctttgtgttgggatctcgagccaacaaagccctggggatggggggcaccagaggaagaatctacatcaagcacccacacctctttaagtatgcagctgacccccaggataagcactggctggctgagcagcatcacatgcgggcaacagggggcaagatggcctacctcctcatcgaggaggacatcccgggaccttgcggccagtgatgattacagaggatgcctggatctgaagctagaggaattgaaatcctttgtcctaccctcctggatggtggagaagatgagaaagtatatggagacactacggacagagaatgagcatcgtgctgttgaagcacctccacagacctgaggccgggtcccctggccacacttggcagccctcctccaaagccctcttcctcacgtggctgaggccaccgctgggactgctcctagatggatctcagcggcattaagctgtgcctgagcgagtttgtagtgactcactgcacagcacccccagactagcatgtggttctatatttgtaaagttattgggataagaaacaattaaacagtttgtagtaaacac

SEQ ID NO: 355213 - DNA, 1865 bp, Homo Sapiens
  misc_feature (1047)..(1047): n is a, c, g, or t
  misc_feature (1647)..(1658): n is a, c, g, or t
  misc_feature (1742)..(1752): n is a, c, g, or t
  misc_feature (1795)..(1806): n is a, c, g, or t
aagaggcagtaatcataagggttataaggtagcgaggctgggtgggaattcggacgagggccgggagacctggcggagctgggggtggggtggccagtttttgcaacggctaaggaagggcctgtgggtttattataaggcggagctcggcgggagaggtgcgggccgaatccgagccgagcggagaggaatccggcagtagagagcggactccagccggcggaccctgcagccctcgcctgggacagcggcgcgctgggcaggcgcccaagagagcatcgagcagcggaacccgcgaagccggcccgcagccgcgacccgcgcagcctgccgctctcccgccgccggtccgggcagcatgaggcgcgcggcgctctggctctggctgtgcgcgctggcgctgagcctgcagccggccctgccgcaaattgtggctactaatttgccccctgaagatcaagatggctctggggatgactctgacaacttctccggctcaggtgcaggtgctttgcaagatatcaccttgtcacagcagaccccctccacttggaaggacacgcagctcctgacggctattcccacgtctccagaacccaccggcctggaggctacagctgcctccacctccaccctgccggctggagaggggcccaaggagggagaggctgtagtcctgccagaagtggagcctggcctcaccgcccgggagcaggaggccaccccccgacccagggagaccacacagcctcccgaccacttcatcaggcctcaacgaccacagccaccacggcccaggagcccgccacctcccacccccacagggacatgcagcctggccaccatgagacctcaacccctgcaggacccagccaagctgaccttcacactccccacacagaggatggaggtccttctgccaccgagagggctgctgaggatggagcctccagtcagctcccagcagcagagggctctggggagcaggacttcacctttgaaacctcgggggagaatacggctgtagtggccgtggagcctgaccgncggaaccagtccccagtggatcagggggcccacgggggcctcacagggcctcctggacaggaaagaggtgctgggaggggtcattgccggaggccctcgtggggctcatctttgctgtgtgcctggtgggtttcatgctgaaccgcatgaagaagaaagaccgaaggcagctactccttggaggagcccgaaacaagccaacgccggggcctaccagaagcccaccaaacaggaggaattctatgcctgacgcgggagccatgcgccccctcccgcctgccactcactaggcccccacttgcctcttcctttgagaactgcaggccctgggctcccctgccaccaggccaccctccccagcattccagccccctctggtcgcctcctgcccaccgaagtcctgggggttgtgcttgggaactcccactctggcttctcttgacttctggcctggagaacttaagggcaccaggggggtttttcccataaggaccttttcccccccaggccaagaacctggggattcccacccatttctgaattcgggtttttcccaaacttgaaaacaaccccctccccccggggccccattcttggaannnnnnnnnnnnaaccccactggtttttggacccaaaaggggcccccatggggggttggaaaaaaaccccgcggggggggggctttgggggtcctnnnnnnnnnnngggaaaccctctttcgtggggaggagcaccacaactctttgtnnnnnnnnnnnncgccccctttaaatgtggccggggggcaccagagaaccccccccctttgtttttttctc

SEQ ID NO: 355214 - DNA, 1171 bp, Homo Sapiens
  misc_feature (801)..(801): n is a, c, g, or t
  misc_feature (1140)..(1140): n is a, c, g, or t
ggaattcttgggatcgacgagtgcgtgaagtgaaggcgattgagaggggctgagggaattgtcctctgtggaagggactttcttttggccctaggccccttcctgcccctgtcgtcagcagagagatggaaaacttgatgactagctccaccctaccgcccctttttgcagatgaagacggttccaaggagagtaatgatctggctaccactgggttaaatcacccagaggttccatacagtagtggcgccacatcatccaccaacaatccagaatttgtggaggatctctctcaaggtcagttgcttcagagtgagtcttcaaatgcagcagaaggcaatgaacagaggcatgaagatgagcaacgaagtaaacgaggaggttggtccaaaggaagaaagaggaagaaacctcttcgagacagcaatgcacccaaatccccccttacaggatatgttcggttcatgaatgagcgtcgagaacaacttcgagcaaagagaccagaagtcccatttccagaaatcacaaggatgttaggcaatgaatggagtaaactgcctcctgaggaaaaacagcgctaccttgatgaagcagacagagataaggagcgttacatgaaggaactggaacagtatcagaaaacagaggcctacaaggtcttcagtaggaaaacccaggaccgtcagaaaggcaaatctcataggcaagatgcagcccggcaggccactcatgatcatgagaaaagaacagaggtaaagggacgggtctgttttttgacatcccctatatttacggaggaanttcttgaaccctagccaaagctcggggagcaagagctccgccaggcttcgcaaatccaaccatggagttttgaggaagaggaatgcagctcttgcaaaagcacgtgggaaagcatgccgcaccaccagtgggaaaacctggaaggggggatgtgaatccaggagaggggagtccgccaacccggttcttacgggggcacccttggagaaccctgcggcgcaggggtcttaccccccaccttttgccagcatgcccctcttccccgggaaagggggaaaaaaactcctacaggggggaaccccccttggcacccctattattaaacgagaaggtggccgnaaataatttttagggtaattcccctcagaca

SEQ ID NO: 355215 - DNA, 1234 bp, Homo Sapiens
ggctggtaccggtccggaattcccgggatgtcaggcgtttcattgctgaaattgctatctggaatgccataatgagaatagggagatgaggtggggtagctaaattagaggcagctaagcagaacttccctgtaagagtcattgggactcctcagagactccttctagtgctgcatgtgttctgtgggatgtatgtcctcagctcgggaagcagagctccgccagcttcgcaaatccaacatggagtttgaggagaggaatgcagccctgcaaaagcacgtggagagcatgcgcacagcagtggagaagctggaggtggaatgtgatccaggagcggagccgcaacacagtcttacagcagcacctggagaccctgccgcaggtgctgaccagcagctttgccagcatgcccttgcctggaagtggagagacacctacagtggacaccattgactcatatatgaacagactgcacagtattattttagctaatccccaagacaatgaaaacttcatagctacagttcgagaagttgtgaacagactcgatcgttagggaatggtcttagaactccaagatgttccataagtgtttttacttgtgaggaatgagaagccatccatggaaatttgaactgagtgggggcagagaaagagtgcagatccctttgcttgtgaaagaattatcagtgagtgaaaagccatcaccccagggaagccaaatgagggagcagcaacatgtatatgagcttcctatggaattgtccttatgtgaagctttgaaggtgtacagccactctcccgggtcttcaggttcctaccatttccatttctgttaaagtggatctgcatatcttcagcttactaggtgacccggatgctgacatctgctgctgcagaaaggaagacttttcattgtaatttcgcttagacccttttatcagtgaagctccagtttttcttacctagctgtcacttttttaaatgccctccggggggttattttttggttttccctgggccccccacccaatttaaaccttctcccattttttctggaccttctggaaactaacctgggtgtggccccaccaaaggggtccctgaaaaggagaaaattttttcttgggccatttgggaaccaggggccccagattcctttctcctcccacatttattttgggccccccgtggctggtggggaaactctccccaaaaaagaacaaaagggggt

SEQ ID NO: 355216 - DNA, 1760 bp, Homo Sapiens
tgccagtgcagaaacgtttaatagaaataaaaaggtctgcatagagccgaggctcggagccacccctctgccgcacatccagtacagagaggattctataaagttcacactttttcattaagtagtagtagaaatacggtgaggccctgagactggcctggtgagcgaggaaaggccgctgggcgcttccactctgcaggccggggctgaaataacccgagttccgttctcacagaaaggtgcggctgccacctcttgacacagaggccggatgggcaggtgtcctcgatggccaggccgtatcagggtacaaccgcagcagtgcaaggggcttcctcaaggacaaatggctaaaaatgtcacggtgaaaatgtcatccccaaagagttcgttctccctagacccgtgggggcaacccagccttcaccgtgacactggccatctgcaaagtgccaactgttcttcatcgagcacgtgattacgtcactttcttcctttttgtgcgttttgtgcagcccctgccaaaccagccccctaggatgggggccgagctaagcggtgcaccccggtccccaggcggggcctcctctctgcttctgcacagcgacttccgactgtggctgccttcttcaccagcacgcaggggagtcgccagtgagaaaatgggatcctgccacctgctataggcggggatctccaagcccagctcggccatgaggagccgcatgacgtcatcacacttcccatgtagcttcagggcagcccagtcatccttcggggtccactgcaggttcacgatgtaaagcttcggccgccggctagggggcttggtcatgcaccagaggcgtgggtacttctttagaaccttcaggctggaccctagacacaggatggtgtctgctctgctggcagcctcggtcgccgcttcccagttcagaggctgccccaacgtccccctctccccaaagtgcacaatggtgtcccgcagctgggtcccacacttgtggcaggtccggcctgtctggtgtctgtggagggcagtgcgctccgtcacatcgaacacccgcacgtactccctgttgggaacgcaggaggtacagacttcaatgtacatgttcccgtggagctcggagatggccgtgcgcggcagcccactcctcaggtggagcccgtcacagttctgagacaccacatgctgcaccagcttctgctcatgcagacgggtgatgctcatgtgggtgagggttggctcggcctcgctcaggtcggcagcactaacgcttctccctttctgaagcagtgtccacactccattagggccccggtagtctgggatagacgctgccgtgctgattcccgcgcctgtgtagacgaccaagtatttggcgttccggacggcgctggccagctcccggaccttcccccgcagctcctccgggtcgtcgcacacctcctcctgccgccgcttcaggccctcgcgccgccggctccggccctgcagctccgttaccaggtccgcgctctcggccagcagccggccctcctcggcgctgcgctccgccgccgccttcctcaggatgcgcgacacctggcggaggcgctccctctgctgctcctcccgcaacctccggaccccgctccgccgctttgcgctcggagcggctcagacccccggctgccatcgctacccctggagacctgctcttccgcttccgcctcacacggcaggccgcgccctcgtgccgaattcgccacccagc

SEQ ID NO: 355217 - DNA, 1239 bp, Homo Sapiens
  misc_feature (990)..(990): n is a, c, g, or t
  misc_feature (1034)..(1035): n is a, c, g, or t
  misc_feature (1078)..(1078): n is a, c, g, or t
aaggcttcttggcttattttgagatttgttcctttgtctggggagcgaagaagcactggattgattaccagtatgtcccgtatgccaacaaggggaaagagtgggttggctatgacaatgccatcagcttcagttacaaggcatggtttataaggcgagagcattttgggggggccatggtgtggacattggacatggatgacgtcaggggcacgttctgtggcactggccctttcccccttgtctacgtattgaatgatatcctggtgcgggctgagttcagttcaacttctttaccacaattttggctgtcatctgctgtgaattcttcaagcactgaccctgaaaggctggctgtgaccacggcatggaccactgatagtaagattttgcccccaggaggagaggctggggtcactgagatccacggaaagtgtgaaaatatgactataacccctagaggtacaactgtgacccctacaaaggaaactgtatcccttggaaagcacactgtagctctaggagagaagactgagatcactggggcaacgaccatgacttctgtgggtcatcagtccatgacccctggagagaaggccctgacccctgtgggtcatcaatctgtgaccactggacagaagaccctgacccctgtgggtcatcagtctgtgacccctggaggaacgactatgacccctgtccattttcagactgagacccttagacagaatacagtggcccctagaaggaaggctgtggcccgtgaaaaggtgactgtcccctccagaaacatatcagtcacccctgaagggcagactatgcctttaagaggggagaatttgacttctgaggtgggcactcaccccaggatgggtaacttgggtcttcagatggaagctgaaaacaggatgatgctgtcctccagccccgtcatccagctcccggaacaaactcctctagcttttgacaaaccgctttgttcccatctantggaaaccatccctctgtcaactcagtaaccccctcaaacaagnntcctctttctctaaaaaaagaaatcccagaaaactctgctgtnggatcaagaagcctaagcccctctgggtgtcagaaacccaggaaaaacccttgtcttttcttctaagtgacatgttggaagccttctcatcccggggcaaagcaggcatcaaaaccagaataggccaatctcttttccattaaataaactgtaaacacaag

SEQ ID NO: 355218 - DNA, 2603 bp, Homo Sapiens
  misc_feature (45)..(45): n is a, c, g, or t
  misc_feature (89)..(89): n is a, c, g, or t
  misc_feature (273)..(273): n is a, c, g, or t
  misc_feature (301)..(301): n is a, c, g, or t
  misc_feature (303)..(303): n is a, c, g, or t
  misc_feature (340)..(340): n is a, c, g, or t
  misc_feature (347)..(347): n is a, c, g, or t
  misc_feature (357)..(357): n is a, c, g, or t
  misc_feature (365)..(365): n is a, c, g, or t
  misc_feature (385)..(385): n is a, c, g, or t
  misc_feature (388)..(389): n is a, c, g, or t
  misc_feature (409)..(409): n is a, c, g, or t
  misc_feature (413)..(413): n is a, c, g, or t
  misc_feature (457)..(457): n is a, c, g, or t
  misc_feature (726)..(726): n is a, c, g, or t
  misc_feature (1953)..(1953): n is a, c, g, or t
  misc_feature (2072)..(2072): n is a, c, g, or t
  misc_feature (2167)..(2167): n is a, c, g, or t
  misc_feature (2169)..(2169): n is a, c, g, or t
  misc_feature (2176)..(2176): n is a, c, g, or t
  misc_feature (2183)..(2186): n is a, c, g, or t
  misc_feature (2320)..(2320): n is a, c, g, or t
  misc_feature (2419)..(2419): n is a, c, g, or t
agtcaagcagaacgtgtgttcagcccacggtcagttgggcaacanatgtgtcaccaggactcccctccccagcccccttccctcctctntgggggggcagagctggaggcccctcacatagcactctcgttgcctccccgtccccgggatgcccccttctcctgtgccatgagggacttgtagggtttccccaggctggggagggtaagctcagcttcctgaagctccagctcccgctgagacaagtgctcgatgacggccgctccaattgantcccccagtacgttggtcattgtgcgangnggtcaagggaccagtccacggcaatgatgagcgtgangtcttcngtgggcaagnggaccgangtaagcacaatgaccatggngannagagccgggtgggggatggnaggnggcccaagactggctgctgtgcgccgtgcatgctgatggttgtnatctgacccaggttgagctcgtagttgttaacttgagcaatgaagatggcagccagggcctcgtagaggcagtgccatccatgttgaccgtggggcccacgtgcaggacgaacctggtgatgcggcggtccacacccaggccctcctccaggcagcggaaggtgatgggcagcgttgccgagctggaagacgtgcccatagcggtgatgagggcttgtagcatgcccccaatgaaggggaaggggttccggtgagtgacgaggaagtanatgaggggaaggacaatgccggcatggaggaacaggcccacgatgacggtcagggtgtacatgcccagctgacccccccaggacggccatgtcttccatctccagaatcttcccagcaatcaggaacaggatgcccacaggtgcataccagataatgatgcccaccagcctcataatagcctcattgaggctgtcgaagaagtccctgaggactctgcccttgtgtttcatgccaccaatgaccagcccaaaggccacagagaagaccacgaggcccagggcgttgatgccattggcggagccaggcacgggtacagtctcctcaaagctcagcatctcctggcagggtacccaaggaccaagtaacatttaccaggaagctggttccgttctccactgagaatggaggaggcatggaggcacccggctcagacccgttctctgtcctcaccatggtcctggttaccaccctcgtgctgtactgcgtcttgaactgtttgaagcaggcctccacaaggtttggtggaaacatatttctgatcaggtccatgaaggcatcagctgtggggatggtctcgatccggccctcccggtgcagcccctccttggagcccttcccgggatggatgatggtgaccatgaggatgccgatgaagaccgcgatgatggtggtcaccatgtagtacacagctgcccgcatccccatccgccccgtggccttgttgtccagggatgccatacctgtgaccaggctggagacaatgagaggtaacaccagcatctgcagcatcctcatcagaagctctccaggaaaagagaagtacttgatctggcggtaggtgagctgatatgggcgcagggcaaaggccaggctgaccccaatgaccacggcgctgaccgtcagcagaatgaaggcgtttcggcgcaggaagcgcagcacgtgctcgagggtcatggtctgcaggcgcaggcgcgtgcgcagtgctctctgctgcaggctttcctgcagccgctgcagccagcccacccggcccagccgctggccgctctcccgaaggaacaggctgttgccatggctgctcatggtctatcggcgtccggagcggcgggggcggcctgcccgcgcctcggcctgcgcgctgcgcccggatgcaggagccggagcccggcgaagcgcccggccggggccgcggggacccgccagggactgtgcagcaccggcgcggngaccggaccgtggaggcaccggcgcggagccgggacgcgctatgctgcgggagggatccgggccggccctgcgctcacgtgggtgtgggggcaccgagcggccgggggagggggcgggntcccctccgcgagtgccccccgcctccccgcgcgcccagcccaggtccgcagccgtgtgggagaagggggaccgcgtgcttgcgaagggaggggnantgggggngggcggnnnntagtggcgtctccggcatccagcccccgccccctgctcggagccgcgcctccgcgcccccgccccctaaaccgcctccggagccctccgaggccccagcatccctggcggagcgcggggaacaggccctggcanccgcgggacccgctccagcagcctcggcggaggcctggggaaggcgcggctctagtgtcccagtaacaacagccagggagagggtccgctgcccccttnctctgcgggtgcaccttccggccttggccacttggctgctgtgtgcccttgggccaactcctctccctctctgagcctggcctcctccgctaaacaaggaagatggcttggccgaccccacagaaaattaaagctgagaaaattgaagcgcgtgaggctggaaatgctccgtgccagcgcgaag

SEQ ID NO: 355219 - DNA, 593 bp, Homo Sapiens
  misc_feature (42)..(42): n is a, c, g, or t
  misc_feature (156)..(156): n is a, c, g, or t
  misc_feature (344)..(344): n is a, c, g, or t
  misc_feature (383)..(383): n is a, c, g, or t
  misc_feature (396)..(396): n is a, c, g, or t
  misc_feature (402)..(402): n is a, c, g, or t
  misc_feature (502)..(502): n is a, c, g, or t
  misc_feature (507)..(507): n is a, c, g, or t
  misc_feature (514)..(514): n is a, c, g, or t
  misc_feature (530)..(530): n is a, c, g, or t
  misc_feature (535)..(535): n is a, c, g, or t
  misc_feature (548)..(548): n is a, c, g, or t
cagccatggcaacagcctgttccttcgggagagcggccaggnctggcgccggttgggctggctgcagcggctgcaggaaagcctgcagcagagagcactgcgcacgggctgcgcttgcagaccatgaccctcgagcacgtgctgcgcttcctgcgncgaaacgccttcattctgctgacggtcagcgccgtggtcattggggtcagcctggcctttgccctgcgcccatatcagctcacctaccgccagatcaagtacttctcttttcctgggagagcttctgatgaggatgctgcagatgctggtgttacctctcattgtctccagcctgggtcacaggtatnggcatccctgggacaacaagggccacggggcggatgggngattgcgggcagntgtgtnattacatgggtgaaccaacattcattcgcggtctttcattcgggcattcttcatgggtcaacatcatcccatccccggaagggtttccaaggaagggttncaacngggaggncggattcgagaccatncccanagttgatgctttnatggaactgatcagaatatttttttcaacaaaatttttgaaggtt

SEQ ID NO: 355220 - DNA, 1732 bp, Homo Sapiens
  misc_feature (1536)..(1537): n is a, c, g, or t
  misc_feature (1540)..(1545): n is a, c, g, or t
  misc_feature (1547)..(1551): n is a, c, g, or t
  misc_feature (1554)..(1554): n is a, c, g, or t
  misc_feature (1558)..(1561): n is a, c, g, or t
agcgggcggcgcaggcgcactgggttcgccgcgccgaactgcagccatggagcaggcacctccggaccccgagcggcagctccagccggcgcccttggagccgctgggctccccagacgctgggctgggggctgcggtcggcaaggaagcggagggggccggagaagagagctctggggtcgacacgatgacacacaataatttttggttgaagaagatagaaatcagtgtttcagaagcagaaaaacgaactggaagaaatgccatgaacatgcaagaaacatatactgcttacctcattgaaacaaggtcagttgaacataccgatggtcagagtgtcctaacagactcactatggcggcgatatagtgaatttgagttgttgagaagctaccttttagtttactatccacatattgttgtgccacctctgccagaaaaacgggcagaatttgtttggcataaactctctgctgacaacatggatccagattttgtggagaggcgacggattggtttagaaaactttctcttgaggattgcttcacatcccatcctttgtagagacaaaatcttctatctgtttttaacacaggaaggtaactggaaggagactgtgaatgaaactgggtttcagctgaaggcagactccaggttaaaagcgcttaatgcaacattcagagtgaaaaacccagacaagagatttactgaccttaagcactatagtgatgaactgcagtctgtcatctcacatcttcttcgagtcagagctagagtagcagatcgactctatggtgtatataaagtacatgggaattatggtcgagttttcagtgaatggagtgccatagaaaaagaaatgggtgatggactgcagagtgctggtcatcatatggatgtgtatgcatcttctattgatgatattttggaagatgaagaacattatgcagatcagttaaaagagtatcttttttatgcagaagcattgcgggctgtgtgcaggaaacatgaacttatgcagtatgacttggagatggctgctcaggacttagcatccaagaagcagcagtgtgaggaactggtaactgggactgtgagaacattctctttgaagggaatgactaccaagctctttggtcaagaaactccagagcagagagaagccagaataaaggtgctagaagaacaaataaatgaaggagaacaacagctaaagtctaaaaatctggaaggcagagaatttgtggaaaacgcatgggctgatattgaacgcttcaaagaacaaaagaaccgagacttaaaggaggccctcataagctatgcagtcatgcagatcagtatgtgcaaaaagggaattcaagtttggaccaatgctaaggaatgctttagcaagatgtaatcctgtgaattgaatttctcttcaatcaaagtgcccccaaacagaagcacaagtaaataaaagaaatttaagtcactacctagtatacctaaacatataccataagtttaataaattcagctttctttaactcaaannaannnnnnannnnnaanaaannnnacctggtcggccggcctcgggcccctcggagaggcctttctaggacccattcggtttgggcgccgcgggggccccagtaaggtaaaggtggaacaggggggccaatagcctgggtttcccttaggaaaaaaccccggggccaatggaccctaagggggccttggggaattt

SEQ ID NO: 355221 - DNA, 1102 bp, Homo Sapiens
  misc_feature (8)..(8): n is a, c, g, or t
  misc_feature (25)..(25): n is a, c, g, or t
  misc_feature (29)..(29): n is a, c, g, or t
  misc_feature (35)..(35): n is a, c, g, or t
  misc_feature (37)..(37): n is a, c, g, or t
  misc_feature (50)..(50): n is a, c, g, or t
  misc_feature (53)..(53): n is a, c, g, or t
  misc_feature (55)..(117): n is a, c, g, or t
gggacganagagatgggacgggganaaangagacngnaacggaacagganagnannnnnnnnnnnnnnnnnnnnnnnnnnnnnnnnnnnnnnnnnnnnnnnnnnnnnnnnnnnnnnnggcagggccgctacttgagcagccttcgcatggtgcccaacgaagggctcctgtactcccgcccgaagtggttccagtggttcaggtagttaaacagctggtagagcagcagccgctggtcgaagcccggagccttggggatcttccggtggtaggcggtgaagaaggatctggggaaccccccaaacatcaaggcgattgccagttcaaactcggaatggccatagaaggaagccgggtcgtaaataatgggccccacgtcgtcctcagccacgtttcccgaccagagatccccgtggagcaacgcggggacaatctctaggccacaaaacagatccgggatcttcacctgtagccgggaccagagttctcgtgcctctcggtcagcatagtccttctcaatgaggtccagctgcgcctggagccggtgccgggcgaaaaaggtcggccagtcatcctgccactcattcacctgcgggatgaagccgcagcacgtcaccgtgtggaagccgaacttgtccacatactgaggctcagcaccctcacctcttcggcccactgtgttctcctcctccttcaacttctccctgagcttctggttgtaaagatgcaaatctgccatctgctctccaagttttgatgcttgactgctcaagctcttcatcttcaaatgctccatcacaaaggcggccccacctcccggcaggtcgatgaccttcatgggcctcggcacccgcaccaggcccgtgctccggagggcctccaggctggccacctccccctcaaacatctgccgggcctgcgtcctgcggttgactttgacgaacactgggcctgcgtccgtgtcgtaggctcggccctcgctgatgcagccggcgccggggccgccgaaggcccgcagggtcgcggtgcgcagctcggcgcgcagcagctgctccatggagtgcggggcgcgggactctgctcgctcggaagccctgtcggc

SEQ ID NO: 355222 - DNA, 238 bp, Homo Sapiens
agacggagacggggacggggacaggggaagggagggcaggggccgctacttgagcagccttcgcatggtgcccaacgaagggctcctgtactcccgcccgaagtggttccagtggttcaggtagttaaacagctggtagagcagcagccgctggtcgaagcccggagccttggggatcttccggtggtaggcggtgaagaaggatctgggaaccccccaaacatcaaggcgatcctgt

SEQ ID NO: 355223 - DNA, 1639 bp, Homo Sapiens
  misc_feature (1201)..(1201): n is a, c, g, or t
  misc_feature (1219)..(1219): n is a, c, g, or t
  misc_feature (1223)..(1225): n is a, c, g, or t
  misc_feature (1228)..(1231): n is a, c, g, or t
  misc_feature (1238)..(1238): n is a, c, g, or t
  misc_feature (1245)..(1249): n is a, c, g, or t
  misc_feature (1253)..(1254): n is a, c, g, or t
  misc_feature (1257)..(1257): n is a, c, g, or t
  misc_feature (1349)..(1349): n is a, c, g, or t
  misc_feature (1355)..(1355): n is a, c, g, or t
  misc_feature (1454)..(1454): n is a, c, g, or t
gggtccggaattcccgggatcggtggcgggctgagcggtttcgagccggcgtcggggagcggcggtaccgggcggctgcggggctggctcgacccagctggaggtctcggcgtccgcgtcctgcggtgccctgggacccgccgacatgaatcccatcgtagtggtccacggcggcggagccggtcccatctccaaggatcggaaggagcgagtgcaccagggcatggtcagagccgccaccgtgggctacggcatcctccgggagggcgggagcgccgtggatgccgtagagggagctgtcgtcgccctggaagacgatcccgagttcaacgcagacacctcattgctttctgactgaccaaggcgcagcgcagtttgcagcagctatgggggttccagagattcctggagaaaaactggtgacagagagaaacaaaaagcgcctggaaaaagagaagcatgaaaaaggtgctcagaaaacagattgtcaaaaaaatttgggaaccgtgggtgctgttgccttggactgcaaagggaatgtagcctacgcaacctccacaggcggtatcgttaataaaatggtcggccgcgttggggactcaccgtgtctaggagctggaggttatgccgacaatgacatcggagccgtctcaaccacagggcatggggaaagcatcctgaaggtgaacctggctagactcaccctgttccacatagaacaaggaaagacggtagaagaggctgcggacctatcgttgggttatatgaagtcaagggttaaaggtttaggtggcctcatcgtggttagcaaaacaggagactgggtggcaaagtggacctccacctccatgccctgggcagccgccaaggacggcaagctgcacttcggaattgatcctgacgatactactatcaccgaccttccctaagccgctggaagattgtattccagatgctagcttagaggtcaagtacagtctcctcatgagacatagcctaatcaattagatctagaattggaaaaattgtcccgtctgtcacttgttttgttgccttaataagcatctgaatgtttggttgtggggcgggttctgaagcgatgagagaaatgcccgtattaggaggattacttgagccctggaggttcaaacctgaggtggagccatgattactcccactgcactccccagcctgggccacnagaccccaggccttgttntccnnnaannnnaaagaangggggannnnnagannganagcccccggcatgatccttgacttgacaatgttgggagaacaccccaaagcctgcaaaacttttggcttgaagttgaaaggaaggccgtaanattttnaaaccctttttttaaaaatttttaccacccctttataccttggttggggaaaaccccgggttaccctccccaagattttttgcccaaactcgcggaaanaaaccaacccctttagaatttttccctccttttttaaaaaaccattgtttttccctaaaattttcccccctcccccgaattccggagatttcttaaattccccgggcccccgggacccttccccttccgaaagggagtcctgggaacttgggtccccaaattcccgggttcccaaaccccctttt

SEQ ID NO: 355224 - DNA, 1219 bp, Homo Sapiens
  misc_feature (51)..(87): n is a, c, g, or t
agatgtaacgatcactataggggacccccggcttatcgctggtggcggcgnnnnnnnnnnnnnnnnnnnnnnnnnnnnnnnnnnnnnatcaggccaaatcggccgagctcgaattcgtcgagagcgggaccagagcggtggcgggctgagcggtttcgagccggcgtcggggagcggcggtaccgggcggctgcggggctggctcgacccagcttgaggtctcggcgtccgcgtcctgcggtgccctggggtctcccgaggaccttgtacccgcgcggtttccttgggctggctttggacgacgctttcgccttcctgctgcctaggatccgccgacatgaatcccatcgtagtggtccacggcggcggagccggtcccatctccaaggatcggaaggagcgagtgcaccagggcatggtcagagccgccaccgtgggctacggcatcctccgggagggcgggagcgccgtggatgccgtagagggagctgtcgtcgccctggaagacgatcccgagttcaacgcaggttgtgggtctgtcttgaacacaaatggtgaggttgaaatggatgctagtatcatggatggaaaagacctgtctgcaggagcagtgtccgcagtccagtgtatagcaaatcccattaaacttgctcggcttgtcatggaaaagacacctcattgctttctgactgaccaaggcgcagcgcagtttgcagcagctatgggggttccagagattcctggagaaaaactggtggacagagagaaacaaaaagcgcctggaaaaagagaagcatgaaaaaggtgctcagaaaacagattgtcaaaaaaacttgggaaaccgtgggtgctgttgccttggactgcaaagggaatgtagcctacgcaacctccacaggcggtatcgttaataaaatggtcggccgcgttggggactcaccgtgtctaaggagctggaggttatgccgacaatgacatcggagccgtctcaccacagggcatggggaaagcatcctgaaggtgaacctggctagactcacctgttcccatagaacaaggaaagacggtagaagagctgcgggacttatcgtgtggttatatgaagtcaaggggttaaaggtttaagtgggcctcatcgtggttagcaaaaccggagactggggggggcaaagtgggaactccaccttcctgccctgggcagcccgccaaggacggaagc

SEQ ID NO: 355225 - DNA, 856 bp, Homo Sapiens
ctataagatacatgagaaactgccacaatacagcttttgtaggtattttgtacttttccagtagtaaaaattgctaatttttaaatttcaaaaaatgtttagtttatctggcagataaccttattttctgcttttatagtgcaattgggtatctcgaagagcagatcaagggcctaaaactatcgaacagattcacaaagaggctaaaatagaagaacaagaagagcaaaggaaggtccagcaactcatgaccaaaaagaagagaagaccaggtgtccagagagtggacgaaggtgggtggaacactgtacaaggggccaagaacagtcgggtactggacccctcaaaattcctaaaaatcactaagcctacaattgatgaaaaaattcagctggtacctaaagcacagctaggcagctggggaaaaggcagcagtggtggagcaaaggcaagtgagactgatgccttacggtcaagtgcttccagtttaaacagattctctgccctgcaacctccagcaccctcagggtccacgccatccacgcctgtagagtttgattcccgaaggaccttaactagtcgtggaagtatgggcagggagaagaatgacaagccccttccatctgcaacagctcggccaaatactttcatgaggggtggcagcagtaaagacctgctagacaatcagtctcaagaagagcagcggagagagatgctggagaccgtgaagcagctcacaggaggtgtggatgtggagaggaacagcactgaggctgagcgaaataaaacaagggagtcagcaaaaccagaaatttcagcaatgtcagctcatgacaaggctgcattatcagaagag

SEQ ID NO: 355226 - DNA, 1815 bp, Homo Sapiens
  misc_feature (1066)..(1066): n is a, c, g, or t
  misc_feature (1112)..(1112): n is a, c, g, or t
  misc_feature (1315)..(1315): n is a, c, g, or t
agcccccggggacagaccggtgggtttcttgcccttggcccaccccgggcctggaggggctttttgttacccccaccctggaaaaaaacaggggcgggccttaagcaaaaaaaagggtttccaaaggcccgaagaaggccggtccctgggggccctggggccccccaaagggcccgcagccaagggcaaaggtccccggggcccaggcccacctccccctgaggccgaagtcttcgaaacatctcctacgtgtccgctggagaagagcccctaaaggcccctgtgtttgagatccccctgcagaatgtggtggtggcaccaggggcagatgtgctgctcaaatgtatcatcactgccaaccccccgccccaagtgtcctggcacaaggatgggtcagcgctgcgcagcgagggccgcctcctcctccgggctgagggtgagcggcacaccctgctgctcagggaggccagggcagcagatgccgggagctatatggccaccgccaccaacgagctgggccaggccacctgtgccgcctcactgaccgtgagacccggtgggtctacatcccctttcagcagccccatcacctccgacgaggaatacctgagccccccagaggagttcccagagcctggggagacctggccgcgaacccccaccatgaagcccagtcccagccagaaccgccgttcttctgacactggctccaaggcaccccccaccttcaaggtctcacttatggaccagtcagtaagagaaggccaagatgtcatcatgagcatccgcgtgcagggggagcccaagcctgtggtctcctggctgagaaaccgccagcccgtgcgcccagaccagcggcgctttgcggaggaggctgagggtgggctgtgccggctgcggatcctggctgcagagcgtggcgaatgctggtttctacacttgcaaagcggtcaatgagtatggtgctcggcagtgcgaggcccgcttggaggtccgaggcgagtgagctcagggggccacctgcgctccccccgctaccctccgagccgcgcccctgtctcacgcncctctcggacctcgctgtttttcactgcctcctgcccacagacccnagcctgccggcccggacccgtcccagcctcccctccccaccccatgcaccccccagggggatagcccatgggcccctgtggaccctccctccccaagtggacacatggctgtgcaggccaggaggcccacagatggactgagtgctgggaaggggccgctcccaggggtatcaacccccccagtctctccccgaaggggagcnccgggcgagtccatgtgctactgctgctacaggcctgcctatctgtttctctgtccctctctctctcacactcagggaaggatgcctcggagctgaggtggggtgagacagagtgggagagattacggcatggcatggaggggcccaaggagcaggggctgttgacaaaggccttacccaggaagggttaggacactgacccattctagaaatgggtttcgaatggcacaacactttctatttcacaaaagaccaaaagccagaggccccaggctctgtgctgatgaacagccctggctgagccctggccctggcaggttctagggcccatttggggccccctccttctctgtcagggctggggtgctctgtctgggaatgagggagttaaccaagtttggtgcaggagcaggggcagggggccactgtagtgagcgtggagaaatttggaaacacctatttcttaactcaaataaagtccagtttgtacctaaaaaaaa

SEQ ID NO: 355227 - DNA, 957 bp, Homo Sapiens
agcggctgtgcggcgcggcgctgcggagaccgttggttcatttgcatgtccccgcctcgcgcggcggcggcggcgggtgaggagcctgaggcggcggcgggggtggctccgcgcgcggtggtctcgggggcaaaataacatggcagccagacgaattacacaggagacttttgatgctgtattacaagaaaaagccaaacgatatcacatggatgccagtggtgaggctgtaagcgaaactcttcagtttaaagctcaagatctcttaagggcagtcccaagatccagagcagagatgtatgatgacgtccacagcgatggcagatactccctcagtggatctgtagctcactctagagatgccggaagagaaggcctgagaagtgacgtatttccagggccttccttcagatcaagcaacccttccatcagtgatgacagctactttcgcaaagaatgtggccgggatctggaattttctcactctgattctcgggaccaggtcattggccaccggaaattggggcatttccgttctcaggactggaaatttgcgctccgtggttcttgggaacaagactttggccatccagtttctcaagagtcctcttggtcacaggagtatagttttggtccctctgcagttttgggggactttggatcttccaggctgattgagaaagagtgtttggagaacggagagtcgggattatgacgtggaccatcctggggaggctgactctgtgcttacgcgggcggcagtcaagtccaggccagaggtcgagctcgtaaacatcgttgaacaggaaggttcccatccataggaaaagggcgagagaactcagggccatgctcaacaggctaaggcggggtgattgggaaaacttgatcaccattgcagaacatgtgacgcacacaaaacaacacatacccacacgagcaatcgtaatcatcccc

SEQ ID NO: 355228 - DNA, 857 bp, Homo Sapiens
  misc_feature (784)..(784): n is a, c, g, or t
ctaagccaaggataagcagttaccctgaagacaactttccggatgaagaaaaagcatcaaccataaaacattgtcctgattcagaaagcagagctccccaaattctcagaagacagagtagcccaagttgtgggcctgtggcagagacttcttctattggaaatggtgatggtatttcaaaactgatgagtgaaaatacagaaggatcagcacaagcaccacagttaccacgaaaaaaggacaaacgagacttccctaaaccagccatcaatggccttccacccaccccaaaagttctgatgggagcatgcttttcaaaagtttttgatggctgtcctttgaaaattaattgtgcaacatcctggatacatcctgatacaaaagatcagtacattatttttggaactgaagatggtatttacacactgaatctcaatgagctacatgaggcaacgatggaacagttatttccacggaagtgtactttgctgtatgttatcaataatactttaatgtcattatcagaaggaaaaacctttcagctctactctcacaatctttatagctttggttgaacatgccaaaaaaccaggattagctgcccatattcaaactcacaggtttcccagaccgaatactaccaagaaaaatccgctttaacaacaaagattcctggatacaaaagggctggccacaaatgttggcatagtcagaaacccttacatggggacataaatacctctgtgggagctttacagtctgggaattggtttacttcagtggnatgagccaatggcagaattcaggtggataagcacttggatttccttgccaagtccttggatggttttggaagc

SEQ ID NO: 355229 - DNA, 2466 bp, Homo Sapiens
atcttccagacccatcccctgcctgccagctccacgagccagagagagacagagcgcggacgccgcaggaggcagtgcctggaccccagctgcccaggagagacggagcccgtggctggtgaggccgcagagcagggccaggccgggccctgcccgcaaggacgaccaaacccctcaccggcccctgggccccagagcccaccaggctctcctgctggccccaccatgacttcagagtcgacgtcacccccagttgtgcccccgctccactcccccaagtccccagtctggcccaccttccccttccacagggagggcagcagggtctgggagcggggtggtgtcccacctcgggacctacccagccctctgcccaccaagcggaccaggacctattcagcgacagcccgggcctcagctggccccgtgttcaagggcgtctgtaagcagttctcacgctcacagggccatggcttcatcacccccgagaacgggtccgaggacatcttcgtacatgtgtctgacatcgagggggagtacgtgccagtggagggcgacgaggtgacctacaagatgtgccctatccctcccaagaaccagaagttccaggccgtggaggtggtgctcactcagctggccccccacactccccacgagacgtggtctggccaggtcgtgggctcctaggctgagtggttcacaggccagctggccgggggttggggagccacacagggtgaacgggcagcagccggctccatgccccactgccctggctgatgagtccttcggtggcctcagtgtgcacgtctgtctgtccgtctgtgcttgtggctatgagcgtgtgcctccacccaccccacgacccgtgactactgtgcaagctggccaggaggtaggtggagggcaaggccaccagacctggcttcgcgctgtccactgcctctctcctcccctccctgccgcagacacgcaggacccgctcgccctcctgcttacccgtccccacggtgactgagctgcgagagcctgcgctgggctcactccctggcctccgcccctgagctgtcccgtgtcagtccctggcccggagccaggctctctgtgctacttacatctccctcccttggctgaggtcccccgccacagcctggacccttccctcagaagcctggccgatgggtgcttttggggagcctctcagcctctggcaggggaggaggactgacacggaggcacacaggcctctcactgccgaggccagccttccttcctgctctgctctctcagtgccatggagaggcaggaagaggggcctgagggcggaaggggtttggggctcccatttcgccggccagtccctcctcctcagcctggcagtggcgctgggctccttcccctgggctgtactgagccgagcccaggggtttgcagagggtgggggtccatctctccagcttggctgcagacctcctttaccctgactcacaagccccactgatgctctgggccatgcccggctgacggctgctgtggatgccgcgagggacggacacacgtccggggcacccacgaggagggcccccagcctgggagactggccctgcggcctccacgtcaaactctcttcccaaagccctaacagaccagtggccgaggtgtggctcttattgcatccatccctgaagatgtgtggctgttgctgtcacctggagtccttttggggccaagatgtgtgtgcacccggggtcgtggccattcactcccaggcaggggtgagggtggcctggcccaggaggccaggaaggagggccctgtctgcctccacctctgggtgcaccccctgcctaccaccctcccttctagagagcacatcgcctgaccggggagaagtggggccgtggttcgagggagggctggccaggggtgggacccttatgagactcagtctgtgagtaaaactgggggctcaaatgcccaggatgaggggatcagtgactgtctaggaggatcccttgccttgtaggtgccccaagaccgcagggtagaaatcagccgggatgcctgcatcccacccccggccccagggcccaccacataaaatctgggagcccagagctgctgaggtgtggtcagctcccctaaaatgggcacggcccagcctgtcccatgaggaataaaggcccctggcccccttgagagagggcttgttggtgagggctgactcctgggggcccccaaggctcccctcctgtggggaggccaccttttaaggcaccactagcagtcaggatatggtggcatcagccctggggcctcctgggtggcaggggggcagcagctctcctccccactcacaggccctgcagtgctcatttggaattcctcccaagacccctggccacccagaccccccattcttcctaacactggcaataaaccctcaactgtgacccacaaaaaaaa

SEQ ID NO: 355230 - DNA, 1264 bp, Homo Sapiens
  misc_feature (225)..(283): n is a, c, g, or t
  misc_feature (1129)..(1177): n is a, c, g, or t
cagaaatagaaaaatgcactcaagaacaacttgatgaaaaatcttcacaactggatgaggtacttgagaagttggaaaggcacaatgaaagaaaagaaaaactaaaacaacagttgaaaggaaaggaagtagaacttgaagaaatcagaaaagcttacagtacactgaatcggaagtggcatgataaaggagaacttctatgtcatcttgaaacacaagtaaaannnnnnnnnnnnnnnnnnnnnnnnnnnnnnnnnnnnnnnnnnnnnnnnnnnnnnnnnnntattgaactacaaaagaatgcaatggaaaaacttcatagtatggatgatgcctttaaaagacaagttgatgcaattgttgaagctcatcaagctgaaatagcacagctggccaatgaaaagcagaagtgtattgattctgcaaatttaaaggtccatcaaattgaaaaagaaatgcgtgaacttttggaagaaacatgcaagaacaaaaaaacaatggaagcaaaaattaagcaacttgcttttgctttaaatgaaattcagcaagatatgtggatgggtctgagaatgaatttaaattgaaatagaccagcagacctattggaaaaatgattaaatattggaatagtagtaactgctatgactttgaaatgtctctttctatacatttcattatgaatatatttttaaagacttttgatcaagtattaattgtataggttttttataataaattgttgaccaattttgtctattagaaaaaactatcataactagacttacaatatgtttcttgtttctgtactatacggttgtttggtaattacacatttgcctacaaatttgtgaatgaaaagattagtattttcaccatatgaggtaaaacattttaatcattgttatcttattgtgatgatgaagaactaattatatttgtcatttaattgatgtagctcaattcttttaaagcacttatgtacccaaaaagcatttgaaatctgtatgataaaagatgtgccattcttaagaaagtatatgtagccatctccacatcactcattatgacccccttcttttataacgcttacatccttttccttaaaagattaccttttacggtttttctnnnnnnnnnnnnnnnnnnnnnnnnnnnnnnnnnnnnnnnnnnnnnnnnnacctgtagggaatttccatttccccccccgcaccgccgtcttttttccctggcgggcgccgccccccgcgcctcctctagcaaaaat

SEQ ID NO: 355231 - DNA, 686 bp, Homo Sapiens
ttgttttccacacacacagcctttattgagcagctactgggcagtgacgctgccgaggcgggaatcccaccacagtcctgaccgcagctgggacccctttgcctcctctgacacccccacctcaatttgatacccacttcctgagcaaatgtgacccctagggcctgggattcccaagaccaccccgaaatgcagcggccccaccgtctcctgaggccggtgaggccaggggcagcagtgcggctcagcaggtgcgaggcaggcttaggatttcggaatcaccacctggaacttacagacgggcagggctgccacggaggcggtgaccacgctctcaatgcccagggtatagagggcgccgcgcaggaggccgcaggtgaaggccaggaacttgggtgcttcctccagatactgcaggccagaggccatcgggaggaggagggggaagctgttgtcttgcaggacgtaggtcccctggtgattggtgcgcaggctgtccatctgcttctggaacaccgccacccacaggtctttgcacaagaacttgaggacatccagctcctccctgaaggccagcgtctcccggggcagccccccgggccggggtcggggtcgtgagccccacagctcagccaccatctccgtgtgaagaaactcaaacaacacagtatccgccatgccccctc

SEQ ID NO: 355232 - DNA, 1109 bp, Homo Sapiens
ccggaagggaaaattcccttaggttaaccgggaaattggtttcttggcttaaatttccccccgtttccccctcgtattcggcccaggggccccaataatgtgtgtttaagaaggtttccggggtgaggccccggagggcaatgaaggttctcctttcacccttcctgggccacttcacgtagcccatcccaggttccaggtcggtcctccagggaatattctccatcaaaatcgccatctggtctgcccacggggccccaaccccagttcactgttggctgtgtttgcttgaggctgtgcttgggggacaggctccctgtgctgttgaggctgctgacgctgccgtgggacggcgtggagcggaggctgtcttttggtggggggctggcaggcaggacggggacggcgccagggaacacagtcttctttctcttggagggtgggatgagggacgggggcagggcggagggcacgggctccttctccagggctcggtacaccaagtgcatggccacagcgaactcatctcgatccaagtgcccatccttgtcaatgtcactgaggtcccagaccctgcccaggacatcaagaggcagctttgagttcatgaggactggcttgactttgtctccagagagcaaaccattgatgggcaagaggctttcaaaaatcccatcaaatttggccttttcttccaccctcacagcccagtgggcctctgcagagggcggtgtgaccatcagagggctgctggtgtcgtgaaatttaggcggtggcatgctcaaattcagattgctcaaggtaacttcatggccactctgtgcacaggccaccagtctcagtgcaacatagaaaccctgtttgtccaagaaccctttaccttctggatcggccaagtcccatatcttcccaaggataatgtccgagaggccagacttctttagaaaaagcgcagcttcactcgcccccaccctccctgtgtatgccggatcgacctgcttgtaataagattcatacaacgaatttccagtgggaatctgctgggagagggggatgagcggcgccgccatcttcccgcggactcggatcccgggaatccggaccggtcc

SEQ ID NO: 355233 - DNA, 928 bp, Homo Sapiens
  misc_feature (82)..(82): n is a, c, g, or t
  misc_feature (179)..(179): n is a, c, g, or t
  misc_feature (296)..(296): n is a, c, g, or t
  misc_feature (772)..(772): n is a, c, g, or t
gactctccttcagtgagtggcactggtagtactcccccactccaggaggctgtcgattttcttggcctctgtgatgtggatnccagttgtccttctcccaccaccttgatgtgcttcaccctcatcattgaacttgatgcttattgcaaagcgctcagcctcggcaggccgctccctgnatcaggtaggtcccgctgggcgtgggacttgagcaggttgtccgtctgctgcctctccatgtaacctgcaaaccaggggtatgcagtgtagtcgatctcccgggatggcggccggcntgatgggcggccttccatccacagggcagggcttcacagatgagctggggaaataccctgacttcctggtttgtaccagacgaccctcccaccacggagactcagggtcacccctcagcagctcaagcacgtcgcccgtctggaaggtcagcacaggcttcccgggaggggctgggttgccatggtaattctgcacggccaccatcttgggacctggtcccgctccggaggcgtccagatctgcaggagaagtgaacttgcagggaggtatcacttccaggcactccttgtgtgccccgacgccacacttggtacacatgtatccctggtagaaggtgcccctgaggaacattttgcaggctttgcagttggtggtcttgtcaaacgtgtacatctggaaactgtggtggttggcattggctttgtctggcttgatgtttgacatggccatctcaaactgctccatccacttcctnttcatatcttctgttttgcagaaaaactggaagccctgctttccttgaaggtgaattaggtagaagccgtagaccacattttcccgtgagacttcttgacgtccttgttgttcatggggtcgtcggtcatcttgtggaacagcagctcgatgatct

SEQ ID NO: 355234 - DNA, 3334 bp, Homo Sapiens
  misc_feature (2376)..(2376): n is a, c, g, or t
cctatctcttttggccaactttattgtgattaaaattccagagacagtaccagctccacatacctctagccctgtctttgccctagttcccgagtgtccttcacccccatcttccaaatcatctctggtttcacggggaagaaaaaacctagggctgctgtgaatgtgccctctcaggtccctgagttggccccaggtagagctgtaagagatcaggaagagggcctccctgcctgacggcgatgatcctggaggcaacgtgtggagcagaaagagaagtcgaggtagtgaaagggagtcaggccttggagggatgccccacaactccagcagcgtcgagtattgacgattgcagagtcagggattggagaggtaggggctcccaactgggcagcgagtcggcgctctgcagccagagctctcttctctcggtcactgagggcggcaaatcgccgctgctcttctcgttcacgctcctcctgctcctgctgcctctgctgctgttcctcccgttgccgccgggctgccttctgctcccttttccgtgtagcctgccgtgcctccatttctggtgtcaatggtcctggcacctggaggatttcaaatataagaccctataagttatctttggtaaaactgcaagaagtagaaaggatctagccaggatctgtgatgccttcccactctgcttgtccttcctattccagatgacctgagccttgttgtaatcgtaggcatctggattcttctccatgaaccttcggaactcattacgtgttgatttgtcagccgcaacagtataaggtggccgggcccgagagtccctaggtgcaaaaactccaaaaatgggtttaacttgcctcctgcctttcccaacatcacccaaccagaccaagggaatattgccaagtagccaatgccaactttaacctccaaattatcctctctatacccaaaatgactcaggatggggacctttactcactgcacagtggggtcagcacctgttccagcagcagacgaaccactgagcctcttccagctgcagctgctgcatgcaggagagtaaagccaccggagcccaagggggcactgagcagagacagaactctagggtctgcagggctgggagctagctgcagctttagcactccaacatctccagctcggcaagcagcaagcagtgcattccagagctctggctgaccaggggctttggcctcatccagcaaagggcccaagggggcagcaactgcctgggatgactgtgtggaaggctcctcttcttgagtttgctggagaagagtccgatgtgccccagcctcctggtctcggcttttctccttcttattcctttttctcctcctccgcttgggcaatacttcagactcacaaagatccagagtccccacagtcaactccactagctccaactctacctgaaagccatcttctccctccgaccctgaacctagggaaaaacctgacatgtgaaatccatctagggagtactcagagggtagaagcagatgcataagaatgaaagcctgaaatgaaattgtttttattttgtcacccagataaaagtagcacatcaagagctgagtccattatatcacatgcagaaatgaggctctcagcccagacaagaacaagtccctggactctccgtatgagtagccttagggtgccgcacaatagaggaaagcatggaagcagccctcagcctcaaaccacagcatccaatcaaagataaactatgtgagatccatgcaacacatccacgcatctgctccacacaaagattttcttagctctggggaaacatccataacaaaagagataatagatttggaaaggtcactaaacatgtctcagtaattgctaagatagacactgtgggtgtgtgtttaaataaggaaatgggtcagttatgagagtagggaatttgccagtgcatttttaggacagaaactcagatctgacagttgccagatagtaatcaaaccctgtttgggagattcctcattctgccccagcgcttccttttcatgcctgcagatctttcttatttcttcctcagtacgcttctttctctcctctcttactgttttccagtgtgtctgaggtgagtgcagtctgactgcttcccgagggtcttcttcatagacatgcaaagtggtcagcttatggagcacacgctgtagctcttggaaggtgggtctgcgggtggcgagggggatatcccaaagtcgggatcccccctttgcaggggtgctcccttgcctccaaagaacaaagaccggccagagcggggagcacgcaacagtattgtaccagcctcctccagcgccttagcccagcttggccctgccnagcaggtcacgaaacatccttatatagtgtggcttcattgtagcgcctcaggttggctccagcagagtgtgatggcccacctcgggcatcccgaagcccctgggctgtgccccgcttggcccgaaccgtatagcggtgaaaagttttgtgtgtcaccacttctcttccttgaaatatagcaccagcaaagtgcccagctgcagccatgagcaccacgcagtctctgggacctctactttgcaggttctgtagcagcagttctgcctcttctgggggatcctgatgagggcctaggacacagcggtaggcataaagaaactggccctgggcattctggaaaagaactcgatgagggtaaaagcctgggggtcggctcaacttctcaaatgtagccctctcccgatccagtgtctgcaagtcctcctcactggctgagtctgagtcttctgatcccgagatgctggaaagatctcctgtggagctctgcttttcaaagtccagggcagacaggagaggcttgtccttgagacgttgctttaggttaaaccgatgccagtcaagcttataatgttccctctgttcttggtggttctggaaggtctggtcacaagttgaacaaaataacttctctgaaatatccataggaccctggagtagctttctttctgggctttctctctcccctgagcctgaacaggaagtacgcggagcccgggccagagcctccccaggcgcgtggctcaccaggctcaggccctgaaagaccggagcatccgcgctgaggtcaaacagggagatcgacgcaggagccggggctgcatctggagccggcgacatggctgagcagaaattatttagcagcagctccaaacgtcccgggagctgagcggctcgcaagtcctcaggtcgattgccggatttctgcaacacaaatcccgagaattccggaccggtccag

SEQ ID NO: 355235 - DNA, 857 bp, Homo Sapiens
  misc_feature (97)..(97): n is a, c, g, or t
  misc_feature (131)..(131): n is a, c, g, or t
tccggaattcccgggatggacttgcgagccgctcagctcccgggacgtttggagctgctgctaaataatttctgctcagccatgtcgccggctccanatgcagccccggctcctgcgtcgatctccctgtnttgacctcagcgcggatgctccggtctttcagggcctgagcctgagggaacattataagcttgactggcatcggtttaacctaaagcaacgtctcaaggacaagcctctcctgtctgccctggactttgaaaagcagagctccacaggagatctttccagcatctcgggatcagaagactcagactcagccagtgaggaggacttgcagacactggatcgggagagggctacatttgaaaagttgagccgacccccaggcttttaccctcatcgagttcttttccagaatgcccagggccagtttctttatgcctaccgctgtgtcctaggccctcatcaggatcccccagaagaggcagaactgctgctacagaacctgcaaagtagaggtcccagagactgcgtggtgctcatggctgcagctgggcactttgctggtgctatatttcaagggtgagagggtgctgcatgggggtaaggatggagtggatcctgttagccagggagcaccagctggtctccagtactgagtctgtgctgtctacagaagagaagtggtgacacacaaaacttttcaccgctatacggttcgggccaagcggggcacagccagggggcttcgggatgcccgaggtgggccatcacactctgctggagccaacctgaggcgctacaatgaagccacactatataaggtgagttaagccttttagatctggtggtac

SEQ ID NO: 355236 - DNA, 1159 bp, Homo Sapiens
  misc_feature (278)..(278): n is a, c, g, or t
ctggtctaccacccttgttgcaccgcctatggctctcagtgtgttgtctcagtctcatctctgcaatctcagtgtgatttaaccctctcccgggtcccaagggtgcctcttggaccatatgcccaggtcttctaagcgggtttctccatgggctctggggactattcttcgaccttgttcgcgcctgctaacattttccccatcctgctgtgctagccgagcaaacccaggccaaatctcccaggggctctttggcctgacacgcgggggctttggcnctcaatccaagccaaaggccccaaggggccagcaccggcctggggatgactgtgtggaagctcctcttctcgagtttgctggagaagagtccgatgtgccccagcctcctggtctcggcttttctccttctgagtccgtggttctcgctcctccgctttgggcaatacttcagactcacaaagatccagagtccccacaagtcaactccactagctccaactctacctgaaagccatcttctccctccgaccctgaaccctgtttgggagattcctcattctgccccagcgcttccttgtcatccctgcagatctttcttatttcttcctcagtaggcttctttctctcctctcttactgttttccagtgtgtctgaggtgagtgcagtctgactgcttcccgagggtcttcttcatagacatgcaaagtggtcagcttatggagcacacgctgtagctcttggaaggtgggtctgcgggtggcgagggggatatcccaaagtcggggatcccccctttgcaggggtgctcccttgcctccaaagaacaaagaccggccagagcggggagcacgcaacagtattgtaccagcctcctccagcgccttagcccagcttggccctgccagcaggtcacgaacatccttatatagtgtggcttcattgtagcgcctcaggttggctccagcagagtgtgatggcccacctcgggcatcccgaagcccctgggctgtgccccgcttggcccgaaccgtatagcggtgaaaagttttgtgtgtcaccacttctcttccttgaaatatagcaccagcaaagtgcccacagctgcaggccatgagcctcgtgccgattcaacaccagcctcgtacctagcctaatttt

SEQ ID NO: 355237 - DNA, 749 bp, Homo Sapiens
  misc_feature (75)..(94): n is a, c, g, or t
  misc_feature (318)..(318): n is a, c, g, or t
  misc_feature (608)..(643): n is a, c, g, or t
  misc_feature (687)..(704): n is a, c, g, or t
ggtagccagagacagctgtgtacctcacctgtcttttcccttctcccttctagtggcttcactgtattttctttnnnnnnnnnnnnnnnnnnnnggcgaaaataaaccactcaaaagaacaacaaaaaaacccagcacaaaaccgacgatggagtttggttctttgatttctttgccaatggcaagaagatgagatgccctcagcactgaggattcttgcccccttgtggtgcccgctgcccccaaccttcaggctgccagatgctcccctgacaacaccaggctacaggagccagacgccagggcctgcccggcctncctgttcctgcccccacccaccacctgcctgggagaggaacggggtcgggtccgtgtcggagaagtgacaggtcccagagccaaagccggccctcaagcatcatcagggagtggtgtagtcagttgaaggcagttcccaccgagttttccgagcctcagaatccaggagatacgcacagccccacccactctgagatgacagtggctgacttcccgtgctgggcttttccattgaccccctggagtcagggctgggttttggattaacccatccttcctagttaacaccnnnnnnnnnnnnnnnnnnnnnnnnnnnnnnnnnnnnctccgtgtgtgtgttttcctaatttatttacctctgtttccccnnnnnnnnnnnnnnnnnnaattaaagagcaaagctttttattactttgtaatttaaaaaactg

SEQ ID NO: 355238 - DNA, 786 bp, Homo Sapiens
gggtggaaaaccttacggctaggtagcgaggctgggtggcgaatcggcacgaggctgtttgaggatgtaggcactggtgtgaaggaacatggccctgtatcagaggtggcggtgtctccggctccaaggtttacaggcttgcaggctacacacggcagttgtgtcgacccctccacgctggttggcagagcggcttggcctttttgaggagctgtgggctgctcaggtaaagagattagcaagcatggcacagaaggaaccccggactattaagatatcacttcctggaggccagaaaattgatgctgtggcatggaacacaaccccctaccaactagcccggcagatcagttcaacactggcagatactgcagtggctgctcaagtgaatggagaaccttatgatctggagcggcccttggagacagattctgacctcagatttctgacattcgattccccagaggggaaagcagtgttctggcactccagcacccatgtcctgggggcagcagctgaacaattcctaggtgctgttctctgcagaggtccaagtacagaatatggcttttaccatgatttcttcctgggaacaggagaggacaatccggggctcagagctgcctgttttggagcggatttgccaggaacttacagctgctggctcgaccttccggaggctagaggcttcacgggaatcagcttcgcccggttgttctaggtttacccctttaagccttcacttggttgggggaaatgtcccgtcccccgccccgctttgggttg

SEQ ID NO: 355239 - DNA, 828 bp, Homo Sapiens
  misc_feature (445)..(445): n is a, c, g, or t
  misc_feature (740)..(748): n is a, c, g, or t
cagccccactgccagccctgcggctcctggacctccgctggatcgaggatgttaaagactcccagctccgggagtggctgctgcctccaccagacaccaaaccagctgagcgccctggacctgagccactgcgcccacgtcggggaccccagtgttcacctcctcacggcccccacgtccccactccgcgagaccctggggcacctcaatcttgctggttgccaccgcctaacggaccactgcctcccgctgttccgccgctgccctcgtctacgccgcctagacctgcgctcctgccgccagctctcacccgaagcttgtgcccggctggcagctgcccggcccccctggccccttccgctgccctgaggagaagctgcttctcaaggacagctagttgggcgccccccaccctcccccggactcgacaggagcctggacctcncggcttcatttcaccccctgctgggaggccaggttcccacctcaccacccctgggatccctgagtgtcagtgacttggggattcccacccagggactcaagcccagcaacccccttctttcccccctgcactgatatctctggggggttctccttcctatgtcctgcccctgctacctgcttcattgtccatcccctgggggagtgggtcagaggtactggagggtgctgagccgaagggacggtgggaggggggttatggtgcaagtgtgtggggggagaaaatgggaaaaggnnnnnnnnnggatattggagccaggggctggggaaaggtggaaagggccgcggggcggtgcaacacaacaaaccaccaagggttcaggg

SEQ ID NO: 355240 - DNA, 524 bp, Homo Sapiens
tttcatcgtcatggaaacttgtatcccattgcccagggaactgccactcctggttgccatggaaatagcagccaacggacacctcccgatgccagtgctaaggctggaaatggccccctcttagttgccatgggaacctagtaacagactctgctggccctccttccctgccccttcctcgagcgcggggtggggcttcgggaccccggggatgagccgggccaggtcccgcccctccgcgcaggcctccggggggccggggcttaccatgtaggggaggggagatctatccacatacctcaggtaacagggaggtgcgcgggtggggggagggctgggcggaccaaaggccggaggggtggggcctggggatagcgagaggcttgagaatggggccgcttgggggagggaagaggcagcccggcgaggggcaagcgggggacccagccgggctgggcccctgggccccgggtctgtacaatacggtttgctataaaactcaaaatcttccagccgggaaaaaa

SEQ ID NO: 355241 - DNA, 1147 bp, Homo Sapiens
ggacaggtcccgcccctccgcgcaggcctccggggggccggggcttaccatgtaggggaggggagatctatccacatacctcaggtggccatggtggaggtgcagctggagagtgaccacgagtacccaccaggcctgctggtggccttcagtgcctgcaccaccgtgctggtggctgtgcacctctttgcactcatggtctccacgtgtctgctgccccacattgaagctgtgagcaacatccacaacctcaactctgtccaccagtcgccacaccagagactgcaccgctacgtggagctggcctggggcttctccactgccctgggcacctttctcttccttgctgaagttgtcctggttggttgggtcaagtttgtgcccattggggctcccttggacacaccgacccccatggtgcccacatcccgggtgcccgggactctggcaccagtggctacctcccttagtccagcttccaatctcccacggtcctctgcgtctgcagcaccgtcccaggctgagccagcctgcccaccccggcaagcctgtggtggtggtggggcccatgggccaggctggcaagcagccatggcctccacagccatcatggtacccgtggggctcgtgtttgtggcctttgccctgcatttctaccgctccttggtggcacacaagacagaccgctacaagcaggaactagaggaactgaatcgcctgcagggggagctgcaggctgtgtgagactggtgttagccaccgctcactgcaagcactgcctccctccggggtctgtaagaggccgcaggggcctacagacctcatccccccatcccctggctggagccacttccagtggccactctcaggcagagttcagattcctgcccgcagggtcctctgggctgggccttggggcagctcccacattcccagggattttccccatcagtctgtcccttgcggttttgcaagctactctgcacctggggctgggcctcagcttaaaggatcatgccagtagatagcagggaggcacgaaagctgtgggaccttcgcgctgatcttgcccccattccttcctatacgattgtgaggcccacggccgccatgtggccacatcctctttctcaaacacttgttcccg

SEQ ID NO: 355242 - DNA, 704 bp, Homo Sapiens
  misc_feature (24)..(24): n is a, c, g, or t
  misc_feature (31)..(31): n is a, c, g, or t
ttgccagtgatcctgtatatcttnccagtgnttatgaaggacttacaaactcttgctctcatcatttgctggtaagggtcaaaaccatgcgccttactgaagttagaagctgcgaggagcatacttcatccatgtgctcctgagaaagatcctcaaaaaaagaatgacttctttcataattgctttaatgccccggtccagctgctgagtatcaattctaggacatgggatggtagaaacttcacttacaggttgttgtgaactacgattttcaataacgggagtttcttctaaattattaactgtagtacctgcaccagcaccatctccatcctcaataatcctgcaggtgcatctcatatttgagttactttcagcctcagtcttcatacgctcatattctctcattctggctaatgcttgatctaagtgaatcacggtgttacctagatcatctgttgcaaaaggctcaaaatttgatgatacagacaggacactagcattatcagcatcattttgctcacttattttatgggtttctctttcaaagttcttctcaaaagtttcatcatcagtagtagcaaggctctcactaggagtaagttctgagtttgatgctatccaagtaccagagtttactgactttacattttctcctttttcatggctctcagaaatatgtctggatactatgtcctgcaatg

SEQ ID NO: 355243 - DNA, 730 bp, Homo Sapiens
  misc_feature (680)..(680): n is a, c, g, or t
  misc_feature (690)..(690): n is a, c, g, or t
  misc_feature (718)..(718): n is a, c, g, or t
gggcaggacagccccgggatccccgcccgcgcgccgcgtcccacgtaccccgccgcgccgggcaagaagatggcgggatcagtggccgacagcgatgccgtggtgaaactagatgatggccatttaaacaactctttgagctctccagttcaagcggacgtgtacttcccacgactgatagttccattttgtgggcacattaaaggtggcatgagaccaggcaagaaggtgttagtgatgggcatcgtagacctcaacccagagagctttgcaatcagcttgacctgtggggactcagaagaccctcctgccgatgtggcaatcgaactcaaagctgtgttcacagatcggcagctactcagaaattcttgtatatctggggagaggggtgaagaacagtcagcaatcccttactttccattcattccagaccagccattcagggtggaaattctttgtgagcacccacgtttccgagtgtttgtggatggacaccaactttttgatttttaccatcgcattcaaacgttatctgcaattgacaccataaagataaatggagacctccagatcaccaagcttggctgatttaaaccacctctatttcaaataggatcacgtgccacaactatctgactgttggtctggaagaagtgtcctagcaagatctggagacttanaaagaaacanaaacaaatggcaagtttcacttaagggntggttgccctta

SEQ ID NO: 355244 - DNA, 2041 bp, Homo Sapiens
  misc_feature (15)..(15): n is a, c, g, or t
  misc_feature (179)..(179): n is a, c, g, or t
  misc_feature (207)..(207): n is a, c, g, or t
tgggctcttcggctntgtgtccttctccagctgaggcttccttcttttctctagcccctgtttgcaaagatgtgtttgaatctgtgtcttcactgtcaatatccatcctgtcgggttttcctccctcactctctactccctgctttatctgtcaggggcctctgaccttcttctgcccnccaaccactggcccagaagctactgacncagcagggggtgggacgtactccatccctgggtctatgactccatcgccttccatctcatcgtcatcatgaaacaaggcttgtgggggcatcacatctggaatcagatctgcttctgaaagcaagctaggtgtggcagaatgagaggcaggtgtaccaggggcagagaaatccagagaaggagaaggagatgggcttgtcagcggggtgcggtcagaggagctcaaggaggaaaagtcaatcacttcgcctttttccagaatcacatctggcctgcggcctcggcttatgaattttacaggggtagaagatgtgctcctgtcaagaaagccagcggcctccttctgggctcttctaatgtcttttgcttcctgagttcgagaccttttctcttttaattccatggcagattccacaggattccgacttgctcgttttctaagtccctcaacagtaatgatgggatctaaagttggttttgaggctttttattttcaaagtagaggcagacaacttctctccttcaggtttcatcgttgggggcttgttatgaacaagtttccaccatcctggctctccaaattcctgagcacctgaacggaagtacatgggacttcccacgctgaggcaacctgccacggtgctccaccaggtagacgtctttttcctattccctagtaaaaaagtccaatgtttctcaataaaagcacagatatcttctttccacctgaaataaccttgacgtccacttccttccagagacaagttgtacattgccaacatgacgacttgctgccatgtcagcttcagcctttcatactgctccttgccatctgctgagcaatccgaacaagtaaacctaaaaaaattatcacccttaaggtaactgagctgttccctcagctgactggctggtatccatttttggcacttgtcacagaagtaggacagctgctcctccatccaagacacgtctccttcatcactgttgagggaatccccactctggtcgtgcgataagtccactgatgcctgatcctcggattcgacgatcaggagcgtctctccctccacttcaccttcctccagtccttctgaggtcgatgttctcgtggcttcgtcatcatgccgactgatcagactactcaggtggatgctactatccatcccttccttctcacaagctcggcagtgcttctcagtaacaaccctaagcactggacagtgaccctaatggggcttctaccaggatcacccagacagactcttccaaaaagtgtctgcccacactcctttattcagatataagggaccctgaaagcagtaacttatatgacccactgtcctttatttgatcaagtttaaaaggacagtgaccaaaaaaaaagatgaagatactactaagctactctccatcaacacacacacacaaactcgtgttgtctgtccaacagatatttcacattcaagtcatgatttttgagatccttttgccaataacatcttctctctttctgcttcaagttgctcagtcaaaataatctgttctcccaaaagacgaatgttttcttttttccgaatttgcctctcaatgtctctgataactccgtcacgaagcctctgctggtcccactgctgcttcacatgtacgccggccactgtggccgccgtcagcagcaccgagaggcccagcaccaccttcgagctcctagacatccccacgctggcggccgcggcctctctctcccgcccgcccgaggcgcagaggccgccgcagagtgcgcaccgccgcctgtactgcccctcgtgccgaattcgccacccaggcctcgcta

SEQ ID NO: 355245 - DNA, 603 bp, Homo Sapiens
gaagccccattagggtcactgtcccagtgctttagggttgttactgagaaagcactgccggagcttgtgagaaggaagggatggatagtagcatccacctgagtagtctgatcagtcggcatgatgacgaagccacgagaacatcgacctcagaaggactggaggaaggtgaagtggagggagagacgctcctgatcgtcgaatccgaggatcaggcatcagtggacttatcgcacgaccagagtggggattccctcaacagtgatgaaggagacgtgtcttggatggaggagcagctgtcctacttctgtgacaagtgccaaaaatggataccagccagtaaggagcttctcaattcctttgatttgtcaattcctgtgtgaaggtttgtttttccaacctgtgaaagaaacgtgaatgtaaaagagacctaaataaaaggataattatatttattctctagttgatcagctataaatttatataaaacataggcatgtttgtactaatgaaacgtactgtcaacctctatcacattgttaaattaacacttttggtggtaactcaataaaattgagaaaattggaaacaaaacacacaaac

SEQ ID NO: 355246 - DNA, 996 bp, Homo Sapiens
  misc_feature (167)..(198): n is a, c, g, or t
gtggatcccccgggctgcaggaattcggcaccagggattatactcgacctgatcttccatctggggatggacaacctgcattggacccagctattgctgcagcatttgccaaggagacatccctcttagctgttccaggagctctgagtcctttggccattccaaannnnnnnnnnnnnnnnnnnnnnnnnnnnnnnngccgagtgggtatgcctggagtctcagctggtggcaatacagtcctgttggttaacaatttaaatgaagagatggttacgcccaaaagtctgtttaccctcttcggtgtttatggagatgtgcagcgtgtgaagattttgtacaataagaaagacagcgctctaatacagatggctgatggaaaccaatcacaacttgccatgaatcatcttaatggacagaaaatgtatggaaaaattattcgtgttactctgtctaaacatcagactgtacagctacctcgagagggacttgatgatcaagggctaacaaaagattttggtaattccccattgcatcgttttaagaaacctggatccaaaaattttcaaaacatttttcctccttctgccacccttcacctatctaatatccctcaatcagtagcagaagaggatctacgaacactgttcgctaacactgggggcactgtgaaagcatttaagttttttcaagatcaccaaaatggctcttcttcagatggcaccagtggaagaaagctattccaggcctttgatgatcttcataattattaccttggagaaaaccatcatctgagagtgtcttctccaagtcaccatttaccaatgggaagatgacgatggggggtgaatcccttggtcccatggtccatcacctaatttgacctggtccagaaaacgtggggaccagagttggattatggggtgaggtatatggggatacttatattttcccatggctgtaatcatcctgggttctaacacttgacctggcttg

SEQ ID NO: 355247 - DNA, 708 bp, Homo Sapiens
aagaactaaagacagataatacattaaaccaacgtgctcaggcagtcttcaagctgtgacagctgtccagacagcaaatactcctcttagtggcaccacagttagcgagagtgcagtgactccagcccagagtccagtacttagaataattattgacaacatgtactaccctgtaacacttgatgttcttcaccaaatattttctaagtttggtgctgtattgaagataatcacatttacaaaaaataaccagtttcaagctttgctccagtatggtgatccagtaaatgctcaacaagcaaaactagccctagatggtcagaatatttataatgcctgctgtaccctaaggattgatttttccaaacttgtgaatttgaatgtaaaatacaacaatgataaaagtagggattatactcgacctgatcttccatctggggatggacaaactgcattggacccagctattgctgcagcagttgccaaggagacatccctcttagctgttccaggagctctgagtcctttggccattccaaatgctgctgcagcagcttgctgcagctgctgctggccgagtgggtatgcctgggagtctcagctggtggcaatacagtcctgatggttagcaatttaaatgaagagatggttacagccccaaagtctgtttaccctcttcgaggtacatggaagatgtgcagcgtgtga

SEQ ID NO: 355248 - DNA, 810 bp, Homo Sapiens
  misc_feature (683)..(767): n is a, c, g, or t
gccgagtgggtatgcctggagtctcaactggtggcaatacagtcctgttggttagcaatttaaatgaagaggtgtttatggagatgtgcagcgtgtgaagattttatacaataagaaagacagcgctctaatacagatggctgatggaaaccaatcacaacttgccatgaatcatcttaatggacagaaaatgtatggaaaaattattcgtgttactctgtctaaacatcagactgtacagctacctcgagagggacttgatgatcaagggcataacaaaagattttggtaattccccattgcatcattttaagaaacctgaatccaaaaattttcaaaacattattcctccttctgccacccttcacctatctaatatccctccatcagtagcagaagaggatctacgaacactgttcgctaacactgggggcactgtgaaagcatttaagttttttcaaagagatcacaaaatggctcttcttcagatggcaacagtggaagaagctattcaggccttgattgatcttcataattataaccttggagaaaaccatcatctgagagtgtctttctccaagtcaacaatttaaaaaatgggaagatgaagattgggggtgaatcacattgttcaatgtcatcacctatttgactgttcagaaaagtggggaccagagtttgannnnnnnnnnnnnnnnnnnnnnnnnnnnnnnnnnnnnnnnnnnnnnnnnnnnnnnnnnnnnnnnnnnnnnnnnnnnnnnnnnnnnacattaattaaacagcaaaaaacatggttacagtcaagcttca

SEQ ID NO: 355249 - DNA, 1216 bp, Homo Sapiens
  misc_feature (44)..(80): n is a, c, g, or t
  misc_feature (1116)..(1116): n is a, c, g, or t
  misc_feature (1120)..(1120): n is a, c, g, or t
  misc_feature (1150)..(1150): n is a, c, g, or t
  misc_feature (1157)..(1157): n is a, c, g, or t
  misc_feature (1164)..(1164): n is a, c, g, or t
  misc_feature (1171)..(1171): n is a, c, g, or t
  misc_feature (1181)..(1181): n is a, c, g, or t
  misc_feature (1183)..(1183): n is a, c, g, or t
  misc_feature (1202)..(1202): n is a, c, g, or t
gaagtaagactatatggggaatgcgctgtatgcggtggcggcgnnnnnnnnnnnnnnnnnnnnnnnnnnnnnnnnnnnnnatcaggccaaatcggccgagctcgaattcgtcgagagcggagcaacgcgcacttcctctccaggaatccgcggagggagcgcaggctcgaagagctcctggacgcagaggccctgcccttgccagacggcgcagacatgtcagaacaaagtaaggatctgagcgaccctaactttgcagccgaggcccccaactccgaggtgcacagcagccctggggtttcggagggggttcctccgtccgcgaccctggcagagccgcagagccctcctctaggcccgacggccgctccgcaggccgcgccgcctccccaggccccgaacgacgagggcgacccgaaggccctgcagcaggctgcggaggagggccgcgcccaccaggccccgagcgcggcccagccgggcccggcaccgccagccccggcgcagctggtgcagaaggcgcacgagctcatgtggtacgtgctggtcaaggaccagaagaagatgatcatctggtttccagacatggtgaaagatgtcatcggcagctacaagaagtggtgcaggagcatcctccggcgcaccagcctcatcctcgcccgggtgttcgggctgcacctgaggctaaccagcctgcacaccatggagtttgcgctggtcaaagcgctggagcccgaggagctggacagggtggcgctgagcaaccgcatgcccatgacaggcctcctgctcatgatcctgagcctcatctacgtgaagggccgcggcgccagagagagcgccgtctggaacgtgctgcgcatcctggggctgcggccctggaagaagcactccaccttcggggacgtgcggaactcatcactgaggagttcgtccaaatgaattacctgaagtaccagcgcgtcccatacgtggagccgcccgaatacgagttcttttggggctccgggccagccgcgaaatcaccaagatgcaaatcatggagttctggccagggtctttaagaagaccccaggcctggcctcccgatacagagaagctctggaggaggcaaantctngggaggtaatccactgccactacctcgcanagttttntaagacnacaaatntgaggaaatnantgttttgacccacaaggtntgaaggtggggtgg

SEQ ID NO: 355250 - DNA, 1202 bp, Homo Sapiens
cagaagaagatgatcatctggtttccagacatggtgaaagatgtcatcggcagctacaagaagtggtgcaggagcatcctccggcgcaccagcctcatcctcgcccgggtgttcgggctgcacctgaggctaaccagcctgcacaccatggagtttgcgctggtcaaagcgctggagcccgaggagctggacagggtggcgctgagcaaccgcatgcccatgacaggcctcctgctcatgatcctgagcctcatctacgtgaagggccgcggcgccagagagagcgccgtctggaacgtgtgcgcatcctggggctgcggccctggaagaagcactccaacttcggggacgtgcggaagctcatcactgaggagttcgtccaaatgaattacctgaagtaccagcgcgtcccatacgtggagccgcccgaatacgagttcttttggggctcccgggccagccgcgaaatcaccaagatgcaaatcatggagttcctggccagggtctttaagaaagacccccaggcctggccctcccgatacagagaagctctggaggaggccagagctctgcgggaggctaatcccactgcccactaccctcgcagcagtgtctctgaggactagcaaagtctggaggcagatgaatggtttctgaccctcaccagggctgtggaagggtgggggtgggtcattatagtattcaggatttacagtgcagtattcacgtgtaacttttaagttttcagtacagtgcttttatacctttaatgcaatgttgtattcatttgggtactattgtgtagtatttaggatgtatgcatgtttgtttatatgtaagcttggttggtgctttcgcttttgtgctacctttcttggatttttgtaccagagatgtgctaaactgatgaaatacattgagaaagtttccatcttattcttttatatgggactgatgatgtgtgttggggtagactgctcctgcagagtttggaagaagtcaccagcaaagccggcctaaccaagaaaagtcaaggcccttcatgaccttgctgggcacagaaaacaccctcgtggagtacactaatttgaactggactggtctcagtgtgagcacttggcacactttactaaacacatatacaaccccaccgtgagtcaactttaaagtaaacattaaagattcttgtgatacaatcattt

SEQ ID NO: 355251 - DNA, 854 bp, Homo Sapiens
  misc_feature (114)..(114): n is a, c, g, or t
  misc_feature (190)..(190): n is a, c, g, or t
  misc_feature (194)..(194): n is a, c, g, or t
  misc_feature (220)..(220): n is a, c, g, or t
  misc_feature (248)..(248): n is a, c, g, or t
  misc_feature (304)..(304): n is a, c, g, or t
ccttaagctggtgcgccgctgggatttgggtgcccggattggcctttggaggcagggtttccgccccagcttatttaagaagggggaaaccagcccaggagggggctgctcctnccgaggaggtgccagttctcgccaggctccttgaacccctaccccaggttcttcctcaaaaggacggcagctcagnatgnaggcagtacctgctcccagctccctncggtccagcactctccgtacagcggcancattgctcccgtgatatgccatgtgccacttcttggttagtgtccagccctccagncggggattcactctgaggttgaacctgcaccagccaaagggcagtgcatatccccggggaggctcccctctgcgcctgtgggcctcgtctcctcgcagcttccggcaagactcacagtagcacaggcttcgctttggcggaggcatgaaataatcttcgggaagcagcaggagttcttggaagcgagagcaaagggcatggtactcgcagctctttagaggactagcggcaggtggtggaccccagcacacactctctttgataccgtccaccatgtctgctttctccatgtccccttgggttccagcacttttcccactggcagcccctggctcagggttcacgattgtcacctgctcacactgcccatagaggtccacaagcgcatggcagggctggggcacatctggcacagctaccccctggtccaccccattaacatgaagatgcagccccccagagctgtccagccgcagtcccaggatggtgccttcagggcacgtgtccagattgggcccaaacttctcgcagatcttgagaccgttgtgga

SEQ ID NO: 355252 - DNA, 946 bp, Homo Sapiens
tctgcaaggcatcgatggggtccctggtttagtatcctggcgcacactcacctgtactgccacctgagcctggcgctttcgcttggatttcgggtcccggaattccactttggaggccatggtctcctgccccagcatattgaagggagggggaaagcagcacaggagggggctgctcctcccgaggaggtgcacagttctcgccaggctcctcgaaccctaccccaggttctcccttccaaaggacggcagctcaggatggaggcagtacctgctcccagctcccctcggtccagcactctccgtacagcggcaacattgctcccgtgatatgccatgtgccacttcttggttagtgtcccagcctccaggcggggattcactctgaggttgaacctgcaccagccaaagggcagtgcatattcccggggaggctcccctctgcgcctgtgggcctcgtctcctcgcagcttccggcaagactcacagtagcacaggcttcgctttggcggaggcatgaaataatcttcaggaagcagcaggagttcttggaagcgagagcaaagggcatggtactcgcagctctttagaggactagcggcaggtggtggaccccagcacacactctctttgatacctgagggagcagaggggcacaggtcacaggagctgggctagaagggtgagggcgggggagtaggggcaggagctgggtccctttgggctggcacaccgtccaccatgtctgctttctccatgtccccttgggttccagcacttttcccactggcagcccctggctcagggttcacgattgtcacctgctcacactgcccatagaggtccacaagcgcatggcagggctggggcacatctggcacagctaccccctggtccaccccattaacatgaagatgcagccccccagagctgtccagccatccca

SEQ ID NO: 355253 - DNA, 407 bp, Homo Sapiens
  misc_feature (385)..(385): n is a, c, g, or t
ccagggggtagctgtgccagatgtgccccagccctgccatgcgcttgtggacctctatgggcagtgtgagcaggtatcaaagagagtgtgtgctggggtccaccacctgccgctagtcctctaaagagctgcgagtaccatgccctttgctctcgcttccaagaactcctgctgcttcccgaagattatttcatgcctccgccaaagcgaagctgtgctactgtgagtcttgccggaagctgcgaggagacgaggcccacaggcgcagaggggagcctccccgggaatatgcactgccctttggctgggtgcaggttcaacctcagagtgaatccccgcctgggaagctgggacaatgaaccaagaagtgggcacatggcatatnacgggagcaatgtttgccgtgt

SEQ ID NO: 355254 - DNA, 854 bp, Homo Sapiens
  misc_feature (625)..(625): n is a, c, g, or t
  misc_feature (628)..(628): n is a, c, g, or t
  misc_feature (709)..(709): n is a, c, g, or t
  misc_feature (729)..(729): n is a, c, g, or t
  misc_feature (732)..(732): n is a, c, g, or t
  misc_feature (769)..(769): n is a, c, g, or t
  misc_feature (802)..(802): n is a, c, g, or t
ggctgacccaggagcggggccgtgcccaggctgaccttgccctggagaaggcggccagagcagagcttgagatgcggctgcagaacgccctcaacgagcagcgtgtggagttcgctaccctgcaagaggcactggctcatgccctgacggaaaaggaaggcaaggaccaggagttggccaagcttcgtggtctggaggcagcccagataaaagagctggaggaacgtcggcaaaccgtgaagcaactgaaggaacagctggctaagaaagaaaaggagcacgcatgctggctcaggagcccaagtccgaggcggctggcaggacagagccaacaggccccaagctggaggcactgcgggcagaggtgagacaagctggaacagcaatgccagaagcagcaggagcaggctgacagcctggaacgcagcctcgaggctgagcgggccatcccgggctgagcgggacagtgctctggagactctgcagggccagttagaggagaaggcccaggagctagggcacagtcagagtgccttagcctcggcccaacgggagttggctgccttccgcaccaaggtacaagaccacagcaaggctgaagatgagtggaaggccccagtgcccnggngccccgcagaggctgagaggaaaaatacctcatcagcagcttggaggaaggaggtgtccatccctgatcgccagtcctggnagaagagggggagagcaggnagntgaagccgctggtgatggccgagtcaaagagaaccanaactggaggagaagctgcccctgctgcaggcanagacagccagcaacagtgcaagagctgaaaacgcagcctgcttgcggaaggc

SEQ ID NO: 355255 - DNA, 1045 bp, Homo Sapiens
gggagctgcggaaggagccacgctttcgggggttgcaagatggcggccaccagtggaactgatgagccggtttccggggagttggtgtctgtggcacatgcgctttctctcccagcagagtcgtatggcaacgatcctgacattgagatggcttgggccatgagagcaatgcagcatgctgaagtctattacaagctgatttcatcagttgacccacagttcctgaaactcaccaaagtagatgaccaaatttactctgagttccggaaaaattttgagacccttaggatagatgtgttggacccagaagaactcaagtcagaatcagccaaagagaagtggaggccattctgcttgaagtttaatgggattgttgaagacttcaactatggtactttgctgcgactagattgttctcagggctacactgaggaaaacaccatctttgcccccaggatacaattctttgccattgaaattgctcggaaccgggaaggctataacaaagctgtttatatcagtgttcaggacaaagaaggagagaaaggagtcaacaatggaggagaaaaaagagctgacagtggagaagaagagaacaccaagaatggaggagagaaaggagctgatagtggagaacgaacaaagaggaaggaatcaacagacacagacaaaactgacaaaggaggagacaaaagggaaagaagctgacaaagaaatcaacaaaagtggtgaaaacagctatgtaaggtatacagggaacagcactctagaagctatgactcaattgagactacaagtacccacggtgctacttgcacagacccctttggttaaatgtaaattcttgtacaattggaaggatacgcagaaggacatctttctagtctaacagtcaggagctgctctggtcattcccttggatgaactggtctaagactggttaatggggggggttagtttgatttttccggggaaactgttttcttggctgaccctactgggccagtaagaaatttgtaaataaatttccttttgggttcttaat

SEQ ID NO: 355256 - DNA, 945 bp, Homo Sapiens
tgattgcgaactctgccaatgtcccgcgtgattaaacgtgtgtgtaactctatgaagcccccgtagttatctcgacgcgttaattgttgcagtggcgaccgtgaatgcccccagggtattctggctgtatatggatttgctatccacggggtaagcaagcgtaacgttgtgtgcgccattcccatatggggattgatctgcattccccggttgagtaagagttgtcaagagagtttcgtggttcctagataaaggtgaagacggtttgtggaaattacgctggcccattttatatctttatgtgataagtagacagacacaacactgattcccttagggaataatggagcttgtctaggaagtacagagaaaggacctgtcttcttcccagccccatccgctgagttggttctgtcatcgttctgagtaatgctgccgtccaaggttgtaagtcttgttacccgtaatactgtttccacccccagagctccccgttctcaagttttcttagtagaatgtgtgatttatttctgagtctttacaataaatcaattatataaggaatggtgagggatgaattctagaagagggtgatgcatggaaatttctaagtttagagaaagggaaaattggagtatttaaacctgaagaaggtgagagaggtgagattcatagaaggaaaagacgaaaacagatagaggtctaagaatcgggagctacggaagatttttttaaaacggtaaaggaatggaagcccccaacctacagaggataccggggactgcaagaggaagtttgaggcaggtgatggaggacaaagggactttcatctcccctatccaagtgtcctcccccacatttttatagctctccattctttcccattatccattcccgacgcgtgggtcgacgatatcccggaattccggaccgtaccagccgtgg

SEQ ID NO: 355257 - DNA, 1345 bp, Homo Sapiens
  misc_feature (97)..(156): n is a, c, g, or t
  misc_feature (258)..(258): n is a, c, g, or t
ggctgccgcgccccggggaagaagagacagtggtggggtttgggggaagcgagagaggaggggagagaccctggccaggctggagcctggattcgannnnnnnnnnnnnnnnnnnnnnnnnnnnnnnnnnnnnnnnnnnnnnnnnnnnnnnnnnnntgcggcggtgcctggggccttgaggccctggggagagccggggagccgggcccgcgcgccgagatgttgctgctgctgctactggcgccactcttcctccgncccccgggcgcgggcggggcgcagaccccacaacgccacctcagaaggttgccagatcatacacccgccctgggaagggggcatcaggtaccggggcctgactcgggaccaggtgaaggctatcaacttcctgccagtggactatgagattgagtatgtgtgccggggggagcgcgaggtggtggggcccaaggtccgcaagtgcctggccaacggctcctggacagatatggacacacccagccgctgtgtccgaatctgctccaagtcttatttgaccctggaaaatgggaaggttttcctgacgggtggggacctcccagctctggacggagcccgggtggatttccggtgtgaccccgacttccatctggtgggcagctcccggagcatctgtagtcagggccagtggagcacccccaagccccactgccaggtgaggggaacagctgcctgcatgcagctgatgaggacgcttgtgtgaggatgggagtggggtgggaatggataatgggaaagaatggagagctataaaaatgtgggggaggacactggaacaggggagatgaaagtccctttgtcctccatcacctgcctcaaacttcctcttgcagtccccggtatcctctgtagggtgggggcttccttcctttaccttttaaaaaaatcttcctgctcccgattcttagacctcacgttttctcttttcctttatgaatctcacctctctcaccttcttcaggtttaaatactccaatttttccctttctctaaacttaaaaatttccctggcatcccccctctttctagaattcattccctcacccattccttaatataattgcatttattggaaaagactccgaaaataaattccaaaattcctccttaagaaaaaatttgaaaagggggaaccctcctgggggcggcccccattatttggggccaaaatacctttaactttgggaggggcgccttttttctgaaaggttgagaaacaattttatggggattgggcgcgggcggaaaacaccaatggtccccctttttgcgccccttcctcttaaaaagaaccccacctcttctc

SEQ ID NO: 355258 - DNA, 867 bp, Homo Sapiens
agcgggggcggtaactcgcaggccggacgtgacgcaaggcgggggctgagctgcgccggccggaaacccagcaggcggcgaagatggcggagaacagcggtcgcgccggcaagagcagcgggagcggcgcggggaagggggcggtgtccgcagagcaggtgattgctggcttcaaccgccttcggcaggaacagcgaggcctggcatccaaagcagctgagttggagatggagttgaatgagcacagcctagtgatcgatacactgaaggaggtagatgaaactcgtaagtgctaccgcatggttggaggagtgctggtggagcgaactgtcaaagaggtgctgcccgctttggagaacaacaaggagcagatacagaagatcattgagacactgacacagcagcttcaggcaaagggaaaagaactaaatgaattccgggaaaagcacaacattcgtctcatgggagaagatgagaagccagcagccaaggaaaactcagaaggggctggggctaaggccagctcagctggagtgttggtctcctagggaccaaggcctttgcatttttttctaccctgactcccacttctaatttctctttattgttattattattattttctctgctattgtaatatttttttgttaattaaatgttttggtcagaatcttaacccacgggcctgccctcgttcctgtccccaccccatgtgccccaaaccacaggcacttcctaggccctcagcaacaccccgaatgaatatttgcaaattgggttttttgggggtcccccttggcccctttaaaaggatttttcctaaacctttggctttgggccgccgcgggcccccgaagggataggttt

SEQ ID NO: 355259 - DNA, 1944 bp, Homo Sapiens
  misc_feature (1924)..(1924): n is a, c, g, or t
  misc_feature (1933)..(1933): n is a, c, g, or t
cccacgcgtccgcccacgcgtccgcaccagcacagcgtgctgcacagggcgctgcaggcatgggtgacttaccagggcagggtgcgaagcatcctccgggaggtggcagccagggagagccagcacaacaggcagctgctgcgcggggcattacgtcgctggaaagagaacaccatggcccgagtggatgaagccaaaaaaacctttcaagcaagtactcattacagaaggaccatatgttccaaggtcctggtccagtggcgggaaactgtgtcagtgcagatgtattaccgacagcaggaggactgtgccatctgggaggcccagaaggtgctggacaggggctgtctgcggacctggtttcagcgctggtgggactgcagccggaggtcagcccagcagagactgcagctggagagggcagtgcaacaccaccaccggcagctgctgctggaggggctggcccggtggaagacgcaccatctgcagtgtgtcaggaagaggctcctgcacaggcagagcacccaactgctggcacagagactcagccggacctgcttccgccagtggagacaacagctggcagccaggaggcaggagcagcgggcgacagtgcgggccctgtggttctgggccttctcgctgcaggcaaaggtgtgggccacgtggctggcctttgtactggaaaggaggagaaagaaggcgcggctgcagtgggcgctccaggcctaccaggggcagctcctccaggagggtgccacgcggatcctgcgctttgcagccagcatgaaggcctcccggcagcagctgcaggcccagcagcaggtccaggcggctcacagtctccatcgtgccgtccgccgctgtgccacgctctggaaacagaaagtgatgggccggggcgggaagcctcagcccctggcagccatcgcacccagcaggaaagtgacgtttgagggtccccttctcaaccgcattgctgctggggctggggatggcacccttgagaccaagaggccacaggcttctcggcctctgggagctctgggccgcctggctgctgaggagccccacgccctggagctcaacactgcccactcagcgaggaagcagccgcgacgcccacacttcctgttggagcctgcgcagagccagaggcctcagaagccacaggaacatggcctaggcatggctcagccagcagccccctccctgacgcggcccttcctggcagaggccccgacagcactggtcccacacagccccctgcctggggccctgtcaagcgcccctggcccgaagcagcccccgacggcaagcacaggcccggagctgctgctgctgcctctttcctccttcatgcctgcggggcggctgcaccagccagggtgtcagcacagcgggctactcctagggataagcccccggtcccctcatccctggccagtgtccctgacccccatctactccttcctggggacttctcagccaccagggctgggcctggactttcaactgcaggcagcctggaccttgaggctgaacttgaggagatccagcagcaactactgcactaccagaccacccaagcagaacctctggtcctgtcggcggcaagcgagcagcctgcgcaggtggctggagctgaacagagaggagccggggcctgaggaccaggaagtagagcagcaggtgcagaaagagctggaacaggtggaaatgcagatccagctgctggcagaggagctccaggctcagcgccagcccattggcgcctgcgttgcccgcatccaggccctgcggcaggccctgtgctagcgtgttcgcaccaggaacgcaggtgctgggctgtcggggaggcctcaggccacctccaggaacagaacacagttttaagtttgattttttttatttcaaaatgctntgcaattanatgaattactg

SEQ ID NO: 355260 - DNA, 757 bp, Homo Sapiens
cagggagggggctcggctgagccatgcctaggccatgttcctgtggcttctgaggcctctggctctgcgcaggctccaacaggaagtgtgggcgtcgcggctgcttcctcgctgagtgggcagtgttgctggaaagaaacatggggtctgttcccctgggctgaccaggggctgcaggggggtctgagatctctgtgggatctccaattttatagggagactgaaagtcaggaaaggcgaggccaaggtcagcaagtaagctggggtgggcctgggccatagagctcccagcagttccgacaaaaggtacctgaacgccaagggactgcttcaccccacattgtctcttttgacctgcaaaaacaacccctggtgacgctggtgtacaggtcgcccagggtcccatgtcacaggggagcagcctctgagacgttcaggatcccatcaaggtcagtcaaacagtgaggagcacagcagggaccgggacccaggccccatgcacccacctgacatctcccccgaggcccaaggctctcgggtagtgctggttgctgtgggagccaccagcttcatcagcatggggcagggcaggttagggtttgaggagaccatagtaggggtgggcagagggacaggtgccagctcacacaagaaagaggggcttctgacaaaaagccagtgtcttggctgtgatggagcagaagagaggccggcaggcacgggtaggagctgagcttgttccctttgtcaactacgt

SEQ ID NO: 355261 - DNA, 2633 bp, Homo Sapiens
  misc_feature (60)..(90): n is a, c, g, or t
  misc_feature (1924)..(1924): n is a, c, g, or t
  misc_feature (2514)..(2514): n is a, c, g, or t
  misc_feature (2539)..(2539): n is a, c, g, or t
  misc_feature (2541)..(2541): n is a, c, g, or t
  misc_feature (2559)..(2559): n is a, c, g, or t
  misc_feature (2561)..(2561): n is a, c, g, or t
  misc_feature (2566)..(2566): n is a, c, g, or t
  misc_feature (2569)..(2569): n is a, c, g, or t
  misc_feature (2575)..(2575): n is a, c, g, or t
  misc_feature (2595)..(2595): n is a, c, g, or t
  misc_feature (2600)..(2600): n is a, c, g, or t
  misc_feature (2602)..(2602): n is a, c, g, or t
  misc_feature (2608)..(2608): n is a, c, g, or t
  misc_feature (2612)..(2612): n is a, c, g, or t
  misc_feature (2623)..(2623): n is a, c, g, or t
  misc_feature (2631)..(2631): n is a, c, g, or t
  misc_feature (2633)..(2633): n is a, c, g, or t
gaggtggagtgtatacgactcaactataggggaccggagcttacgcggggcggccgcatnnnnnnnnnnnnnnnnnnnnnnnnnnnnnnnggatcaggccaaatcggccgagctcgaattcgtcgagagcgggagagagccaccgagccgagccgagccccagctccagcaagagcgcgggcgggtggcccaggcacgcagcggtgaggaccgcggccacagctcggcgccaaccaccgcgggcctcccagccagccccgcggcggggcagccgcaggagccctggctgtggtcggggggcagtgggccatgctgggggcagtggaaggccccaggtggaagcaggcggaggacattagagacatctacgacttccgagatgttctgggcacgggggccttctcggaggtgatcctggcagaagataagaggacgcagaagctggtggccatcaaatgcattgccaaggaggccctggagggcaaggaaggcagcatggagaatgagattgctgtcctgcacaagatcaagcaccccaacattgtagccctggatgacatctatgagagtgggggccacctctacctcatcatgcagctggtgtcgggtggggagctctttgaccgtattgtggaaaaaggcttctacacggagcgggacgccagccgcctcatcttccaggtgctggatgctgtgaaatacctgcatgacctgggcattgtacaccgggatctcaagccagagaatctgctgtactacagcctggatgaagactccaaaatcatgatctccgactttggcctctccaagatggaggacccgggcagtgtgctctccaccgcctgtggaactccgggatacgtggcccctgaagtcctggcccagaagccctacagcaaggctgtggattgctggtccataggtgtcatcgcctacatcttgctctgcggttaccctcccttctatgacgagaatgatgccaaactctttgaacagattttgaaggccgagtacgagtttgactctccttactgggacgacatctctgactctgccaaagatttcatccggcacttgatggagaaggacccagagaaaagattcacctgtgagcaggccttgcagcacccatggattgcaggagatacagctctagataagaatatccaccagtcggtgagtgagcagatcaagaagaactttgccaagagcaagtggaagcaagccttcaatgccacggctgtggtgcggcacatgaggaaactgcagctgggcaccagccaggaggggcaggggcagacggcgagccatggggagctgctgacaccagtggctggggggccggcagctggctgttgctgtcgagactgctgcgtggagccgggcacagaactgtcccccacactgccccaccagctctagggccctggacctcgggtcatgatcctctgcgtgggagggcttgggggcagcctgctccccttccctccctgaaccgggagtttctctgccctgtcccctcctcacctgcttccctaccactcctcactgcattttccatacaaatgtttctattttattgttccttcttgtaataaagggaagataaaaccatccttagcgctgtctccctcaatatcccccaccccatcttgttgtgcaaactgactgcttgatttgggggtgcctggcctttgaggtagtcacagggaggcccctccccaacatgagactgggtggggatggggagagagaagtggggaatggaggggaaggtgcttggggaatttctttgtccagggtgccccatctagccttccggccctttggaaccctttctgcgctttgctggtggctcctgagcatggcgggattggcgcaggtcggcactgaacagcacctgtaggaaggtggagtctgtgtngggaggagggtacactggggtcagggctggtgagactagtgacagtgttgggaggtggaagagtccttggggaacagggccgaaggaagtgagaatccactggggttgggacaggggtggctggagagtcctttagggccacctggggcggtggtggaagagtccactgggtctgggctggaggagaggaaacctagggaggacacctaggtacactcaccgcttgggcccagccagcataaggtccccacaggctccggaaaaagtttcccagttccttgttggtctgggggctcggtcccttcgcctgggacgtggtagggtgccagctgtagtcacgttgggcaatgtgccacatatggacatccacgggcacagcctgggggcttgtctagggccatcaggcagatgcagtcagccaccttggtgcccactccaggcaggatgcagagggccttgtgggcctcctcatatgaggactctcgtagctgctgcagccaggctagcccgccctgttcttccaggatggctcgggcactggcactcacgtaacgggcacgatagcccaggcccagcttcctgagatgagnctccacctactggccagccagggcntnaggctggggagccatggnangtganatnttcaanttgatgagcgaggtcaaaancttgnanagccgntcancattgcaattnttgcgggngn

SEQ ID NO: 355262 - DNA, 677 bp, Homo Sapiens
tgccctggagaacccagaagaacacagctgtgcgcgcccacaggctctgggggcgggagaagataagtcgcaaggagggggcgggacctacacctcaggaaagccggagaattggggcacgaagcggggctttgatgacccgcaaagggcgaggcatgcaggaggtggaggaattaagtgaaacagggaaggttgttaaacagcaccgtgtgggcgaggccttaagggtcgtggtccttgtctgggcggggtctttgggcgtcgacgaggcctggttctgggtaggcggggctactacggggcggtgcctgctgtggaaatgcctgcccgcgcgcttctgcccaggcgcatggggcatcgtactctagcctccactcctgccctgtgggcctccatcccgtgccctcgctctgagctgcgcctggacctggttctgccttctggacaatctttccggtgagtgactgagcctgagaagcctgtcccctcggactggctcctgccgcctcaacactgcctggcatggggtacaaaggaatttgggggatgatggaagaaacccggggtacaaaagaggaaacaagcacgggtagccaacctgttacctttaatatgtctgtacagtgataattgtaaggatccagcggtataaccgatgcagaagataatagcacttg

SEQ ID NO: 355263 - DNA, 1382 bp, Homo Sapiens
  misc_feature (42)..(78): n is a, c, g, or t
atgtaagatatatagggactggagcttacgcggtggcggcgnnnnnnnnnnnnnnnnnnnnnnnnnnnnnnnnnnnnnatcaggccaaatcggccgagctcgaattcgtcgagagcggggtgctgtggtctgcccctggagaacccagaagaacacagctgtgcgcgcccacaggctctgggggcgggagaagataagtcgcaaggagggggcgggacctacacctcaggaaagccggagaattggggcacgaagcggggctttgatgacccgcaaagggcgaggcatgcaggaggtggaggaattaagtgaaacagggaaggttgttaaacagcaccgtgtgggcgaggccttaagggtcgtggtccttgtctgggcggggtctttgggcgtcgacgaggcctggttctgggtaggcggggctactacggggcggtgcctgctgtggaaatgcctgcccgcgcgcttctgcccaggcgcatggggcatcgtactctagcctccactcctgccctgtgggcctccatcccgtgccctcgctctgagctgcgcctggacctggttctgccttctggacaatctttccggtggagggagcaaagtcctgcacactggagtggtgtactagcggatcaagtatggacactgactcagactgaggagcagctccactgcactgtgtaccgaggagacaagagccaggctagcaggcccacaccagacgagctggaggccgtgcgcaagtacttccagctagatgttaccctggctcaactgtatcaccactggggttccgtggactcccacttccaagaggtggctcagaaattccaaggtgtgcgactgctgcgacaagaccccatcgaatgccttttctcttttatctgttcctccaacaacaacatcgcccgcatcactggcatggtggagcggctgtgccaggcttttggacctcggctcatccagcttgatgatgtcacctaccatggcttccccagcctgcaggccctggctgggccagaggtggaggctcatctcaggaagctgggcctgggctatcgtgcccgttacgtgagtgccagtgcccgagccatcctggaaaaacagggcgggctagcctggctgcagcagctacgagagtcctcatatggaggaggccccacaaggccctctgcatccttgcctggaatggggcaccacagggggcctgactgccttctgccctgatggcccctaaacaaacccaaggttgtggcccccggggaagttccctatgtggggaacattgccccacacgggactaacgggtggggacccctcacacggtctccccggcggaaagggaccccaaaaccccccagaaccaaacagaggggaacctg

SEQ ID NO: 355264 - DNA, 1112 bp, Homo Sapiens
taggtagcgaggcctgggtggcgaattcggcacgagggagaagataagtcgcaaggagggggcgggacctacacctcaggaaagccggagaattggggcacgaagcggggctttgatgacccgcaaagggcgaggcatgcaggaggtggaggaattaagtgaaacagggaaggttgttaaacagcaccgtgtgggcgaggccttaagggtcgtggtccttgtctgggcggggtctttgggcgtcgacgaggcctggttctgggtaggcggggctactacggggcggtgcctgctgtggaaatgcctgcccgcgcgcttctgcccaggcgcatggggcatcgtactctagcctccactcctgccctgtgggcctccatcccgtgccctcgctctgagctgcgcctggacctggttctgccttctggacaatctttccggtggagggagcaaagtcctgcacactggagtggtgtactagcggatcaagtatggacactgactcagactgaggagcagctccactgcactgtgtaccgaggagacaagagccaggctagcaggcccacaccagacgagctggaggccgtgcgcaagtacttccagctagatgttaccctggctcaactgtatcaccactggggttccgtggactcccacttccaagaggtggctcagaaattccaaggtgtgcgactgctgcgacaagaccccatcgaatgccttttctcttttatctgttcctccaacaacaacatcgcccccatcactggcatggtggagcggctgtgccaaggcttttgggacctcgggctcatccaagcttgaatgatgtcaccctaccatggccttcccccaagccttgcaggcccctggcctggggccaaaaagggggaaaggctccatcttcagggaaaccctggggcccttggggcttatatccgggccccgtttaactggagagggcccaaggggccccaaagcccaccccttggaaagaaaaccaggggcggggccttaacccctggggcttgcaggccaaacttttaccaaaaagcccccttccttttgggaggggagggggccccaccagagagggcccctctcctggcaat

SEQ ID NO: 355265 - DNA, 1184 bp, Homo Sapiens
  misc_feature (207)..(217): n is a, c, g, or t
  misc_feature (232)..(270): n is a, c, g, or t
  misc_feature (803)..(862): n is a, c, g, or t
gtacaggatgggcgggccacaccggacacaaaataaggtaagaaggggggcgtggcgtgagcaagaccctctttttgcctctaccccagcgaagtaggagacgggtgtgtcgcgggtacagatactctcgaagaagggcggttgcggagtggaaaaggggctgacggaccgtgtcattatccacgtgcagggggaaggcttgtgggnnnnnnnnnnngggggcgcacgcggnnnnnnnnnnnnnnnnnnnnnnnnnnnnnnnnnnnnnnngttgttaaatcgggaagatacttcgtggactttcgaaaaattccaagtggcagggattgggtatgacgggaaaggccagaggttttttctggaaagtagtggccgccacaataattattttgtaaggataaaacttatggcaaccaagtttttctatcagaggggttgataacttcagaggcagtcagagctatcgtaaaggttaaaaatatcgagggtccaccctgtgaggatttcgcctgatattcgggcatcaaacgctgcttccctggctctgcaggcttccacgaatcgcctgcggcgttcttcaagctcttgtattctgccgggagcaatcgggtaattttccagatagtggcggagaaactgctggtaattgatgcctaaaacgctaagtgggtggcggagacggagatagggcaacgcagccaggcctccgttcccgtgtctggacctgggcctgccctcgggaccctcttcgtccactggctcccccagcaagcgggcgacctccgccatccgggcttccctgnnnnnnnnnnnnnnnnnnnnnnnnnnnnnnnnnnnnnnnnnnnnnnnnnnnnnnnnnnnngccaccggggctcccatggatacagccgccggggctgccctggccgccgccatcccaccttccctggccgccggcaccgggcctcccctggccgccgccatcgcgccttccccggcctcctcaggctgtgccggggccggctcccgcctcccgcggcctacctccgcctgcgggacgtctctgtcaccattcgccgcgcctgtctgcgggacactgctgtctgcgggcagcttggacatctcagaccgtggggtcaactcggctgctcccagagaaactggaataactggacagagcgatgcccggcggacaccccagtgcc

SEQ ID NO: 355266 - DNA, 847 bp, Homo Sapiens
cccacgcgtccggcagaacatctccctgaagcatccaatcagagtctcctcactgttgcccatgcagacacaggcatccaaaccaacggtgacctggaagacctggaggagcatgggccagggcagacagtttctgagaagcccagaagttcacatgatggagggggaccctattattctggccgaacttctgatcagggatgtacttcaggagctgtccagttacaacggcgaggaggaggacccagaggaggtgaagacatccttgggagttccacaacgtggtgacctggaagacctggaggagcatgtgccagggcagacagtctctgaggaagccacaggggttcacatgatgcaggtggacccagccacgccggcaaagagtgacctggaagacctggaggagcatgtgccagggcagacagtctctgaggaagccacaggggttcacatgatgcaggtggacccagccacaccggcaaagaaattggaagactccaccattacaggcagccaccagcagatgtcagcaagtccttcctctgcacctgcagaagaagcaacagaaaagaccaaagtggaagaggaagtgaaaaccagaaagcccaagaagaaaaccaggaagcccagcaagaaaagccggtggaatgtcctgaaatgttgggacatttttaatatattttagagacctctgaagatccctcgaccaccaggaagggccccgacgtggggatgtcaacatggctcagaatgcatgaaatgttgggacatttttaatatattttagagacctctgaagattcctcgaccaccaggaagggccccgacgtggggatgtcaacat

SEQ ID NO: 355267 - DNA, 585 bp, Homo Sapiens
cccacgcgtccgagcagagtattggtgctgctggaagccagaaggaaggtccagagggagccaacctgttcatctaccacctgccccaggagtttggtgatcaggacctgctgcagatgtttatgccctttgggaatgtcgtgtctgccaaggttttcatagacaagcagacaaacctgagcaagtgttttggttttgtaagttacgacaatcctgtttcggcccaagctgccatccagtccatgaacggctttcagattggcatgaagcggcttaaagtgcagctcaaacgttcgaagaatgacagcaagccctactgagcgtgctcccctctgagactggagtgagagggtcttctggtagctggtggtgttggattatcccattgaagctgggacaagctgttcctttctcatagtgataacttgggtctgttgtcctctaaggaacgtgaaacatacacttcttaagctgaaccacgtaaacttgaaattctgcgcactgggagaaatgtgtcctgtgtttcaaaggataaaactgttctaaaggcttccagggtcatgatgggattttttaaataaatgc

SEQ ID NO: 355268 - DNA, 1656 bp, Homo Sapiens
  misc_feature (329)..(329): n is a, c, g, or t
ccgttgtgtcgcactctggtggctggtcatgttgtgcttctttcttttgtttctgcttttgctctctgtcgtgtcggcgcgttgctttgctggtgtgtctcccggtctcctgatcggctgcttattcgttgtgttgtttgctggcgttgcgtttgatgtcctgtgcggcccattttaaagttttaacgaattcgccccgtgcaagggaccccctggaagccctttagaacagttttatcctgttgaacaccaggacacagtttgctccccgtgcgcagaatttcaagtttacgtggttcagcttaagaagtgaatgtttcacgttcctntagaggacaacagacccaagtttatcactatgagaaaggaacagctgtcccagcttcaatgggataatccaacaccaccaggctaacctgtacaaccagtaagatggtcaatccctgtctgttacccacagggacagcatgacaaggagagagcccccatctgacttaatagcaaaccaacccctttattcttatctctgctgctaggggtcaagactggtatttgttgaggtttcagattccagagacccagggatcccatccctggctgtggctacagtcacatcttaacagggccacctctgcccaggtgtacattcccaacagcatgtccttcctggttctctacccccacagcacttcttagagcagaggcagagcccagaagctgtgtgggtcacaggcaagagctgaagtaagacctgcaagaggcggcagggagctaactgtagcacgaggacaaaaatgaacacggtaatactgaggtaaatgaacactcaattcatgtggaggctgtaaacgtcctgatgtcacctctgcctcaagagcagaaaatgtgactggagtggttacaggaggggcctgccagacccctgtgggaatactacatctgggacacctcaatcaaggaggcaagggagaatttctggccactggcaaatgaagcatactggcttgcagggaccttctgattcaagtacaccaagaaataagctcctcctcccccaactagatggtattgatcactctgcccacaaatggtacccccttcagcaagaactgcaagcccttcttggatttgccttcatgagaaaatggtggcttgggatggaggtgacattccttgctgtggtgaactgcaaagaaggaaaccaggcaatgtattccatagaggcctttaaagagacccgttggaaatgggccatgatctaatttggtgttgaaataaactaacctctttggctgtttctcccaaactgccaccagccaggcaaggccaatccaatactgactgctggctgggggagctcgtaatgggtgatgccgccctgctttttgcatatgtcaggctaacaggtgcttttatttccagagaattgttaatgcccctttttgaaaagagcaacagaaattccggacaagaatctgaaaaaaggttttaaaaactatttccaagaagtagctgtcaggagtttggagtcttcagctgccagggcattagggggcttagtactccactcttcccaaagccgttctgttcccaaaggttcaagggttaagtttttatcttcccacccacaattaggaaaggtcttgggggtcattt

SEQ ID NO: 355269 - DNA, 454 bp, Homo Sapiens
aaattcactacacaaactctgtgattaggtaagaaaagcgatactggcttgcagggaccttctgattcaagtacaccaagaaataagctcctcctcccccaactagatggtattgatcactctgcccacaaatggtacccccttcagcaagaactgcaagcccttcttggatttgccttcatgagaaaatggtggcttgggatggaggtgacattccttgctgtggtgaactgcaaagaaggaaaccaggcaatgtattccatagaggcctttaaagagacccgttggaaatgggccatggtctaatttggtgttgaaataaactaacctctttggctgtttctcccaaactgccaccagccaggcaaggccaatccaatactgactgctggctgggggagctcgtaatgggtgatgccgcctgcttttttgcatatgtcaggttacaggtgct

SEQ ID NO: 355270 - DNA, 493 bp, Homo Sapiens
  misc_feature (31)..(31): n is a, c, g, or t
  misc_feature (43)..(43): n is a, c, g, or t
aaaaccccggaaggacaagcctgtggggaangtacccccgggnaaaggtggcccctgttaaaatgtgaactgtaacccacaccccaggaagggaaccccgggtcccctggaatctgaaacctcaacaaatacccagtcttgaccccctagcagcagagataagaataaaggggttggtttgcctattaagtcagatgggggctctctccttgtcatgctgtcccctgtgggtaacagacagggattgaccatcttactgttgtacaggtagctggtggtgttggattatcccattgaagctgggacagctgttcctttctcatagtgataacttgggtctgttgtcctctaaggaacgtgaaacatacacttcttaagctgaaccacgtaaacttgaaattctgcgcactgggagaaatgtgtcctgtgtttcaaaggataaaactgttctaaaggcttccagggtcatgatgggattttttaaataaatgca

SEQ ID NO: 355271 - DNA, 2165 bp, Homo Sapiens
  misc_feature (1733)..(1843): n is a, c, g, or t
  misc_feature (1909)..(1965): n is a, c, g, or t
  misc_feature (2130)..(2130): n is a, c, g, or t
  misc_feature (2158)..(2158): n is a, c, g, or t
gcgaggctggattcctagggccgcggcgcttcccggcatgctccgctgcaggcccgcgcccgcgcccggactttgccatcggcggggcagtcgcgggatgcgcccgggagccacagcctgaggccctcaggtctctgcaggtgtcgtggaggaacctagcacctgccatcctcttccccaatttgccacttccagcagctttagcccatgaggaggatgtgaccgggactgagtcaggagccctctggaagcatggagactgtggtgattgttgccataggtgtgctggccaccatctttctggcttcgtttgcagccttggtgctggtttgcaggcagcgctactgccggccgcgagacctgctgcagcgctatgattctaagcccattgtggacctcattggtgccatggagacccagtctgagccctctgagttagaactggacgatgtcgttatcaccaacccccacattgaggccattctggagaatgaagactggatcgaagatgcctcgggtctcatgtcccactgcattgccatcttgaagatttgtcacactctgacagagaagcttgttgccatgacaatgggctctggggccaagatgaagacttcagccagtgtcagcgacatcattgtggtggccaagcggatcagccccagggtggatgatgttgtgaagtcgatgtaccctccgttggaccccaaactcctggacgcacggacgactgccctgctcctgtctgtcagtcacctggtgctggtgacaaggaatgcctgccatctgacgggaggcctggactggattgaccagtctctgtcggctgctgaggagcatttggaagtccttcgagaagcagccctagcttctgagccagataaaggcctcccaggccctgaaggcttcctgcaggagcagtctgcaatttagtgcctacaggccagcagctagccatgaaggcccctgccgccatccctggatggctcagcttagccttctactttttcctatagagttagttgttctccatggctggagagttcagctgtgtgtgcatagtaaagcaggagatccccgtcagtttatgcctcttttgcagttgcaaactgtggctggtgagtggcagtctaatactacagttaggggagatgccattcactctctgcaagaggagtattgaaaactggtggactgtcagctttatttagctcacctagtgttttcaagaaaattgagccaccgtctaagaaatcaagaggtttcacattaaaattagaatttctggcctctctcgatcggtcagaatgtgtggcaattctgatctgcattttcagaagaggacaatcaattgaaactaagtaggggtttcttcttttggcaagacttgtactctctcacctggcctgtttcatttatttgtattatctgcctggtccctgaggcgtctgggtctctcctctcccttgcaggtttgggtttgaagctgaggaactacaaagttgatgatttcttttttatctttatgcctgcaattttacctagctaccactaggtggatagtaaatttatacttatgtttccctcaagtgtgtagttattgagtcaaattcatatgcatggtgtattgtgggacatacttagatggaaggagagagcctaagaatcctgaggaatgatttctgtgtatgcctcaaaatgagatatttaggctgggcgcggtggctcacacnnnnnnnnnnnnnnnnnnnnnnnnnnnnnnnnnnnnnnnnnnnnnnnnnnnnnnnnnnnnnnnnnnnnnnnnnnnnnnnnnnnnnnnnnnnnnnnnnnnnnnnnnnnnnnnttagctgggcatggtgacacgtgcggctgcttggtaggctgaggtgggaggatcgcttgagcccannnnnnnnnnnnnnnnnnnnnnnnnnnnnnnnnnnnnnnnnnnnnnnnnnnnnnnnngagtgagaccatgtctccaaaacatacatatatataaaatatatttaaagacctcttggagttcaggcagaagtgaagatagcactatgaagtagtttccacattgacaatggcaatgacttgaacgatgtgttccccctttcttctgatattaatatctgttcnttttgcatacattgaaagattatgaaantatgacc

SEQ ID NO: 355272 - DNA, 1265 bp, Homo Sapiens
  misc_feature (129)..(207): n is a, c, g, or t
cccgggatcggggcgcaggcagggaccctccgctcccctctccgtctgccgcccggacgggccaccgcgggggcgcgaggaaggggtgttgggtcgccagggcccgcctcccagctgccccggccgccnnnnnnnnnnnnnnnnnnnnnnnnnnnnnnnnnnnnnnnnnnnnnnnnnnnnnnnnnnnnnnnnnnnnnnnnnnnnnnngcgaggctggattcctagggccgcggcgcttcccggcatgctccgctgcaggcccgcgcccgcgcccggactttgccatcggcggggcagtcgcgggatgcgcccgggagccacagcctgagctttagcccatgaggaggatgtgaccgggactgagtcaggagccctctggaagcatggagactgtggtgattgttgccataggtgtgctggccaccatctttctggcttcgtttgcagccttggtgctggtttgcaggcagcgctactgccggccgcgagacctgctgcagcgctatgattctaagcccattgtggacctcattggtgccatggagacccagtctgagccctctgagttagaactggacgatgtcgttatcaccaacccccacattgaggccattctggagaatgaagactggatcgaagatgcctcgggtctcatgtcccactgcattgccatcttgaagatttgtcacactctgacagagaagcttgttgccatgacaatgggctctggggccaagatgaagacttcagccagtgtcagcgacatcattgtggtggccaagcggatcagccccagggtggatgatgttgtgaagtcgatgtaccctccgttggacccaaactcctggacgcacggacgactgccctgctcctgtctgtcagtcacctggtgctggtgacaaggaatgcctgccatctgacgggaggcctggactggattgaccagtctctgtcggctgctgaggagcatttggaagtccttcgagaagcagccctagcttctgagccagataaaggcctcccaggccctgaaggcttcctgcaggagcagtctgcaatttagtgcctacaggccagcagctagccatgaaggcccctgccgccatccctggatggctcagcttagccttctactttttccaggtgtgtgcatagtaaagcaggagatccccgtcagtttatgcctcttttgcagttgcaaactgtggctggtgagtggcagtctaatactacagttaggggagatgccattcactctctgcaag

SEQ ID NO: 355273 - DNA, 1431 bp, Homo Sapiens
aaaaaaccaaccaaaccaagaggcatccaaccaagtccaagtcccgcgtcccggccacacgcccgcaccgagggagcacgccggcaggggcgccgaggagcggccccaggacaggacggccccaccgcgtcctggctggcagcacagtgggaacacgcccctccgtctcaggcagtgggggagttggaggggaaggggcctcccttgtgggacccgtggggggctctgttttccatccagtcttcctttcccagcccccaactcccaagacagacagtgtggagcccagcggcggcggagcaggcccgggcctgagcaggcaggcgctgctagcaagacttgatctttgtggccagctgtgccagggggccggcggggctgaggggtgcgggcagctttcatcccaggggctccactgggccccgtcaccctcctgtcgcgtcccctgcgtcccacctccctcctgcccggcagtcccgcccgtgcccccagcctggcgaggaagccgtccaacagtagccccagggccagctcccaacagaaagggctgacgtggctccaggactcaggggcgctccatgggaggacgaaggaagcccagccagccaggagccactcctcacacctccaagtgtggccaagtgggccctgaggccaaggacttacttgctcttcctggccatctctccctttctggaggaggcccggggcctgtgtacaccaaggctgacctcgtgctgcctgctgggacccagccctccctgccgctcccctgtgagcccagtccaccgtgggcgcccagggccagggacgggccagcgcccggctgcatcgcgaggttgggagtcacagtggctgtgggcctggacgggcacagccagagcaggggcccatgggaagggcaagggatggggaagcctgggccggccccttccctgctcccaaggcaggtgtccaggtggcgggagcagcaccaaggacagccaggcttacccggtgggaagagcaggagcagagcaggtggcagggaggaacccctggcgaggcagggagcactgaagtagggaagcagcaaaaaatacaggctcccaacgtggctccactgtctcatgaagtgtcaaaaatttaaaaatacacctcactttctattcagcatcagctattgaaatggaattctccttttctattcccgttgtacatagccccacgccctgcctccggctttgtcctctgtacagagccccctgtcccctctgctgttccggacccttttcttgcagcagctcaaccccccgactcactcagatccccaggactgcagccgagccccgggcttcctttcttaccattctgtatgcttccaaggtgtgaccattcaaactaacagtattattaagattattaataaagatttctttcttcaaaccagcg

SEQ ID NO: 355274 - DNA, 1183 bp, Homo Sapiens
  misc_feature (708)..(748): n is a, c, g, or t
atcgcggctggtaccggtccggaattttcaaaataggggcgggagcggcggcagtttcaccgacaggcgccgccgggacgggcacgggcgcgcgggctccggcgggcgccggctgccttcctccgtcgctcgctgtctctcccggccgcattctcctccgctgcggggccgagctctccccagcgctcgcaggaaggaagaagggagccgaggacgccgagaagttcccgcggcagccgcggatcccggccaaggcggaggctgcggctccgacggggcaggagcgcgatccacggcgaggggcgtacggccaaagggtccgcggcgtggagcgctcggaccttccgctctcccccgggcgtgggccgggaccccatgagacgcgcccacgaggggcgcgagattcctagcttgggcggcgctaggcggagggaggtgttgcagccgccggagccagagagctgccggcaggaggcggcggcggcaagaacttgaacttgccgtcgggagcgggcgccccagacgccccccgccggggccgaggcccccaaggacctgcgccgcaggactgcccccccaatgggggattccacccaccatcttccgccctctcccctcaaccctgtcccctccccgttttcacctcgggaccgtccgtcaccccacaacctccgcgatagtcgaccttcaccactcctatacttctgnnnnnnnnnnnnnnnnnnnnnnnnnnnnnnnnnnnnnnnnnaccgtgatccctcaccccttcccctcattctgaaccacaccctctcacggccctctcctcaacaccccaccgttcaccctctccgcgctactccgcctccccacacgtctccgacccgtgcactctcctgccccctgccgcactcagcgcacccctccgtccgcccccccgctgggataaccccgccccgctcccgcggatctttacccctcgccccgtccttcatgactctctcccgctaatcacgtccgtcgcgctatgcccgtccgacaatgcaaccacactcatagcgcgcccgtccctcctgccttgttcccgccgccctcccccgttcccactcaacgtcccccctccggcttcgcgggcccgtcctacccgctcctaaatatttctccctccatgacaacatcctacacgcctccgccacttcgctcc

SEQ ID NO: 355275 - DNA, 1810 bp, Homo Sapiens
  misc_feature (819)..(884): n is a, c, g, or t
  misc_feature (1806)..(1806): n is a, c, g, or t
acgcgccgccccccccggcgaacgcgcatcccacaaccccggcggacgcggaccggaattttcgggatcgcggggctcgggacgtcaaagccctgcgtccttcggcccccagagcggagaagcgcgcaaggcaccggtggcagcggcgacggcagctgcgacagcaacccctgctgggccgaaactgggcagagcggagcagacgtctgaagcagcgcgagtgaggcgcgagggtagcgcccgcgcccgggaagacccctcggcgcgaaccggcagcccagccccgggtcccggttcccaaggccccgcctctagggcctggggactaatcggattgagagcgcgccggcccgggccgcgaactcgccaattgcggagggcggtggccaccgcccaatccggagcagacaggtgcgaggtccggaaggcggaggccaatcggcggcggttgcgacctgctggggcaggtctcggccaataaggaggctcgagtgacatcttcgcgcaccaatcgggagtgagggagcattcgtgcccgctcgcccttccggccagacctctatttaccaggggcgtgcagcccgcttgccaatcagagcgcggctgagcggccccgcagccaacccccgaggagcggccggctggcgtccgccgcgcccaggagttggggatgtcctacaaacccatcgcccctgctcccagcagcacccctggctccagcacccctgggccgggcaccccggtccctacaggtgaggatccagctccacccctgctcgcctgccgggcggtcgaggtctcgaagaaaagacggcctgnnnnnnnnnnnnnnnnnnnnnnnnnnnnnnnnnnnnnnnnnnnnnnnnnnnnnnnnnnnnnnnnnncgtggtcacgtaagggcttgtaggtggagcgcagtgggagggatttgtccctgaagttgatcagcatggaatgaagcatcctttggagggaatcgggcgaacccggtcctgggcttggaaaagctgggaggcggcgtccctgccccgcgctgacctcttactcgcgcctgttgctgcaggaagcgtcccgtcgccgtcgggctcagtgccaggagccggcgctcctttcagaccgctgtttaacgactttggaccgccttccatgggctacgtgcaggcgatgaagccacccggcgcccagggctcccagagcacctacacggacctgctgtcagtcatagaggagatgggcaaagagatccggcctacctatgctggcagcaagagcgccatggagcgcctgaagagaggtatcatccatgcccgggccctagtcagagagtgcctggcagagacagagcggaacgcccgcacgtaacaggaagcgcctcggcctcagcgtctggacctatccggccactgcagagcacccgcttctccctggccttcatcccgagttgcactaaccatcctgggcttcctgtcctgtgtcccttggtgggtcccctccaggaaccaaggagtggccctccaggtggcagcactaaggacacccccccacaacaagagttagcagcgaggtccccatgagtcccacccatgacctgccgacagtgttgcccaccggaacttttgtggcccctaccgctcagcccttcccagcacttctcccactttgtcccgagcctccttctcccccagcaggggcacaggcctggcacctccctgccttgtgtcctgagccatagtgactcttttatctgtgtgtcttttgctaaatatgccctttttatattaataaaagatgatttggagttgtgcnctca

SEQ ID NO: 355276 - DNA, 1422 bp, Homo Sapiens
gtcaaagccctgcgtccttcggcccccagagcggagaagcgcgcaaggcaccggtggcagcggcgacggcagctgcgacagcaacccctgctgggccgaaactgggcagagcggagcagacgtctgaagcagcgcgagtgaggcgcgagggtagcgcccgcgcccgggaagacccctcggcgcgaaccggcagcccagccccgggtcccggttcccaaggccccgcctctagggcctggggactaatcggattgagagcgcgccggcccgggccgcgaactcgccaattgcggagggcggtggccaccgcccaatccggagcagacaggtgcgaggtccggaaggcggaggccaatcggcggcggttgcgacctgctggggcaggtctcggccaataaggaggctcgagtgacatcttcgcgcaccaatcgggagtgagggagcattcgtgcccgctcgcccttccggccagacctctatttaccaggggcgtgcagcccgcttgccaatcagagcgcggctgagcggccccgcagccaacccccgaggagcggccggctggcgtccgccgcgcccaggagttggggatgtcctacaaacccatcgcccctgctcccagcagcacccctggctccagcacccctgggccgggcaccccggtccctacaggaagcgtcccgtcgccgtcgggctcagtgccaggagccggcgctcctttcagaccgctgtttaacgactttggaccgccttccatgggctacgtgcaggcgatgaagccacccggcgcccagggctcccagagcacctacacggacctgctgtcagtcatagaggagatgggcaaagagatccggcctacctatgctggcagcaagagcgccatggagcgcctgaagagaggtatcatccatgcccgggccctagtcagagagtgcctggcagagacagagcggaacgcccgcacgtaacaggaagcgcctcggcctcagcgtctggacctatccggccactgcagagcacccgcttctccctggccttcatcccgagttgcactaaccatcctgggcttcctgtcctgtgtcccttggtgggtcccctccaggaaccaaggagtggccctccaggtggcagcactaaggacacccccccacaacaagagttagcagcgaggtccccatgagtcccacccatgacctgccgacagtgttgcccaccggaacttttgtggcccctaccgctcagcccttcccagcacttctcccactttgtcccgagcctccttctcccccagcaggggcacaggcctggcacctccctgccttgtgtcctgagccatagtgactcttttatctgtgtgtcttttgctaaatatgccctttttatattaataaaagatgatttggagttgtgctctcaaaaaaa

SEQ ID NO: 355277 - DNA, 1084 bp, Homo Sapiens
cactgagaatctcttcataatctaggcaccgcgcgcttcgcctgggatctcggactccctggaccctccctccagcccagcctcgctagctccgcctgcggtacgtgctcccgcctccgactcaaaatgcctgtctggggaggtggaaacaagtgtggggcctgtgggaggaccgtgtaccacgcagaagaggtgcagtgtgatggcaggagcttccaccgctgctgctttctctgcatggtttgcaggaaaaatttagatagcacaacagtggcaattcacgatgaagagatctactgcaaatcctgctacggaaagaagtatgggccaaaaggctacggttatggccagggcgctggcacgcttaacatggaccgtggcgagaggctgggcatcaaaccagagagtgttcagcctcacaggcctacaacaaatccaaacacttctaaatttgctcagaaatatggaggtgctgagaagtgttccagatgtggggattctgtatatgctgccgagaagataattggagctggaaagccctggcacaaaaactgtttccgatgtgcaaagtgtgggaagagtcttgaatcaacaactctgactgaaaaagaaggtgaaatctattgtaaaggatgctatgcaaagaactttgggcccaagggatttggctatggccaaggagcaggggctcttgttcatgcccagtaagatgtaaaccctgaactaaacatcacacactgagaatctcttcataatctaggcacagataatctttaacactaaactactgtgaaattctaccagcattaagtactgtatatcgccctgtacttggataggctggctaactcgtaggaagagagcactgtatggtatccttttgctttattcaccagcattttgggggaacatttcttttacattttaaataaaacttcagccttgagaagacgtccccccctatattattgtcttcaaagggcgggcccgcctctcaaaagaattccctcccagggggcgccaccgctttaacgccgtcccacccagtttttcccttgtaccccaaactcgtgttccccccttc

SEQ ID NO: 355278 - DNA, 978 bp, Homo Sapiens
  misc_feature (609)..(609): n is a, c, g, or t
  misc_feature (911)..(911): n is a, c, g, or t
caggaagcggggcagcagcacagcgtggggtcctggcactgcaggccaggccaggatgcccaccccgccctctacacggccccttggggcctgcgcccgtgaaactggtgccagggagcactgccagcttgccagtttctgcccagcaaaagcacgtatgcttcaggggccttctgagaccaccttccccactgagccccagctgactgagaaggccttgagggaagtagaggtctgggagcaaatgccccatcgcggtgacgaggatgaggggagcctacgcctcaggcatgtgcgctgagaggatgagggggagggagccaacgcctcaggtggagtgggtcagaggtgcaagagagggatgtactgaagcttcttcccgtcctgacacagacactactcctgccttccccaccctgaaccgggcaaaacccaccaaagtggcttgtgtgccagcctccctgtggcctcacccaagggcctgaaccccaagagtggttcccaaacaaacccggatctccatgccccactcccccatccctggctttccccaaaaaattggccttggggtggcactcttcggcaaacaaagaaatccccgctttggcnatcccttggcccctttgggaaaaaccccctctccctacatttcttcccaaagaccctggggcctaaacctggcactgcacccagggcgtagacactgtgcccctccagaccccaaggtttaagaaaacacaactcacaaaattttttgtcccatcacccccaagtatacacacccatagggggaaacacatctttaactcgggaaatatttcccccttctcccgttccaactttttattcccccccaaacgtctgggtgcgttttcaaacctaaaatcaaatagagaaaaatagttttcggnttttcaaaacccccacacataaaacatagatccatgcgtcaacaaagggaattcgcgccttggtaca

SEQ ID NO: 355279 - DNA, 2779 bp, Homo Sapiens
  misc_feature (2126)..(2171): n is a, c, g, or t
  misc_feature (2466)..(2498): n is a, c, g, or t
gagggacccaggctgactgggagtccccagagcgccgtcaatccaggtcacccagtgagggcaggtcacagacgcccaacagacagggcacaggttccctaagtgagagctccatcccctctgtctctgacaccagcaccccaagaagaagtcgtcggcagctcccacccgtcccgccaaagccccggcccctcctttcctacagctccctgattcgacacgcgggcagcatctctccacctgctgatggaagcgaggagggctccccgctgacctcccaagctctggagagcaacaatgcttgcctgaccgagtcttccaactctccgcacccccagcagagccaacatgcctccccacagcgctacatctccgagccctacttggccctgcacgaagactcccacgcctcagactgtggtgaggaggagacgctcactttcgaagcagccgtggctactagcctgggccgttccaacaccatcggctcagccccacccctgcggcatagctggcagatgcccaacgggcactatcggcggcggaggcgcggggggcctgggccaggcatgatgtgtggggctgtcaacaacctgctaagtgacacggaagaagatgacaaatgctagaggctgctcccccctccgatgcatgctcttctctcacatggagaaaaccaagacagaattgggaagccagtgcggcccggggggggaggaaagagggaaaaaggaaagatggaaggacaccatgcattatcagagaagaggaagtaaaggacaatcagaacaccagtcaaacccaccaaattgctttattcccctttgcaagatgggcactgccatagttctgcctctttgctggggaaagaaaccaggaacgtggagggttattactgcgggagaagggacacgaggatggctttgcttccccttgccccttcccacttttctaaaagctgtggagggatctagctggcctatgtctacactcagtgccctgagaagcctggaagactttctggctcttaactggggagtagtggagaccataggagaggactctcctccctcaccagctcttacgcctcagccagcaccactgccaccagggcaactgcagcagcatctcatgcataaccctgtggcttgcttcccccagggcagcacaggcttaagttcagggaacatcggattgccaggggagggaggagaaagccgaagcaaaaggggtcagggtgctgaggcaacagcagcaagggctggtctggacaagaaaagccatagcccggcagcccctaccatgagggagacagagaaacagaactggtggtgctggggggtatagccccccatccttgaggcctgtcacccacacagtaggtgctgagagttaggacaggtcaggaagtcccccagggtccacaaaggtgcctgaggctctggtaagggtgaagataaaagtatttaacaaccgctatggcatcaatgtaagtggagtttggtcctagtgccggagcccatgctattccaggcattggctctttagatgccagtcatgggggaaccctgagggtgtgggtagagtagcaggggccacctaagagattaaaaacagagtctgttttccaaccagtgtggaagccgttaaatatacgtaacagtgctacggccacaccagcacctcctggctgaagtcagcccacactctggtccatgaggcagcaggccagtgctgtgccaagcccggtaaggccaagtgccgaggcccaaccttccctgccactcctctgagacggcagaacacacatatccaagtaggctacccaccactgggtagggatttctgtaaagatgggaaaggctgatagattgaaataagcttctgtgaaagtctggatttactgaggacctcccctgaggagggaccgttgggaccgcagattctgcagctggtgtggggttcaggtcagtttgtcaggatgctttaaggtgattagtaaatatacctcagcttagacttgggctgctccttctagcaaagcaggctccagtggggcctcatcatacaggatgacaagactggggccctgttcaccttgaacatgcccctgggccaagatgggnnnnnnnnnnnnnnnnnnnnnnnnnnnnnnnnnnnnnnnnnnnnnntgtcattcctaatagcccaaacgcagaagcactgagcaagagagccctttcttgccaagccagtgctcttttggtatatggcatacagctccattggaggggacacatcactggctttatctggtggaaatgtacctttcccttaagttcctccttagtgccatcacagcaggtgaatgggtgccctacggggccctccttcccccaccaggaacagatggaacctgccacccaggatcctgatctgccctgcactgagcactcagtggataaacactcctccagcccagacacnnnnnnnnnnnnnnnnnnnnnnnnnnnnnnnnngttatttttctttagaaggagcctcttttccctctattttttaattgaaatataatagctgcatcagcccctgaaaagccaaattccaccccctggttggagaatcctttgtcatgggcccgcccttctccttctgatactaatgggagcttcatggaccccacggtcagcccccaaaaccaaaggtggcccccaacaaaggaaggccaggtgaagggaaaaaacaaaactcttccccctttcagaacccccttttgggccttaattttccccttccccct

SEQ ID NO: 355280 - DNA, 1493 bp, Homo Sapiens
  misc_feature (153)..(153): n is a, c, g, or t
  misc_feature (181)..(181): n is a, c, g, or t
  misc_feature (216)..(216): n is a, c, g, or t
  misc_feature (231)..(282): n is a, c, g, or t
tggatttactgaggacctcccctgaggagggaccgttgggaccgcagattctgcagctggtgtggggttcaggtcagtttgtcaggatgctttaaggtgattagtaaatatacctcagcttagacttgggctgctccttctagcaaagcaggntccagtggggcctcatcatacaggatgncaagactggggccctgttcaccttgaacatgcccntgggccaagatgggnnnnnnnnnnnnnnnnnnnnnnnnnnnnnnnnnnnnnnnnnnnnnnnnnnnntcctaatagcccaaacgcagaagcactgagcaagagagccctttcttgccaagccagtgctcttttggtatatggcatacagctccattggaggggacacatcactggctttatctggtggaaatgtacctttcccttaagttcctccttagtgccatcacagcaggtgaatgggtgccctacgggccctccttcccccaccaggaacagatggaacctgccacccaggatcctgatctgccctgcactgagcactcagtggataaacactcctccagcccagacacactcctcctcttgggcaggagcaatccagagttgttatttttcttagaaggagcctcttttccctctattttttaaattgaaatataatagctgcatcagccctgaaaagccaaattcaaccacatggctggagaatcatttgtcatgggccccgccttctcttctgatactaatggagcttcatgacccacggtcagccccccaaaccaaagttgtcccaacagaggaggccagtgaggcagagacagagctctcccactctcagaccctcttttgtcttcattttcctctcccacttagcacatgtgtgcttgagggtggctgggaatgtgatatacagcaccctgatcctaacaggtgtgattgttacgtaagacgctgatactgggccttgtattgcttttaaagtttcctctgctcagcatcatttcatgccaaagtgctgctatgggctgctttgtgtgcacaaaattgctttttccacctcggaaatgcagctttccctagggggaggcctacaacaggacgaccattctgagccagtgagtctattgcatggtgttttgagaaagggaattttagtgaaaccttatgccatttcaagaggagaaatgcaggctggcagagcaatttccagaaatggaatttgcctgcaaatagtataaacaacactaaatttactgtgccaggaaatcttcctgaactccttgaactcatacacacaggtatttgagtcctgaataaagtgttggaaagcactgcagatgcggtcacctgactgaccacctgggttttctattaccagtgaatttcttttattcaccttcccttgaccaagaaattgggtttcttttccctcagcctgcacttactcttctattaagaccagaaaataaaataattttccgttgagtcacaaactc

SEQ ID NO: 355281 - DNA, 773 bp, Homo Sapiens
  misc_feature (709)..(709): n is a, c, g, or t
ctgggactctgggagcagcagtgaagtcttcagatactgccctacctccacctccagtgcctcccaaatctgaagccgtcagagaagaatgccggctcctgaacgccccacctgttccaccccgaagcgcaaagcctttgtccaccagtccctccatccctcctcgcacagtcaagccagcgcggcaacagactcgctctcccagccccaccttgtcctactattcttcagggctacacaacatcgtcactaaaactgacacaaatccttctgaaagcactcctgtttcctgctatccatgtaaccgagtgaaaactgattctgtggacctgaaatccccgtttggaagtccttctgctgaagctgtgtcctctcggctctcatggcctaaccattattcaggagcatcagaaagccagaccaggagtgacttcctgctggatccaagcaggagttatagttaccctagacaaaagacgccaggcacaccaaagagaaactgcccagcaccttttgattttgatggctgtgagctcctggccagccccactagcccagtcactgcagaattcagtagcagcgtctctggttgtcccaagtcagccagctactctctggagagcacagatgtgaaatctcttgcagctggtgtgacaaagcagagtacgtcatgccctgccttaccccccagggctccaaaactagtggnaagagaaggtcgcctccgaaacatctcctttgcctctgaaaaatgatggtgctgaggaagaccc

SEQ ID NO: 355282 - DNA, 1365 bp, Homo Sapiens
  misc_feature (1124)..(1132): n is a, c, g, or t
tcccgggatccggtcgccgcccccgggacgcctgggtccgagcccgctcccggcttggcgcggacctgcatcccggagccgctggcggctcgggcgcctgcaccccgctgaggagctccggagggcgccggggtggcggagccggaggcggccggcaaggtgagagcggcggctgcgcgctgggaggagcagcaggtgcaggggcggccggcggcgcgggcagggggcaccgggagccgcgcccgtacctgggacccgacgccgcccggtgcccgcgctggccggcagagggcagcggcagggcgccgcgggccacacatggctgcgtgaccgcgggatgctgtctgtccccttgctcagggcggcgtgccggcgatggagcgcgcggtagagccttggggcccagatctccaccgcccggaggagagggagccacagagaggcgcccgcacaggtctagggagtgagaacgtgatttctcagccgaatgagtttgaacataccccacaggaagatgacttggggttcaaggaagaagatttggctccagatcatgaagtaggaaatgtctctctcaaacctgaaggcatccagaactgggatgacttatgggtccagagagagggtctaggaaagcctcagcctcgggacagaggcccccggctcctgggtgaaccacgctggggccaggctagtagtgatcgggccgctgtgtgtggtgagtgtggcaaaagcttcaggcagatgtcagatctggtgaaacaccagcggacccacacaggggagaaaccctacaagtgtggggtctgtggcaagggctttggggatagctctgcccggatcaaacaccagcggactcatagtggggagaagccctatagagcccggccaccagcccagggtcccccaaagattcctcggtcccggatccctgctggtgagcgccccactatctgtgggtgatgtggcaagagcttccggcagagttctggactggtgaaacaccagcggacacacactggtggagaagcccctacaagtgggggcatatgtgggcaagggcttttggcgacaagttccgcccggcatcaagcaccagcggaaaacaccggggggggaacaannnnnnnnnaaccagaggggggcccccgacgggcagcccttcttcggggaagcccacggcaggctacccccggggaccccaagggcccaccgaaaaaaacccatatatcctgcgcactgaattgtccggccaaaaaggggttggggcttccaagctgggagccctctgtgtgatccaccccagcgggaatgcccttttggggggcgccgagccccctttgggggtttgcgctagagggcggc

SEQ ID NO: 355283 - DNA, 1004 bp, Homo Sapiens
  misc_feature (169)..(188): n is a, c, g, or t
  misc_feature (553)..(584): n is a, c, g, or t
gggctgcgttgtacgggaggcgcctagcccgccaacaggggccggaaggcgcggaaataaatttgcgggtgcagtaggccgaccgcttagggggggaccaagggggaggtatttttcggggaggggcctgaacctgaaggcttgggtgttgcctgccagctcgggaaannnnnnnnnnnnnnnnnnnnccacaaggactccagaaaggggcccagaaccgggagacccagaggaggaggagtaaggcccagaaaagacaagcgcagagggggccaatccacaccctggaggggagctgggcgtggtcatcctcccctccctcccaggggggcttctgaagaccctctggacaggccccccaaccctcccttgagggaggagggggctgggggggagagctacttcctgtggtgtgttaccaaattgttcccaagttgctcaaatggaggaggagttcccattccaacagcaaaagacccaaacaatgaatgccccacccctaaataaagagtaaagacattacagctaaaatccagagaaaagtggccacgtnnnnnnnnnnnnnnnnnnnnnnnnnnnnnnnncacagaaagctccaaaacacttttgaaaaggacgacacccaacaccctcccaaggaactgaaagtcggcgagcaggacgcctacctaagcgcaggtggtggcttagcgcggcagcggcggctgcctggtcctcctcgctcggctccggggtcccctttctgctccaccctccggcccggccccagcagggcagtctgcatgaggggcaggggcaggaactgatggggcggagcgagggcacctgcatgcagggctgggggcgggggcgacctggggcccgactcccctccctcgtggcaggaaggaggccctcctggcctgcagagagaggggaaagggggcctgtcccaggctgggacgaggccgtcgagagcattccgactttttcctacgcctcgtgccgaattcgccacccaggcc

SEQ ID NO: 355284 - DNA, 624 bp, Homo Sapiens
aaaggcgcggcggggaggggagccggggccccagccctgccgggaaacgggttcccagtcccggccgagagcgcgggcgccgaggggaccgacccggactccccgcaaccccccaaccgccaggccatggcgcccacggggctcctggtggccggcgcctccttcctcgcgttccgggggctgcactgggggttgcggcggctgcccacgccggaatcggccgctcgggaccgctggcagtggtggaacctctgcgtctccctggcgcacagcctgctctcggggaccggggcgctgctcggcctgtcactgtaccctcagatggccgccgaccccatccatggccacccgcgctgggctctggtgctggtggctgtgtctgtgggttacttcctggcagacggagctgacctgctgtggaaccagaccttgggcaagacctgggatcttctctgtcatcatttggtggtggtgagctgcctcagcaccgctgttctgtctggccactacgtgggcttctccatggtgtctctgctcctggaactgaactccgcctgcttgcacctgcagaagctgctgttgctttctcgccaggcccatccctggcttcagcgtgaccagctg

SEQ ID NO: 355285 - DNA, 1291 bp, Homo Sapiens
  misc_feature (160)..(160): n is a, c, g, or t
  misc_feature (226)..(226): n is a, c, g, or t
  misc_feature (233)..(233): n is a, c, g, or t
  misc_feature (481)..(550): n is a, c, g, or t
  misc_feature (1210)..(1210): n is a, c, g, or t
ccctgtctacacccaagaaaaaaggtgggtcccggggagccccactccctttaccaaaacaggagaatgccgcttagagggccctttttttccttgcaaggcccatggggtttcccgtttccccagggaataggtttccccccagccccggtcccggganttggggcctgggggttccctgagccacacccctttttccaggagggtgctgaccccgaaagggagngcaaggnccaggggcaaggggttcagccccaggaatgaaatgaaactgctgaggggggctgcagagagaaagcctgccccacccgctagactccctctggtgttccctgtaatgttccttcccagctcccccagcttcttcttgataagggagacttggtttcctcagggaagaggggggaagagtgggcctggaggaggcctgggcatgacagtcaggggaccccattctcaccagctccagttgcctgtcagnnnnnnnnnnnnnnnnnnnnnnnnnnnnnnnnnnnnnnnnnnnnnnnnnnnnnnnnnnnnnnnnnnnnnncctcccagcaacctcaggaagagggcattgccacctacgttttataggcaaggaagctgagctctagcaagatgaagggacttgctcaagctggctcacatgagttactagcagggccaggacttgaatccagactcgggggtccctgtcccatgctctgtgcctgtgctgtgtctcctccctctgccctgcctagagaagcaggagtcccagctgggctctagggacaaaatggcttgtgtcaggtcaggtccctcaggtgcacttggcaggctgacccgtctgtaacccaccatctgctggcctctggaagcagagtcagggtacagcttccagggacacatggggcaggaagccgaggctatgctttctgaggtgtcgctggcagcagcagccctgtccttcccaagttctgcttcaaagctgctcaggtttggttgggaaggggaagaggaagagtgacagccagaaggatggagccatgagcagaacagactggagcagcacggatgtagcagggttccagctgttcacctcagctctgctgtggacaaagaggctgggttggcttaaagctaacatcctcagttcacttccttagagtaaccagtcagttcaaagtggggaaaaaacagggcactcgacagatggatctcaggncagggaggaagagtcagacccacctgtgcttgtctcaccgtgtgggtcagtttcttcatctgcaacatggcttatgttgga

SEQ ID NO: 355286 - DNA, 1032 bp, Homo Sapiens
taggctaggtagaggctggtgctgaatcggcacgagggagacaacagcgaggtggcagcgggcgctgatcattcgctcgccagccactcgcaattgcggttacagacctgcagctccccctcccccagccggcccgcccgcctttctgtctcctctctccctccgtactggacggccccggtccatttccgggctccggatatttggtatcgattggggccggggacgcggagcaggtggccgcggcggggcagctgggccgccagcttggtgcctcggggaccgtctcccgctgctttggtcaccagcccctgcccgcccgacccgctccgttctccggcctgcgagccctgcctggccggacttatgcgccgcgtccggcgctgactgctagacgcatcggggaccccgactcgagagccgtgcggtgaccgggaagcccgcgtaaaaggggcaaccgggaccctggaccggtatggctgaagtcagacatcgaacagtccaagctgactggagtcaaggaagtatgccgagatattagctgtcctggaggaccacaccctggatcacagcctgcaggaacaagagattgagcatcatttggcatcgaacgttcagcggaaccgttgggtccagcatgatctccaggtggctaagcagctccaagaggaagatctgaaaggcgcaggccagctccagaagcgctacaaagaccttgaacaacaagactgtgaaattgctcaggaaattcaggagaagctggctattgaggcagagagacgaaggcatcaggagaagaaaggatgaggacatagctcgctttgccagaaaaggagttacaggcagagaaaaagagaaagaaacactttccagaagttccctgaagaaccgtgcttattgcggatagttactattatgaagattggaggaatgaacgccaagaagtgacgaagggaaggctggaattactccattccgaatggccacagggatcagaatggatgatgctgaattgccgaaaactgcagagga

SEQ ID NO: 355287 - DNA, 1085 bp, Homo Sapiens
aacggctaggtagcgaggcctgggtggtgaattcggcacgagggggacgcggagcaggtggccgcggcggggcagctgggccgccagcttggtgcctcggggaccgtctcccgctgctttggtcaccagcccctgcccgcccgacccgctccgttctccggcctgcgagccctgccggccggactttgcgccgcgtccggcgctgctgctgcgctcggggccccgctcggcgccggcggtgaccgggaagcccgcgttaaaggggcaaccgggaccctggcccggtatggctgaagtcagcatcgaccagtccaagctgcctggagtcaaggaagtatgccgagattttgctgtcctggaggaccacaccctggctcacagcctgcaggaacaagagattgagcatcatttggcatcgaacgttcagcggaaccgtttggtccagcatgatctccaggtggctaagcagctccaagaggaagatctgaaagcgcaggcccagctccagaagcgctacaaagaccttgaacaacaagactgtgaaattgctcaggaaattcaggagaagctggctattgaggcagagagacgacgcattcaggagaagaaggatgaggacatagctcgccttttgcaagaaaaggagttacaggaagagaaaaagagaaagaaacactttccagagttccctgcaacccgtgcttatgcagatagttactattatgaagatggaggaatgaaaccaagaggaataaaagaagctgtatctactccagcaccaacaacccacagggaccaggaatggaatgatgcctgaaattgccagaaaactgccagaagaagaacttttggctacccagggggacatgagagcagctccagtagcttcagatgaacaaaatccctcgaacttctaatggcctgaagaaaagaaaagcttaccaaaaagcccaaggaagccggaagaaaatccctcttcttggaacaaaagaaaagccaagaaccccccgagtggggaaacccacacaaacacggcttaaagagccagcaaaattctccacaggtcaaaaaagaagagagggggc

SEQ ID NO: 355288 - DNA, 826 bp, Homo Sapiens
  misc_feature (575)..(575): n is a, c, g, or t
ggcggctcggggcgccgaggcttccgcgcccgctggttcctcgctccggggcggagctcgcgatagcgaccgggagcagggcgcggggcgggacccaggtccgaggcgaggaagccggaagccaggcgcggggagcctcccccttcgactgcagcctcgctccgtgccttctgcgcgcctgggatcccggagcctgcctaggttctgtgcgctcccgcccaggccggtgcccgccgcccgcctgcgccccaggcaggtaccaggcctccggctgctcccggccgaaggtggggacaggcagtgccaggcaccactagcgagggcgtttgggaacccagggtgaccacggcgcagccatggggaccgcgcttgtgtaccatgaggacatgacggccaccccggctgctctgggacgagtaagtgggacctggccgaggcggggcgccggcgagggtacctctgaactgagctcctcatctgccccagccccgagtgcgagatcgagcgtcctgagcgcctgaccgcagccctggatcgcctgcggcagcgcggcctggaacagaggtgtctgcggntgtcagcccgcgaggcctcggaagaggagctgggcctggtgcacagagtacctttcactgcgcgcggctggccgcaggggctggactgcagctggtggacgctgggctcactggagctgggcaaaatgggcttggcctggtgagggcctccgggccaccagggccagaaggcggctggcaacggggttctggcgggttcaaaaacgtggcccatacagctgcccatgccaaggcaaaacacggggttaccg

SEQ ID NO: 355289 - DNA, 1291 bp, Homo Sapiens
ggggggggcggaatgatcacccaagaccaaggggtttttggtaattggcaaaagaccccgactgtattgcccgcccagatggttcttcccggtggtgaaaagcggccctttccgagtccgtggcacaaagaacccggggccggcggggccaagccccttgcaagacagtctttgttgaaggtgggggaaaggcacttttggcgttggccttgcattttgcccctccagggtccccccaatggctgagtcaaatccctgccgaagaccagcaccagctccagggtcaaactcaaagggccagtgggagcagcaggtgcaggaaggcagccacgtagtcagcgtttcccatcccaaccctggttccagggcaggttgacagtgaagccgaggccctgtccccgccccactgcgtctgcatctgactctcgcaggaaaggccagaagcgcccatgctcatagcggtgccaggagaagtaaaggacgctggggtcatcctcaaagagatactggatcccctggccatggtgcacatcccagtccacgacgaggatcctgtgtagcccgtgtttctgcttggcatgtgcagctgctatggccacgttgttgaacacgcagaacccgttggcagccgccctctggccatggtgcccgggaggcctcaccagggcaagcccattttgcacagctccagtgagcacagcgtccaccagctgcagtccagcccctgcggccagccgcgcgcagtgaaaggtactcgggtggaagtagatggcgtcgaactgtccggacagcgcctgcagctcctccttgcctaggacctgggtctccctgaccagggatacatactctgggctgtgcaccaggcccagctcctcttccgaggcctcgcgggctgacaaccgcagacacctctgttccaggccgcgctgccgcaggcgatccagggctgcggtcaggcgctcaggacgctcgatctcgcactcggggcttcggccgggagcagccggaggcctgggacctgcctggggcgcaggcgggcggcgggcaccggcctgggcgggagcgcacagaacctaggcaggctccgggatcccaggcgcgcagaaggcaccgaacgaggctgcagtcgaagggggaggctccccgcgcctggcttccggcttcctcgcctcggacctgggtcccgccccgcgccctgctcccggtcgctatcgcgagctccgccccggagcgaggaaccagcgggcgcggaagcctcggcgccccgagccgccagccctcggagctgcgc

SEQ ID NO: 355290 - DNA, 1010 bp, Homo Sapiens
  misc_feature (860)..(860): n is a, c, g, or t
ggtccggaattcccgggatcgctccgtgccttctgcgcgcctgggatcccggagcctgcctaggttctgtgcgctcccgcccaggccggtgcccgccgcccgcctgcgccccaggcaggtcccaggcctccggctgctcccggccgaaggtggggacaggcagtggcaggcaccactagcgagggcgtgtgggaacccaggctgaccacggcgcagccatggggaccgcgcttgtgtaccatgaggacatgacggccacccggctgctctgggacgaaccccgagtgcgagatcgagcgtcctgagcgcctgaccgcagccctggatcgcctgcggcagcgcggcctggaacagaggtgtctgcggttgtcagcccgcgaggcctcggaagaggagctgggcctggtgcacagcccagagtatgtatccctggtcagggagacccaggtcctaggcaaggaggagctgcaggcgctgtccggacagttcgacgccatctacttccacccgagtacctttcactgcgcgcggctggccgcaggggctggactgcagctggtggacgctgtgctcactggagctgtgcaaaatgggcttgccctggtgaggcctcccgggcaccatggccagagggcggctgccaacgggttctgcgtgttcaacaacgtggccatagcagctgcacatgccaagcagaaacacgggctacacaggatcctcgtcgtggactgggatgtgcaccatgggccaggggatccagtatctctttgaggatgacccccgcgtcctttacttctcctggcaccgctatgagcatgggcgcttctggcctttcctgcgagagtcagatgcagacgcantggggcgggggacagggcctcggcttcactgtcaacctgccctggaaccagggttggggatgggaaacgctgactaccgggctgcctttccggcacctgctggctcccactgggccttttgaggggcaaatgcaggcccacggccgaagg

SEQ ID NO: 355291 - DNA, 1383 bp, Homo Sapiens
  misc_feature (1012)..(1023): n is a, c, g, or t
  misc_feature (1095)..(1129): n is a, c, g, or t
  misc_feature (1195)..(1245): n is a, c, g, or t
  misc_feature (1299)..(1343): n is a, c, g, or t
cagaggctggtaccgggtccggaattcccgggatctggcggctcggggcgccgaggcttccgcgcccgctggttcctcgctccggggcggagctcgcgatagcgaccgggagcagggcgcggggcgggacccaggtccgaggcgaggaagccggaagccaggcgcggggagcctcccccttcgactgcagcctcgctccgtgccttctgcgcgcctgggatcccggagcctgcctaggttctgtgcgctcccgcccaggccggtgcccgccgcccgcctgcgccccaggcaggtcccaggcctccggctgctcccggccgaagccccgagtgcgagatcgagcgtcctgagcgcctgaccgcagccctggatcgcctgcggcagcgcggcctggaacagaggtgtctgcggttgtcagcccgcgaggcctcggaagaggagctgggcctggtgcacagagtacctttcactgcgcgcggctggccgcaggggctggactgcagctggtggacgctgtgctcactggagctgtgcaaaatgggcttgccctggtgaggcctcccgggcaccatggccagagggcggctgccaacgggttctgcgtgttcaacaacgtggccatagcagctgcacatgccaagcagaaacacgggctacacaggatcctcgtcgtggactgggatgtgcaccatggccaggggatccagtatctctttgaggatgaccccagcgtcctttacttctcctggcaccgctatgagcatgggcgcttctggcctttcctgcgagagtcagatgcagacgcagtggggcgggggacagggcctcggcttcactgtcaacctgccctggaaccagggggcaaaggcagggccaccccagaatggcttcgcccaacctcacacagcctgcctgcagggggggcctaccaccctgggaagtccctggggggggagtccaggggtggccttggacgggaaaaagaaccgctgcctgggggggaacccggggnnnnnnnnnnnntggtccagggggccatatggggcgccccatggctccggaacggggcccctaaaaaaggcccatccccggaannnnnnnnnnnnnnnnnnnnnnnnnnnnnnnnnnngcgcctgtgggaaaagagaccccttcccagacaagccaaaagaatggtggaaacccgccttgtggnnnnnnnnnnnnnnnnnnnnnnnnnnnnnnnnnnnnnnnnnnnnnnnnnnnaaagagggggggaagggccccctccccacccaagttctggggttgcggccccannnnnnnnnnnnnnnnnnnnnnnnnnnnnnnnnnnnnnnnnnnnnagaaagcttgcgtgcaatgtccggtgcccaccccccccga

SEQ ID NO: 355292 - DNA, 872 bp, Homo Sapiens
  misc_feature (63)..(63): n is a, c, g, or t
gtcaggggaggcacgcgggcgtcgcgtccagatcttctgggctatgaggtgagtcagcgaagncgggctcccagggaactcctggatgaaatcgtgcccctcctccaaggtcctcatgagcgcagggtccaggggcacggagcctaagaaggcaccccggcgagctgggccagctcctctccgccgcccctggagaagacgctggtgcactccgtgcagtgtgggcaggtgaagccgctcatattctccacgattcccatcacccgcaagcccgtcttcctacagaaggtcagctcgcagcctcacgtcccccacggacaccgcctggggcgtggtgaccacgagggccccacaggggctggtagggacgcagggcttctatggtggccatgtgctcatcggaggtccccgggggcgtgtccaccaccaggtagtccagcatccccccaggccacgtcggacacaaactgctttatcagcgcgtttttcttggggcctctccacaccacggcctcgtccggcttcatccagcaggaagcccacagacatgagcgagatgctctgctcccggtccaggaagacgggtgcccagccgcggtcgcacatggtgcacagccctgccctgcgccccgagcatgtcgggggatactggggccacacaggtccacatccaggattcccaccttcttgcctgcatggcgcagtgccagggccagctccgtggagatggtgcttttccccaacagcccccctttcactgagaggaccaggatgatgtgcctgacgccggccaggtttccaggctcggccgccgcctccatcccgccgcctccaggagctcgcggctgcagtccgctaacgcgccgcgggcc

SEQ ID NO: 355293 - DNA, 1151 bp, Homo Sapiens
ttcgctctagctgggaggctgacggcccgcgggcgtaagcggactgcagccgcgagctcctggaggcggcgggatggaggcggcggccgagcctggaaacctggccggcgtcaggcacatcatcctggtcctctcaggaaaggggggcgttgggaaaagcaccatctccacggagctggccctggcactgcgccatgcaggcaagaagcgctgataaagcagtttgtgtccgacgtggcctggggggagctggactacctggtggtggacacgcccccggggacctccgatgagcacatggccaccatagaagccctgcgtccctaccagcccctgggggccctcgtggtcaccacgccccaagcgggcgtccgtggggggacgtgaggcgtcgagctgaccttctgtaggaagacgggcttgcgggtgatgggaatcgtggagaatatgagcggcttcacctgcccacactgcacggagtgcaccagcgtcttctccaggggcggcggagaggagctggcccagctcgccggggtgcccttcttaggctccgtgcccctggaccctgcgctcatgaggaccctggaggagggccacgacttcatccaggagttccccgggagccccgccttcgctgcactcacctccatagcccagaagattctggacgcgacgcccgcgtgcctcccctgactaaggccaccttgcagccgctttccagggccaccaagggctctgctccagcctctcagagaaacagaggcctgggctcggttcccgggcccctgcagggcaggcccaggcagcgtcagcgggaaagcttctccccgaacagcccagcccccagatgtgtcgacccagcagcttcgcctggttgggcctgcagggccggggtctgcctgctctgcaccttggaaaacgagcgcggcttgccgtctccttccctccgtgttgccatcctggggcccctggcagcccccggggccaacaagtaacgcggaagccaggacttttgcggaccctaaagggagcccgggaactcccagaagcccggggacccctgggatccccggattaacagtacagaacgacccccttaccgcgggaaaactagcccccacgcactgagcctgtgaaactgatgccagagc

SEQ ID NO: 355294 - DNA, 957 bp, Homo Sapiens
tataggctagtacgaggcctgtgtggttatctggcacgaggaatggccttcgctctagctgggaggctgacggcccgcgggcgtaagcggactgcagccgcgagctcctggaggcggcgggatggaggcggcggccgagcctggaaacctggccggcgtcaggcacatcatcctggtcctctcaggaaaggggggcgttgggaaaagcaccatctccacggagctggccctggcactgcgccatgcaggcaagaaggtgggaatcctggatgtggacctgtgtggccccagtataccccgcatgctcggggcgcagggcagggctgtgcaccagtgcgaccgcggctgggcacccgtcttcctggaccgggagcagagcatctcgctcatgtctgtgggcttcctgctggagaagccggacgaggccgtggtgtggagaggccccaagaaaaacgcgctgataaagcagtttgtgtccgacgtggcctggggggagctggactacctggtggtggacacgcccccggggacctccgatgagcacatggccaccatagaagccctgcgtccctaccagcccctgggggccctcgtggtcaccacgccccaggcggtgtccgtgggggacgtgaggcgcgagctgaccttctgtaggaagacgggcttgcgggtgatgggaatcgtggagaatatgagcggcttcacctgcccacactgcacggagtgcaccagcgtcttctccaggggcggcggaagaggagctggcccagctcgccggggtgcccttcttaggctccgtgcccctggaccctgcgctcatgaggaccctggaaggagggccccgacttcattccaggaattcccccgggagccccggccttcgctgcactcacctccatagccccaaaaaaatctgggacgcgcacccccgcctggcctccccctgactaagggcca

SEQ ID NO: 355295 - DNA, 1144 bp, Homo Sapiens
gagcgaggcctgggtggcgaattcggcacgagggctcctggaggcggcgggatggaggcggcggccgagcctggaaacctggccggcgtcaggcacatcatcctggtcctctcaggaaaggggggcgttgggaaaagcaccatctccacggagctggccctggcactgcgccatgcaggcaagaagcgctgataaagcagtttgtgtccgacgtggcctggggggagctggactacctggtggtggacacgcccccggggacctccgatgagcacatggccaccatagaagccctgcgtccctaccagcccctgggggccctcgtggtcaccacgccccaggcggtgtccgtgggggacgtgaggcgcgagctgaccttctgtaggaagacgggcttgcgggtgatgggaatcgtggagaatatgagcggcttcacctgcccacactgcacggagtgcaccagcgtcttctccaggggcggcggagaggagctggcccagctcgccggggtgcccttcttaggctccgtgcccctggaccctgcgctcatgaggaccctggaggagggccacgacttcatccaggagttccccgggagccccgccttcgctgcactcacctccatagcccagaagattctggacgcgacgcccgcgtgcctcccctgactaaggccaccttgcagccgctttccagggccaccaagggctctgctccagcctctcagagaaacagaggcctgggctcggttcccgggccctgcaggggcaggcccaggcagcgtcagcgggagagcttctccccgaccagcccagccccaggatgtgtcgcaccagcagctctgcctggttggcctgcagtgccgtggtctgcgtgctctgcagctgtgagacgggggcggcctgggctctcttcccatccatgttgcctacctgtgcccctggcagccgcgtgtccacacagttagcggagcgcaggacttctgcagtcctcaggtgaccccgggcctccagcaccctgggtcgctgtcatctgtgtttagctcggggagtgccccctaagggggcgaactgacctcaggcatgtcttgtaactgtagaggcgcctgccattaaacgtgtccgctgctgtggcgacaaaaaaa

SEQ ID NO: 355296 - DNA, 941 bp, Homo Sapiens
  misc_feature (519)..(519): n is a, c, g, or t
  misc_feature (560)..(560): n is a, c, g, or t
  misc_feature (708)..(708): n is a, c, g, or t
  misc_feature (797)..(797): n is a, c, g, or t
gctggggtggcgaattcggcacgagggcagccgcgagctcctggaggcggcgggatggaggcggcggccgagcctggaaacctggccggcgtcaggcacatcatcctggtcctctcaggaaaggggggcgttgggaaaagcaccatctccacggagctggccctggcactgcgccatgcaggcaagaaggtgggaatcctggatgtggacctgtgtggccccagtatcccccgcatgctcggggcgcagggcagggctgtgcaccagtgcgaccgcggctgggcacccgtcttcctggaccgggagcagagcatctcgctcatgtctgtgggcttcctgctggagaagccggacgaggccgtggtgtggagaggccccaagaaaaacgcgctgataaagcagtttgtgtccgacgtggcctggggggagctggactacctggtggtggacacgcccccggggacctccgatgagcacatggccaccatagaagccctgcgtccctaccagcccctgggnggccctcgtggtcaccacgccccaggcggtgtcccgtgggnggacgtgaggcgcgagctgaccttctgtaggaagaacgggcttgcgggtgatgggaatcgtggagaatatgagcggcttcacctgcccacactgcacggagtgcaccagcgtcttctccaggggcggcgggagaggagctggcccagnctcgccggggtgcccttcttaagctccgtgcccctggaccctgcgctcatgaggacccctggaggagggccacgactttcttccggagntccctggggaccccgccttcgcttgactcacctccataccccagaaaattcttggacgccaagcccgcgtgcctccccttgactaagggccacccttgcagccgcttttccagggccaccaagggctctggcttcaaccctttt

SEQ ID NO: 355297 - DNA, 922 bp, Homo Sapiens
  misc_feature (330)..(370): n is a, c, g, or t
  misc_feature (730)..(730): n is a, c, g, or t
gttccaggaggaggctggggcagcagtgctgggcacctcagaggagaggacagccagcacatctaccctgggtgagaaggaccctggccccgcagctccctcactggccaagcaggaggccgagtggactgcaggagaggcctgtccggcctccagctccacccagggagcacgggcccagcaggcgccaaataccgagatgtgccaaggaggagacccagggtctgggctgaggcccagggctgagaaggaggacacagcagagcttggggttcatctggtgaactccctcgtggaccacggccgcaactcagacctgtcagacatccnnnnnnnnnnnnnnnnnnnnnnnnnnnnnnnnnnnnnnnnnctgggttccaggacttgctccttccagaagcaggttgctggcaacagcatcagggagaatggggccaaggcaacagagaccggagaggccagagggcaggacggctctgggcggaggggcccccagaagagaggtgtccgagtcctcaggccaagcactgcagagctagtccctgcgaggagcccctcagaaacactggcttaccagcacctacccgtcaggatctttgtggctctgtttgactatgaccccgtgtcaatgtcgcccaatcctgatgctggagaagaagagcttcccttccgagagggtcagatcctgaaggtgtttggggacaaggatgccgatggcttctaccagggncgaaggtgggggccggacaggctacattccctgcaacatggtggcctgaggtggctggggacagcccctgcttggaaaacacaactgctccagcggggttatttgtcccaaaatttctccttgagggttccacccccacaattggtcctcctcccagaccccccggtccaaaaaaattgattcgaaaggccc

SEQ ID NO: 355298 - DNA, 1019 bp, Homo Sapiens
  misc_feature (89)..(180): n is a, c, g, or t
gaattcccgggatcgggtccctgaggatcccgatgcctacgagccaagatgctcagctttataggtgtgacctacacatgtgacttcannnnnnnnnnnnnnnnnnnnnnnnnnnnnnnnnnnnnnnnnnnnnnnnnnnnnnnnnnnnnnnnnnnnnnnnnnnnnnnnnnnnnnnnnnnntgcaggagggagcctcggaagcagcggcctggccggcagagcacacctgctgtcaccagggaccacaggcagcatgaagacccccgtggagctggccgtcagtgggatgcagaccctcggccttcagcaccgctgccgaggtggctaccgggtcaaggccaggacgtcatatgtggatgagactctgtttggcagcccagcaggcacccggcctaccccaccggacttcgatccgccctgggtggagaaggctaacagaaccagaggcgtgggcaaggaggcatcgaaggccttgggggcaaaggggagctgtgagaccaccccctcaaggggcagcacccccaccctcacaccaaggaagaagaacaaatacagacccatcagccacaacccgtcttactgtgatgagtcgctgtttggctcccgatctgaaggcgccagcttcggggccccgcggatggcgaagggggatgccgcaaagctccgtgctctcttgtggacgccaccacctacccccaggggtagccactcgccccgccccagggaggcaccactgcgagccattcacccagctggtccctccaagacagagccggggccagcggcagactcccagaagttatctatgggggggttacactcttcacgccccctgaagcgggggactttcccattccctcacccacctgaatggcccccagcactgggtcatccaggccaccagtgcccccccaacaaatggggccctcagggaatctcagcctttcccaggtaggggggggaccttccgggagccccccgggtgacttccaagggctcgcctcaatttaacaattcag

SEQ ID NO: 355299 - DNA, 857 bp, Homo Sapiens
acgggcagtactcatacggtctttaggtagcgaggctgggtggcgaattcggcacgagggggaggcggcctagtacacacgcacctgagtgagtggcaccagaggaccctctccatgtttagggacctcctgggcctcaggagcgtggcgcccgcccctgggcggactccccccatccgcgggcgcgaatggtccgggccgcgtccgcagtgctgctggctgctccctggttgctgggtgcaaagtgctgggttctgggtttctggattcgcgggccgttcacacgtagcctgtgccggctcctcgggtgagtccgtccgcgcgcggtgccccgggacggcctaggctgccgggggtccggggccccaggcattccgggctgcagattgacggggatcccggatgcaccgcgcgcccccgcgccctcaccgacgggtccagacctggtgggaagaaggtgcggggacgggtccctgaggatcccgatgcctacgagccaagatgctcagctttataggtgtgacctacacatgtgacttcacctcagttttgtgatccgtaaaatggacaaattcgaagctacttcacagtgctgttgagcaggattaccatgaaacaatgcttgtaaaagctctttgctaggagggagcctcggaagcagggcctggccggcagagcacacctgctgtcaccagggaacacaggcagcatgaagacccccgtggagctggccgtcagtgggatgcagaccctcggccttcagcaccgctgccgaggtggctaccgggtcaaggccaggacgtcatatgttgttgagaactcctggttggcagcccagcagcacccggctacccaac

SEQ ID NO: 355300 - DNA, 783 bp, Homo Sapiens
attgcccgctccaccctccacatgccctttctaactcctcagttgacctagggtccccaagccttgccagtcacccccggggcctgctgcagaaccgtggcctcaacaatgacagtcctgagcggaggcgcaggcctggccatggcagcctgaccaacatcagccggcacgactccctcaagaagatcgacagccctcccattagaaggtccacgtcatcagggcaatacacgggcttcaatgaccacaagccactggacccagagacaattgctcaggatattgaagaaacgatgaacacagctttgaatgaactccgagaactggagagacagagcacagcaaagcatgcccctgatgtggtgctggataccctggagcaagtgaaaaactctcccacccctgccacttccacggaatctctcagccctttgcacaacgttgccctcaggagctccgagcctcagattcgacgtagcacgagctcctccagtgacacaatgagtactttcaagcctatggtggcacccagaatgggcgtgcagctgaagcctccagcccctaggccaaaacctgctgttcttccaaaaacaaatcctaccataggacctgccccacctccccagggtccaacagacaagtcatgcacaatgtaaaaaccagccaagcaaggccataaagggaggtgacttaaaaaagaaaatggattagtgacaaaagtcactgatccataactttccttagttttgtgcttataactggagatcttttggcttttctatg

SEQ ID NO: 355301 - DNA, 1772 bp, Homo Sapiens
  misc_feature (725)..(725): n is a, c, g, or t
  misc_feature (727)..(727): n is a, c, g, or t
  misc_feature (732)..(732): n is a, c, g, or t
  misc_feature (741)..(741): n is a, c, g, or t
  misc_feature (750)..(750): n is a, c, g, or t
  misc_feature (763)..(763): n is a, c, g, or t
  misc_feature (768)..(768): n is a, c, g, or t
  misc_feature (772)..(772): n is a, c, g, or t
  misc_feature (778)..(778): n is a, c, g, or t
  misc_feature (782)..(782): n is a, c, g, or t
  misc_feature (787)..(789): n is a, c, g, or t
  misc_feature (791)..(791): n is a, c, g, or t
  misc_feature (793)..(793): n is a, c, g, or t
  misc_feature (798)..(798): n is a, c, g, or t
  misc_feature (810)..(812): n is a, c, g, or t
  misc_feature (816)..(816): n is a, c, g, or t
  misc_feature (819)..(819): n is a, c, g, or t
  misc_feature (840)..(840): n is a, c, g, or t
  misc_feature (845)..(845): n is a, c, g, or t
  misc_feature (883)..(883): n is a, c, g, or t
  misc_feature (887)..(887): n is a, c, g, or t
  misc_feature (893)..(893): n is a, c, g, or t
  misc_feature (895)..(895): n is a, c, g, or t
  misc_feature (899)..(899): n is a, c, g, or t
  misc_feature (901)..(902): n is a, c, g, or t
  misc_feature (904)..(904): n is a, c, g, or t
  misc_feature (911)..(911): n is a, c, g, or t
  misc_feature (913)..(914): n is a, c, g, or t
  misc_feature (918)..(919): n is a, c, g, or t
  misc_feature (921)..(921): n is a, c, g, or t
  misc_feature (924)..(924): n is a, c, g, or t
  misc_feature (929)..(929): n is a, c, g, or t
  misc_feature (934)..(934): n is a, c, g, or t
  misc_feature (941)..(941): n is a, c, g, or t
  misc_feature (949)..(949): n is a, c, g, or t
  misc_feature (951)..(951): n is a, c, g, or t
  misc_feature (954)..(954): n is a, c, g, or t
  misc_feature (956)..(956): n is a, c, g, or t
  misc_feature (958)..(958): n is a, c, g, or t
  misc_feature (962)..(962): n is a, c, g, or t
  misc_feature (964)..(964): n is a, c, g, or t
  misc_feature (968)..(968): n is a, c, g, or t
  misc_feature (972)..(972): n is a, c, g, or t
  misc_feature (1007)..(1007): n is a, c, g, or t
  misc_feature (1011)..(1011): n is a, c, g, or t
  misc_feature (1035)..(1035): n is a, c, g, or t
  misc_feature (1046)..(1046): n is a, c, g, or t
  misc_feature (1062)..(1062): n is a, c, g, or t
  misc_feature (1071)..(1071): n is a, c, g, or t
  misc_feature (1124)..(1125): n is a, c, g, or t
  misc_feature (1130)..(1130): n is a, c, g, or t
  misc_feature (1132)..(1132): n is a, c, g, or t
  misc_feature (1151)..(1151): n is a, c, g, or t
  misc_feature (1154)..(1154): n is a, c, g, or t
  misc_feature (1165)..(1165): n is a, c, g, or t
gggggagcagggggattcaacttgataattaggttttgggatttgcaaatatgaaatgtgggggcattttgggaataggacttcccattatccagagctttttgaaaccggtcaaaatattatttttagggttaaaggccagagttttgggatcagtggggtccaccacagagggataagcttcaaagatgatgctctttttaggggactctaaagctgccttacacatggccaccagcagatccaccacctctgctccagtggccacctcctctgcagctccagacatgacgcccagtgtgtagaaggagaaaacgcatagttcacgagtacagacagctggcttcagcatagatccattttggaagacatgctgctcatcacacaccacacagtactcattcaatgttggaatcctctgttctgcatacttcatgatctgaacgaggaatccatactccagagtgggaatgttcttgcagtgaccactgacctgggggctgggagggtagccaaacactcccactttggggttcttcatggaacaggagatggaacggttcatgaggcgcccaacccgaagctctggtacacatagtttccctttcagcatggagtcctgtatgatagggaaactgggagacttggggatgggtgaaaagatgctgaggacagctcggaacttattgatggtaccacttgccttgaaccaactgtgcctcttncncctgntgggtcttncaagaaaancattgctcagatngtttncacnttgttngggntgtannncntnccccnggatctttttcnnnctgnagncccagcccaaatccttccttntttgntggctggaaaacctcaatggatggttctggtccatctnggtnctgggngngagnanntngcagccncnncacnntnggntctgnccggnggacctnaccaggcngnagngncntccncntcgnggangctgatgttgattgtggaggtcaatgtccacgtcntcgntagttccatattctctgatggatncagagttctcnctgtagatctccttcncggcttcantgtctgcatcaagctgtgggtgtcgatacaggtcagctgcacagctcccctgnncgccntngagaaattcctctgattcnttntctccctccgngtcgtcatcattccagaactggcctttgatgtccattgggtcagtgggtcacacacactctcaggtcagtgctaggcagcacccctccataccactagccgaaccaaggccaacgagatgggcatttaggagaccacaaagggagacaaggtagggcacgatgtcagggacaactggtgatctgttggggatggcaggctctgctgttgcggtggtaacaagtcactgtccttcaagagcagctgagatccaagaatgtgaagatcttggggtgaggttcgtgagatttgaaaataaacagtcaagtgctgatctggatgatcacagaggaataaagagggaggcactaaatgtccagcctgggttgccctggggtgaggggtaggatgacggcagcgttaggccagaagtgccaacttttcacggtctttgttgctgcagaagtcaagaaaaatttagcctctttccaagggctgttgctgcttggtttctgttgttcgtccacccctgcggagacggggcgagccccgcacccttcccgtggcccggccgcaccgccctgtaaccgtggtggcggccacacaggccagcctggcgagtactcacg

SEQ ID NO: 355302 - DNA, 3196 bp, Homo Sapiens
ctccgcccccgcggggcgtcccgggccgctcgtcccgtcggctgcggccgcgcgcggcccggggtcgccgtgagtactcgccaggctggcctgtgtggccgccaccacgggcacagggcggtgcggccgggccacgggaagggtgcggggctcgccccgtctccgcaggggtggacgaagtgagaggcttggaccgggaggttctgagggcccctcctaggctggacaggcttcactcaggcccggcggccgggcggcatagatcgggcccagagcgtctttcctggggagcaacagaaaccaagcagcaacagcccttggaaagaggctaaatttttcttgacttctgcagcaacaaagaccgtgaaaagttggcacttctggcctaacgctgccgtcatcctacccctcaccccagggcaacccaggctggacatttagtgcctccctctttattcctctgtgatcatccagatcagcacttgactgtttattttcaaatctcacgaacctcaccccaagatcttcacattctggatctcagctgctcttgaaggacagtgacttgttaccaccgcaacagcagagcctgccatccccaacagatcaccagttgtccctgacatcgtgccctaccttgtctccctttgtggtctcctaaatgcccatctcgttggccttggttcggctagtggtatggaggggtgctgcctagcactgacctgagagtgtgtgtgacccactgacccaatggacatcaaaggccagttctggaatgatgacgactcggagggagataatgaatcagaggaatttctctatggcgttcaggggagctgtgcagctgacctgtatcgacacccacagcttgatgcagacattgaagccgtgaaggagatctacagtgagaactctgtatccatcagagaatatggaactatcgatgacgtggacattgacctccacatcaacatcagcttcctcgatgaggaagtctctacagcctggaaggtcctccggacagaacctattgtgttgaggctgcgattttctctctcccagtacctagatggaccagaaccatccattgaggttttccagccatcaaataaggaaggatttgggctgggtcttcagttgaaaaagatcctgggtatgtttacatcccaacaatggaaacatctgagcaatgatttcttgaagacccagcaggagaagaggcacagttggttcaaggcaagtggtaccatcaagaagttccgagctggcctcagcatcttttcacccatccccaagtctcccagtttccctatcatacaggactccatgctgaaaggcaaactaggtgtaccagagcttcgggttgggcgcctcatgaaccgttccatctcctgtaccatgaagaaccccaaagtggaagtgtttggctaccctcccagcccccaggcaggtctcctgtgccctcagcacgtgggcctccctcccccagcacggacctctcctttggtcagtggtcactgcaagaacattcccactctggagtatggattcctcgttcagatcatgaagtatgcagaacagaggattccaacattgaatgagtactgttgtggtgtgtgatgagcagcatgtcttccaaaatggatctatgctgaagccagctgtctgtactcgtgaactatgcgttttctccttctacacactggggcgtcatgtctggaagctgcagaaggaggtggccactgggaaccaaaggtggtgggatctgctgggggcccatgtgttagggcaactttaaagtcccctagaaagagcatcatctttgagccttatccctctgtggtggaccccactgatcccaagactctggcctttaaccctaagaagaagaattatgagcggcttcagaaagctctggatagtgtgatgtctattcgggagatgacccagggctcatatttggaaatcaagaaacagatgaacaagttggatcccctggcccatcctctcctgcagtggatcatctctagcaacaggtcacacattgtcaaactacctctcagcaggcagctgaagttcatgcacacctcacaccagttcctcctgctgagcagccctcctgccaagggaggctcggttcccggaccgcccaagaagctctatggcagcacctttgccttccatgggtcccacattgagaactggcattcgatcctgcgcaatgggctggtcaatgcatcctacaccaaactgcagctgcatggagcagcttatggcaaaggcatctacctgagccccatctccagtatttcctttggatactcaggaatgggaaaaggacagcacaggatgccctccaaggatgagctggtccagagatacaacaggatgaataccatcccccagacccgatccattcagtcacggttcctgcagagtcggaatctaaactgtatagcactttgtgaagtgattacatctaaggacctccagaagcatgggaacatctgggtgtgccctgtgtccgaccatgtctgcacaagattcttctttgtatatgaggatggtcaggtgggcgatgccaacattaatactcaggaccccaagatacagaaggaaatcatgcgtgtgatcggaactcaggtttacacaaactgagggggccccagccctcgtaccacccctgttaccccaggatccatctgccctcataaaagtgttcaggtacagcagctgaggctgccctgaggaatcaaggggccattaccaaggggcaggaaaaggatatgtaagaggtggccttcatggtagagcttgacccaagaactactccacattcggatggcccagactgactccatcccctgactttccctttgacttcaccctgtttgtaaataaaacaataaaatggaaggtgctgtggactggaaaaaaaccgccaccaaaggcgaacaacaaagacaacaaaacaaaggggggcgcgggcccaaaagatatcccccagaggggccccagataagcgggtacacccggattatccgtggcaccagagacggggccccccaaaggagaggagcgcgacatcaaagaggcgcgagagaacaggggcgcggaagagacacaaaaaaggcggggagcggggggaacaaccgccgggaaccgtggggagaaccacctgggagaaggaggaatc

SEQ ID NO: 355303 - DNA, 782 bp, Homo Sapiens
ctgtgccagtcctctcctgcatgtggatcatctctagcaacaggtcacacattgtcaaactacctctcagcaggcagttgaagttcatgcacacctcacaccagttcctcctgctgagcagccctcctgccaaggaggctcggtcccggaccgccaagaagctctatggcagcacctttgccttccatgggtcccacattgagaactggcattcgatcctgcgcaatgggctggtcaatgcatcctacaccaaactgcaggaatgggaaaaggacagcacaggatgccctccaaggatgagctggtccagagatacaacaggatgaataccatcccccagacccgatccattcagtcacggttcctgcagagtcggaatctaaactgtatagcactttgtgaagtgattacatctaaggacctccagaagcatgggaacatctgggtgtgccctgtgtccgaccatgtctgcacaagattcttctttgtatatgaggatggtcaggtgggcgatgccaacattaatactcaggaccccaagatacagaaagaaatcatgcgtgtgatcggaactcaagtttacacaaactgaggggggccccacccctcgtaccacccctgtttacccagggatccttctgcccctcataaaagtgttcaaggtacaccaacctgaggctgccccctgagaaatcaaggggccatttaccaagggggccaggaaaaaggattatgttaagaagggggccctttcatgggaagaagctttgacccaaagaaac

SEQ ID NO: 355304 - DNA, 774 bp, Homo Sapiens
ctcggtacccagatccccctttccatccattcccagggcaaggcccctgctatgaataaaaccatcatttttaacaataactggcctcaccttgtaaagaatctaaatttctaataagaaaatgtagagagagagagaatatgtatccatgatcggggagagagctgacacagaccaagtatccataatgagggaggaacagacagcacaaatcatgtattcacaaatggaggcaatgtaaatagagtcaaggtggccacagaatatttcttacctgagtatccaaaggaaatactggagatggggctcaggtagatgcctttgccataggctgctccatgcagctgcagtttggtgtaggatgcattgaccagcccattgcgcaggatcgaatgccagttctcaatgtgggacccactgtaaggcagggtagaatacatgtctccttatgatatgaggttcccaggaacactcccaagactgccattcccacccattctcacccacacaggacatgaagatggacaggtacacctagtgatggacatgcacatggatacagtcacaggcatgcaagatgtgtgtgtgtggttaaactctacgtctctatttccagtcccatcctctcttcggtgcttcagctactcccatcctaaatcctcaactgctggttcagtattttgatttgcccattatcctgacatttcaaattcaataaattcatctgaaaatcaacacatttatcactgaacccaaatatgggtccagttctta

SEQ ID NO: 355305 - DNA, 519 bp, Homo Sapiens
  misc_feature (468)..(468): n is a, c, g, or t
ctatcgatgacgtggacattgacctccacatcaacatcagcttcctcgatgaggaagtctctacagcctggaaggtcctccggacaggaacctattgtgttgaggctgcgattttctctctcccagtacctagatggaccagaaccatccattgaggttttccagccatcaaataaggaaggatttgggctgggtcttcagttgaaaaagatcctgggtatgtttacatcccaacaatggaaacatctgagcaatgatttcttgaagacccagcaggagaagaggcacagttggttcaaggcaagtggtaccatcaagaagttccgagctggcctcagcatcttttcacccatccccaagtctcccagtttccctattcataacagggattccatggctggaaagggcaaactaggtgttaccaggaggtttcggggtttggggcgccttcatggaaccgtttccctnttccttgttaccatggaaggaaccccaaagtgggaagtgtttgggttaccc

SEQ ID NO: 355306 - DNA, 799 bp, Homo Sapiens
agcagttgcaggcagacggagcagagcggtcagggatcatgagggagagtgcgttggagccggggcctgtgcccgaggcgccggcggggggtcccgtgcacgccgtgacggtggtgaccctgctggagaagctggcctccatgctggagactctgcgggagcggcagggaggcctggctcgaaggcagggaggcctggcagggtccgtgcgccgcatccagagcggcctgggcgctctgagtcgcagccacgacaccaccagcaacaccttggcgcagctgctggccaaggcggagcgcgtgagctcgcacgccaacgccgcccaagagcgcgcggtgcgccgcgcagcccaggtgcagcggctggaggccaaccacgggctgctggtggcgcgcgggaagctccacgttctgctcttcaaggaggagggtgaagtcccagccagcgctttccagaaggcaccagagcccttgggcccggcggaccagtccgagctgggcccagagcagccggaggccgaagttggagagagctcggacgaggagccggtggagtccagggcccagcggctgcggcgcaccggattgcagaaggtacagagcctccgaagggccctttcgggccggaaaggccctgcaagagccaccgtccacccggtcaaagccgctcgccttgggcctggccggagcgcagaagcccagccggaagcccaggctgcgctggagaccacgctggagccagagcctccgcaggacaccgaggaagatccgggagactgggctgcgaagaagctctgtcc

SEQ ID NO: 355307 - DNA, 1010 bp, Homo Sapiens
tggatgtaggattcgctccttattagggcgtgagtgctacattctgaaaggatttattttgggacaaggcacaagcacaggggaggcaggcaacaccagccctcaggctacactctccatttggagcagagcttcttcggcagccccaggtctcccgggatcttcctcggtgtcctgcggagcctctggctccagcgtgggctccagcgcaggctgggcttccggctgggcttctgcgctccggccaggcccaaggcgaggcggcttgaccggggtggccggtggcgctgcaggcctttccggcccgaaagggcccttcggaggctctgtaccttctgcaatccggtgcgccgcagccgctgggccctggactccaccggctcctcgtccgagctctctccaacttcggcctccggctgctctgggcccagctcggactggtccgccgggcccaagggctctggtgccttctggaaagcgctggctgggacttcaccctcctcctgcatgtgacggacacagcactgatcctggcagctccttacccccagcagcccgaaactcactccttaattacacaagggaaaccttttacctccgcagccagagtctggggggaaaggcaggcgtgggaaggtaaggggagggaaagctgcgtgcgaactgcaaaacgctgtaaagtaggtgaggcctggtgaggggcgagaagaggatagtgcccgcagtcacggaatgccctttcaaccaccgttattttagggattggctgggactcagaccaaattctgcggacgtggcctgagctagagctgggcgggcttggattggccaggcggggctcaggcgtgagagggagggatggggctgggtcttgggaagtgggtgcggctctgtgagtctgttccacagcaacagacggcgggaggggtcaggaatgtgggtgtggtaggtggatggaagcggggagcccccagctggtggcccacaggccggcaaaggcctcggattgg

SEQ ID NO: 355308 - DNA, 1063 bp, Homo Sapiens
  misc_feature (13)..(13): n is a, c, g, or t
  misc_feature (34)..(34): n is a, c, g, or t
ccactgggcgcanccatttgatggtgggcgtggnaaagccctcggcgatgcactccaggaccaatggctgcccctgcaaggccaccaggtggctgctggagttggtggggaagagcaggcgcggcttcctgtcaatcatgctgttggtggccttgacccggaggtcaatgggttccttctgaatgatggtcctggtgcctgggaagtgggcgtggcagatgtagtctgagtggttgtcggaggtgagcacattggcaaagtagaggttgccgttctggcccatcgtcacccgctcgtcctgcttgatgtgcaagatcttgctgttcatccagtagatccggagaggctctgcacttgggggagggttgcaaggcagaaccactgactccccttcctccacctccacgggcttcactgtctcctttggccacttgggggcaccctcggccatgagccggatctcatgggacatggcggtgcccagcttattgctggcaaagcagcggtagatgccctggaacctctgagcaaagttgctgttgttgcccgtgatggtgaaggagccagagtggggcgactggtacacggtcacacccagctcttccttgggtttgaagtggacaccatccctcgtccagcggaactgcacttcgggcttgccactggcctcacacttgaggctgatgtcatctgtggggaagacaaccaggcgccgtggagactgttccgtgatgacaggtggctccatcacatggtgtccttcatattcctcggggatctggataagcaggcaggggctgcagaggaggagaggccacacgtaccgcagcgccacgaccatctttcccggcggcaccgcgcagcacagccagccgggctcggttcaggctccggccggaggggaagggggctggtgggcggcttggggcgggagttgggagtggggaaactgcgctgcggccaccgctcgggctgcccgcccagcctccgcgcacgccggcctcggacccgccgccgacgcgtgggtcgacgatatcccgggaattccggacctgtaccagcc

SEQ ID NO: 355309 - DNA, 1677 bp, Homo Sapiens
  misc_feature (70)..(83): n is a, c, g, or t
ccttataatagggagggcgtcttatcctctcagccgcggcttgagcctctttgtctgagcgcgctcggcnnnnnnnnnnnnnncctctctccttccctgcagcagtggccggtgtccagctgcctactttctgcccggatctctggctcctcatctctccggtctccgcagactaaagccctcgggatatgcagcagccatgcctgtgcacacgctgagccccggagccccgtccgcccccgccctaccttgccgcctgcggaccagggtccctggctacctgctacgggggccggcagatggtggagcccggaaaccgagcgctgtggagcgcctggaggccgacaaggccaagtacgtcaagagcctgcacgtggccaacacccgccaggagcctgtgcagcccctgctgtccaaacagccgctcttcagccctgagactcgccgcacagtgctcacgcccagccgccgagccctgcctggcccctgccgacggccccagctggacctggacatcctcagcagcctcatcgacttgtgtgacagccccgtgtcccctgccgaggccagccgcactcctggacgggccgagggagccggccgtcctcccccagccacccctccgcgaccgccgcccagtacctctgcggtccgccgggtggacgtccgccccctgcccgcctcgcctgtcccggccctgcccatcacccggacctgccgccgcctccagcccagcccggccgccgggtttgcaacgctccaagtcggacttgagcgagcgcttttctagggcagccgctgatctcgagcgctttttaacttctgcggcctggacccggaggaggcgagagggttgggtgtggcccacctggcacgggccagctcggatatcgtgtccctggcagggcccagtgctgggccgggcagctctgaagggggctgctcccgccgcagctcggtgactgttgaggagcgggcccgggagcgcgttccctatggcgtgtcggtggtggagcgcaatgcccgcgtgatcaagtggttgtatgggctaaggcaggctcgggagagcccagcagctgaaggactaggcgccactgggcctggaattcgccacaggacggatcttacagaggcaagtggtccctggacctctcttgcatccattctctagacggccgtgtcagaggctccaccctgttgtgaacttggtatggaggcaaaggcttagaggctggaccagcattcttgggcaaggactgactctccaagcgttttgttcttggctttggacacctgagaaccccctcctcccctcccccaatacaaggtttttgacatgagtgtactccatgcttagttcctcttgtggggctgcatttgcggtgctattgccctccccactgtgagtgaggggccaaggtatctcctcaatcctgtctccaccagcggctctgtttcctccttccttccttggcctctgtcctttgctgacttcccctcttccttacccagcagaactccacccggggtcggggacagtggggaggggcctatccactgctcttcctagtccttggcagctggcctaggtgggcagactataggagggactggttaggagtctgcattgctttgacttccctctccttggttaataaacacaaatgcttgtttctc

SEQ ID NO: 355310 - DNA, 1040 bp, Homo Sapiens
  misc_feature (347)..(392): n is a, c, g, or t
tagaaatgaggagtgagtgcggtgaagagtgagaggggaatgggttgagggaagattgagagcgtggaggaggagatggtggtataaaagaggtgtggaggagattagagaatgaagtgcagataggagagatggttggaaagaaggtaggggtgggccagtgatggggggtagagattagcaagtggagtgggggggatagggtggagtaggtgtggggtagtggaggggggaataggaagggagatgttatgtgttaggggggacaaaggagagaggacctggtataggggaagctggtgagtgagggtattgacaacggggtggggagttgtgtattaggcgtnnnnnnnnnnnnnnnnnnnnnnnnnnnnnnnnnnnnnnnnnnnnnnaaaaatacggggcgagtaggaataaaaatgcagggatattgcgccatggtttgcatggtgggctgagcgaaggctagttgcgggaaaactccatactgcgttgtgcaggaaaggagctctgagggcggggtgcattcatgcactgcagtgacttctagcacggcgcttcactctccaggtggggaagaagcggggtgcggggactggccacaaacacggctcggccgacggggaccggcacgctgcgggaccaggaaaacccccttctccgcccctgtcccaggccggcggaaacggccgtctcgggcgtgggcgcgcttctgcggactcctcgggaccttttacccaggcgtgcggccggggcgcccggggcctcggggagccggcgccagcgtgcggagcgcagcggagcggagggagcggcgggagcggcgtccgtggctggtccaggtctggggcgcagcctccaggctcgccctgcgccgctctgggcctcggcctcttcgcctgttcgaccggggcgcaagcgtgtcacagcgcctgtctgcagggggaagcgggcttcccagaggggcgcgtggctcgcagaggggctccgggaatatccggctccgttggccctttccagagcttttcatccgtaacccc

SEQ ID NO: 355311 - DNA, 1229 bp, Homo Sapiens
  misc_feature (49)..(80): n is a, c, g, or t
ggaccggtccggaattcccgggatcggggccgcacctgtcctgcggctnnnnnnnnnnnnnnnnnnnnnnnnnnnnnnnnagcagctgcgcgccccgccccgccccgcgggctcctccctgccgccgcggccccccggttgctgccccgatgcgctgcgcccggagccggggccgagtcgctgccgcagctgttggggcgcccgggccaggcgacgccgccgtcgcccgtgcccctcccagaccgcaccggccgcatggagcccccggagggcgccggcaccggagagatcgttaaggaggctgaggtgccgcaggctgcgctgggcgtcccagcccaggggacaggggacaatggccacacgcctgtggaggaggaggtcgggggcatcccagtaccagcaccggggctcctgcaggtcacggagaggaggcagcctctgagcagcgtctcctctctggaggtccacttcgacctcctggacctcactgagctcaccgacatgtcggaccaggagctggccgaggtctttgctgactcggacgacgagaacctcaacaccgagtccccagcaggtctgcacccgctgccccgggccggctacctgcgctccccttcctggacgaggacaagggctgagcagagccacgagaagcagcccctaggcgaccccgagcggcaggccacagtcctggacacgtttctcactgtggagaggccccaggaggactagaccatctccacctgccccagctcctgcagggatggggtccgaacacgatggcagatctgggcagtgctgacccagcagacacacttcacccgcccacgaggctccagccgtcacctcctgacacacaccctgggggcagctctctgccagccccgagaccggccttgtctgctgggcacgggtcttcgcctcacttggagaccagccggctttcctgggggacacacggggcccccggatgcctctgggagccccagcacaagcacagcccagtggccttacgtccagctcgttcctgggccccgagtcaggaagacagcgtcacggagtcactgcaaggaacgtgctgaggaaatggagtggcccacggcggccttggggtgaaaggggacccaggcctgtgacagccactccaggaacttcctggggggtgctcccaacctccgcgtttttcctggtgcttggcaagctcagaaagccaaaagggggggttttgg

SEQ ID NO: 355312 - DNA, 977 bp, Homo Sapiens
cagtcctcagcccggtgccttgcagtgctttccgtgaccctgttcttcctgactcggggtcccaggtacgagcctggacgtaaggccacctggtctgttgccttttgctgtgggcttcccagatggcatctcgggggcccccagttgtggtccccccaggcaattctcgtctggttctccaatgtgaggccgaagaccccggtgcccacccagacaatgtccggtctcggggctggcagagagcttgccccccagggtctgtgtcaggaggtggaccgtctggagcctcgtgggtcgggctgaagtgtgtctgctgggtcaagcactgcccagatctgccatcgtgttcggaccccatccctgcaggagctggggcaggtggagatggtctagtcctcctggggcctctccacagtgagaaacgtgtccaggactgtggcctgccgctcggggtcgcctagggcctgcttctcgtggctctgctcagcccttgtcctcgtccaggaaggggagcgcaggtagccggcccggggcagcgggtgcagacctgctggggactcggtgttgaggttctcgtcgtccgagtcagcaaagacctcggccagctcctggtccgacatgtcggtgagctcagtgaggtccaggaggtcgaagtggacctccagagaggagacgctgctcagaggctgcctcctctccgtgacctgcaggagccccggtgctggtactgggatgcccccgacctcctcctccacaggcgtgtggccattgtcccctgtcccctgggctgggacgcccagcgcagcctgcggcacctcagcctccttaacgatctttggcggccgcgcccgctggcgtcctcttgttctcttccaggtacttgcgtgtggggcgccgactgtgtgcgggcgcccctcggggctggcgaggggcacaggagtggcctgactcgcgctgggtaatgacagacccccgct

SEQ ID NO: 355313 - DNA, 1092 bp, Homo Sapiens
  misc_feature (13)..(13): n is a, c, g, or t
  misc_feature (34)..(35): n is a, c, g, or t
  misc_feature (741)..(741): n is a, c, g, or t
  misc_feature (966)..(966): n is a, c, g, or t
  misc_feature (980)..(980): n is a, c, g, or t
  misc_feature (1019)..(1019): n is a, c, g, or t
  misc_feature (1029)..(1029): n is a, c, g, or t
  misc_feature (1037)..(1037): n is a, c, g, or t
tttttcgtttttnccccctaacgcccgtcacccnnctaggtagcgaggcctgggtggcgaattcggcacgagggtcgctgccgcagctgttggggcgcccgggccaggcgacgcggccgtcgcccgtgcccctcccagaccgcaccggccgcatggagcccccggagggcgccggcaccggagagatcgttaaggaggctgaggtgccgcaggctgcgctgggcgtcccagcccaggggacaggggacaatggccacacgcctgtggaggaggaggtcgggggcatcccagtaccagcaccggggctcctgcaggtcacggagaggaggcagcctctgagcagcgtctcctctctggaggtccacttcgacctcctggacctcactgagctcaccgacatgtcggaccaggagctggccgaggtctttgctgactcggacgacgagaacctcaacaccgagtccccagcaggtctgcacccgctgccccgggccggctacctgcgctccccttcctggacgaggacaagggctgagcagagccacgagaagcagcccctaggcgaccccgagcggcaggccacagtcctggacacgtttctcactgtggagaggccccaggaggactagaccatctccacctgccccagctcctgcagggatggggtccgaacacgatggcagatctgggcagtgctgacccagcagacacacttcacccgcccacgaggctccagccgtncacctcctgacacacaccctgggggcagctctctgccagccccgagaccggccttgtctgctgggcacgggtcttcgccctcacttggagaccagccggcttttcctggggggacacacgggggcccccggaatgcctcttgggacccccagcacaagcacagcccagtggcctttacgttccagcttcgtttcctggggccccgagttcaggaaagacagcttnaagggattcattgnccaggaacttgttgaaggatttggatttggcccaggggnttttgggttnaagggganccaggttttgaacagccatttcaggatttttgggggtttttcaaatttcgttttt

SEQ ID NO: 355314 - DNA, 1221 bp, Homo Sapiens
  misc_feature (75)..(75): n is a, c, g, or t
  misc_feature (88)..(113): n is a, c, g, or t
attgcacaaagattagtcatgagtttatgtcagaaaaatgtgctttaaggaaaggagggttttcaaagaaacctntaagtgttatatnnnnnnnnnnnnnnnnnnnnnnnnnntccatcaggttgctatcacaagcctgtcctcgtcatcatcgctgctcacgtcgctgaagtgcacagtgggctgcctccgcggtagtgctgtgggcctgggaacctgtctgtctggagagagagtctgctggcctgagggctttgtaaaaacttcagaatgtgccttcagcagaggttgtgacgtggacgctggttggccctgtatggaagtgagttcaggcttgggcttcacgtgatttgccgaggcagccttctctgtgtccattttactcaggccatcaagccttgcatggtcacctgcaggggcaggtggattcagaactttttttgcatttccccgctggactgtaaggtaaacccctgaaggagactcggccctgctgaccctggtttgcgctggctacagaagtctgcttgggttgtgtctcgcatgctttgctttgggaagctggcatttctggagctccctgtgcatcaacggctacttgactgactgaggggattaaggtgggcaatgctatgttcaagatctggagacctggaatgtgtgcctgaggggcggggctgctttatgatgaagggtttgcagtcagaacctgcagtccgacagcattcagagccagtcctggtggatggacttgtggggccatatttgtattggctaggcctacaatattgacggtttccatgcttaacgaggggagtgactgcaagcctggggtacttaggttctgaaggcctggcacgcggatttggccgataggaatacatggcacaacactgcttaattcagccactccagcagggtttgtagtgccagacacttctgtgaccgtattcctatgagtacccaaagttctgtgaacgacactgacagcagggatcgtgagctgcactggtccagcctgaaggggcacaaacgtggagtatgtgaggccagcaggtaccacatggatccccccaactggaaccatattataaggtgtcctcgattgctgctgggaatgcaaaggaaggtggctaaacaaatgagtgtggggagaaggcaagcctggagtcggctgtagagttatttgctgcttctgttcttgagggtcaggatgtggcc

SEQ ID NO: 355315 - DNA, 1993 bp, Homo Sapiens
  misc_feature (97)..(159): n is a, c, g, or t
  misc_feature (704)..(704): n is a, c, g, or t
gcggcgtccagggtcggcagcaaccgcagccgagcccgagcgggtggcggcgccatggcgtgcgcggggctgctcaccgtgtgcctgctccggccgnnnnnnnnnnnnnnnnnnnnnnnnnnnnnnnnnnnnnnnnnnnnnnnnnnnnnnnnnnnnnnngccggacacacgctcttccaggacgttttccgcagagcagacaagaatgatgatgggaagctctcatttgaggaattccagaattactttgccgatggggttctcagcctgggggagctgcaggaactgttcagcggcattgatgggcatctcaccgacaatttagaaacagaaaaactgtgtgactacttctcagagcacctgggtgtctaccggccggtgctggctgcattggaatcgctgaaccgtgcagtgctcgctgccatggatgccaccaagctggagtacgagagggcctccaaagtggaccagtttgtgacacgcttcctgctgcgggagacggtgagccagctgcaagcccttcagagctcgctggagggggcgtcagataccctggaggcccaggcccatggctggcggtcagatgcagagagcgtggaggcgcagagcaggctctgcggcagccggcgggcaggacgccgagccctgaggagtgtcagccggtcatccacctggtcccccggctcttctgacacagggcgcantcagaggccgagatgcagtggcggctccaggtgaaccgcctccaggagctcatcgaccagctcgagtgcaaggtgagggccgtggggccaggggcaaaaaagggaggaccctcctggtatccaccagagccaggcccatgctggaggcccggcccacactctgtgccctcacaggccccccggctggaacccctgcgtgaagaggacctggccaaggggcctgacttgcacatcctcatgccccagaggcaggtccaggtggcagaggaaggcctgcaggacttccaccgagccctgcgctgctatgtggacttcacaggggcccagagccattgtctgcatgtgtccgcccagaagatgctggacggtgcctccttcaccctgtatgagttctggcaggatgaggcctcctggagaaggcaccagcagtcgcctggcagcaaggccttccagcgcatcctcatcgaccaactgcgggccccggacaccctcaccactgtgttcttcccagcctcctggtggataatgaataacaactgagccagacctgcacacgccgagggccccgggaccctgcctgcctccctctggagccttctggactggccagcccagcgcaaagaccagggcttgtctcctcctggacttgggcctggtggaagggctctcagcccagggatcagggactgggctgcttgctttctatttattattgatttatttatccctgtattttattgtttgtcacttcagcctccaagctactttggcttctgcctggctcaggagacctggattctggtccctgctgtccctgcctggctgagcgacccagggcaggtcccgtccctgtctgggtgggcctcaggccatctggccgcctagcgagggtcctgctttcttcctgctgtcttgggaccaggcttctgctcctcctcagccagcggcagaagcagggctgatgctcagggaccccccaaccctcaaaccttgcctccgaggctgggcctgagctgggtgccccgtcgccctcccaggccactaggctctgactcttccagcacccatggatgtgccagaggcctctgggttggtttgcatgtcatttgcatatcgtttgcatgccctcatcccacccattctcagggcagtatgggaagccccaaggtgacctggccaagtagcaataatttgggtccagggtcacctattgcccccagaggcctctgaaccccaggctgggaccccagcacagaggcaataaaggcagtggtcccttccaaaaaaaa

SEQ ID NO: 355316 - DNA, 923 bp, Homo Sapiens
  misc_feature (870)..(870): n is a, c, g, or t
  misc_feature (873)..(873): n is a, c, g, or t
  misc_feature (894)..(894): n is a, c, g, or t
cgagtccgccgcggcgtccagggtcggcagcaaccgcagccgagcccgagcgggtggcggcgccatggcgtgcgcggggctgctcaccgtgtgcctgctccggccgcccgcgccccaggcccagccccagaccccgcggcacccccagctcgcgcccgacccggggcccgccggacacacgctcttccaggacgttttccgcagagcagacaagaatgatgatgggaagctctcatttgaggaattccagaattactttgccgatggggttctcagcctgggggagctgcaggaactgttcagcggcattgatgggcatctcaccgacaatttagaaacagaaaaactgtgtgactacttctcagagcacctgggtgtctaccggccggtgctggctgcattggaatcgctgaaccgtgcagtgctcgctgccatggatgccaccaagctggagtacgagagggcctccaaagtggaccagtttgtgacacgcttactactgcgcgagagcacctgggtgtctaccggccggtgctggctgcattggaatcgctgataccgtgcagtgctcgctgccatggctggcggtcagatgcagagagcgtggaggcgcagagcaggctctgcggcagccggcgggcaggacgccgagccctgaggagtgtcagccggtcatccacctggtcccccggctcttctgacacagggcgcagtcagaggccgagatgcagtggcggctccaggtgaaccgcctccaggagctcatcgaccagctcgagtgcaaggtgagggccgtggggcagggcccaaaagggaggaccctcctggtatccaccagagccaggcccatgctggaggccggccacactnttncctcacagcccccggctggancctgcgtgagagactggccagggctgact

SEQ ID NO: 355317 - DNA, 1398 bp, Homo Sapiens
atggcccgagcccaccccgccaaggacggaccggccctgggtcgctccagccaaggcagggacagcagggaccagaatccagtctcctgagccagcagaagccaaaagtagcttggaggcctgaagtgcccacgcattaataccagcgataaatagatccaataataaatagaaagcaagccaagcccagtccctgatccctgggctgagagcccttccaccaggccccaagtccaggaggagacaaaccctggtctttgcgctgggccggccagtccaagaaggcttccagagggagccaggcagggtcccggggccctcgggcgtgttgcaggtctggctcaattggtattcaatatccaccaggaggctgggaagaaccacagtggtgagggtgtccggggcccgcaggtggtcgatgaggatgcgctggaaggccttgctgccaggcgactgctggtgccttctccaggaggcctcatcctgccagaactcatacagggtgaaggaggcaccgtccagcatcttctgggcggacacatgcagacaatggctctgggccccctgtgaagtccacatagcagcgcagggctcggtggaagtcctgcaggccttcctctgccacctggacctgcctctgggccatgaggatgtgcaagtcaggccccttggccaggtcctcttcacgcaggggttccagccggggggccttgcactcgagctggtcgatgagctcctggaggcggttcacctggagccgccactgcatctcggcctctgagctgcgccctgtgtcagaagagccgggggaccaggtggatgaccggctgacactcctcagggctcggcgtcctgcccgccggctgccgcagagcctgctctgcgcctccacgctctctgcatctgaccgccagccatgggcctgggcctccagggtatctgacgccccctccagcgagctctgaagggcttgcagctggctcaccgtctcccgcagcaggaagcgcgtcacaaactggtccactttggaggccctctcgtactccagcttggtggcatccatggcagcgagcactgcacggttcagcgattccaatgcagccagcaccggccggtagacacccaggtgctctgagaagtagtcacacagtttttctgtttctaaattgtcggtgagatgcccatcaatgccgctgaacagttcctgcagctcccccaggctgagaaccccatcggcaaagtaattctggaattcctcaaatgagagcttcccatcatcattcttgtctgctctgcggaaaacctcaggaccgcagccacactgctttctctccggtcctctatcccgctccctcctgcccaaggcctttgcccatcccgggaattccggaccggtcc

SEQ ID NO: 355318 - DNA, 1062 bp, Homo Sapiens
gggtccggaattcccgggatcgcgcctcttgccgccgcagcagcagcagtaccggcatcctcggctcgcgctcgctaccttcgcccgctccgcgcaatctgggtgccgccggggagcccagcccagcgccggacgcgtagtcaatccgtcgcccagcgttggccagcggctgccgcttgtccagggggagaatcagcacgatcctggctctgagcaccgccttccagggcccacaggagtacgagagggcctccaaagtggaccagtttgtgacgcgcttcctgctgcgggagacggtgagccagctgcaagcccttcagagctcgctggagggggcgtcagataccctggaggcccaggcccatggctggcggtcagatgcagagagcgtggaggcgcagagcaggctctgcggcagccggcgggcaggacgccgagccctgaggagtgtcagccggtcatccacctggtcccccggctcttctgacacagggcgcagctcagaggccgagatgcagtggcggctccaggtgaaccgcctccaggagctcatcgaccagctcgagtgcaagcacatcctcatggcccagaggcaggtccaggtggcagaggaaggcctgcaggacttccaccgagccctgcgctgctatgtggacttcacaggggcccagagccattgtctgcatgtgtccgcccagaagatgctggacggtgcctccttcaccctgtatgagttctggcaggatgaggcctcctggagaaggcaacagcagtcgcctggcagcaaggccttccagcgcatcctcatcgaccacctgcgggccccggacaacctcaccactgtgttcttcccagcctccttggtggataatgaataacaactgagccagacctgcacacgcccgagggccccggggaccctgcctgcctcccctctgggagccttcctggactggccaagcccagcggcaaaaaccaaggggcttggcctccttcctggaacttgggggccctggtgggaaagggctctcccgccccacgggaattcggggaacctgggcc

SEQ ID NO: 355319 - DNA, 575 bp, Homo Sapiens
agcggggcgccggcgccaaggggcggcctctagccacaccgagtccgccgcggcgtccaggtcggcagcaaccgcagccgagcccgagcgggtggcggcgccatggcgtgcgcggggctgctcaccgtgtgcctgctccggccgcccgcggccccagcctgcagcccctagtacgccgcggtacccccagctcgcgcccgacacggggcccgcccggacacacgcttcttccaggacgtgaccgcagagcgacccgaatgatgcatgggagagctctcattctgaggaactcccagcaatcaccttgtgccgcatcggggtcctcagacctgggcggacgcctgccccgaaactgttcagccgcgcggttgatggcgcatctcgaacgacaattttccggaacaccagaaaagctgttgtgactacttctcagtaccgcctgggtgtctacccggccggtgctggctgcgttggagatcgctgacgcccgttgcacgtgctcgctgccactggatgccaccacagctggcagtacgagagggcctccaaagtggaccagtttgtgacgcgcttcc

SEQ ID NO: 355320 - DNA, 2136 bp, Homo Sapiens
  misc_feature (1553)..(1731): n is a, c, g, or t
  misc_feature (1740)..(1753): n is a, c, g, or t
  misc_feature (1793)..(1948): n is a, c, g, or t
  misc_feature (1972)..(1989): n is a, c, g, or t
  misc_feature (2036)..(2044): n is a, c, g, or t
cctgggttggtcccgaagcctccaaccacctgcacgcctgccagggcctctctggggcagccatgaagtccctcgtcctgctcctttgtcttgctcagctctggggctgccactcagccccacatggcccagggctgatttatagacaaccgaactgcgatgatccagaaactgaggaagcagctctggtggctatagactacatcaatcaaaaccttccttggggatacaaacacaccttgaaccagattgatgaagtaaaggtgtggcctcagcagccctccggagagctgtttgagattgaaatagacaccctggaaaccacctgccatgtgctggaccccacccctgtggcaagatgcagcgtgaggcagctgaaggagcatgctgtcgaaggagactgtgatttccagctgttgaaactagatggcaagttttccgtggtatacgcaaaatgtgattccagtccagactcagccgaggacgtgcgcaaggtgtgccaagactgccccctgctggccccgctgaacgacaccagggtggtgcacgccgcgaaagctgccctggccgccttcaacgctcagaacaacggctccaattttcagctggaggaaatttcccgggctcagcttgtgcccctcccaccttctacctatgtggagtttacagtgtctggcactgactgtgttgctaaagaggccacagaggcagccaagtgtaacctgctggcagaaaagcaatatggcttttgtaaggcaacactcagtgagaagcttggtggggcagaggttgcagtgacctgcacggtgttccaaacacagcccgtgacctcacagccccaaccagaaggtgccaatgaagcagtccccacccccgtggtggacccagatgcacctccgtcccctccacttggcgcacctggactccctccagctggctcacccccagactcccatgtgttactggcagctcctccaggacaccagttgcaccgggcgcactacgacctgcgccacaccttcatgggtgtggtctcattggggtcaccctcaggagaagtgtcgcacccccggaaaacacgcacagtggtgcagcctagtgttggtgctgctgctgggccagtggttcctccatgtccggggaggatcagacacttcaaggtctaggctagacatggcagagatgaggaggtttggcacagaaaacatagccaccattttgtccaagcctgggcatgggtggggggccttgtctgctggccacgcaagtgtcacatgcgatctacattaatatcaagtcttgactccctacttcccgtcattcctcacaggacagaagcagagtgggtggtggttatgtttgacagaaggcattaggttgacaacttgtcatgattttgacggtaagccaccatgattgtgttctctgcctctggttgaccttacaaaaaccattggaactgtgactttgaaaggtgctcttgctaagcttatatgtgcctgttaatgaaagtgcctgaaagaccttccttaataaagaaggttctaagctgnnnnnnnnnnnnnnnnnnnnnnnnnnnnnnnnnnnnnnnnnnnnnnnnnnnnnnnnnnnnnnnnnnnnnnnnnnnnnnnnnnnnnnnnnnnnnnnnnnnnnnnnnnnnnnnnnnnnnnnnnnnnnnnnnnnnnnnnnnnnnnnnnnnnnnnnnnnnnnnnnnnnnnnnnnnnnnnnnnnttttggggnnnnnnnnnnnnnnaaaaaaatttttaaaaccttttttgggggggggggccccnnnnnnnnnnnnnnnnnnnnnnnnnnnnnnnnnnnnnnnnnnnnnnnnnnnnnnnnnnnnnnnnnnnnnnnnnnnnnnnnnnnnnnnnnnnnnnnnnnnnnnnnnnnnnnnnnnnnnnnnnnnnnnnnnnnnnnnnnnnnnnnnnnnnnnnnnnnnccccaggcgttttttatttaattnnnnnnnnnnnnnnnnnnattagaggggaggggggaatttttttaacctttcccgccgaggggannnnnnnnnaacgggggtgtgaatcctttattccccggggggacacccccccttggcccgcggggagaaaaatttttccccccgtggaaaaaacggggggg

SEQ ID NO: 355321 - DNA, 1054 bp, Homo Sapiens
cgaccgccatgtacttggagcactatctggacagtatcgagaaccttccctgcgaacttcagaggaacttccagctgatgcgagagctggaccagaggacggaagataagaaagcagagattgacatcctggctgcagagtacatctccacggtgaagacgctgtctccagaccagcgcgtggagcgcctgcagaagatccagaacgcctacagcaagtgcaaggaatacagtgacgacaaagtgcagctggccatgcagacctacgagatggtggataaacacattcgaaggcttgatgcagacctggcgcgctttgaagcagatctgaaggacaagatggagggcagtgattttgaaagctccggagggcgagggttaaaaaaaggctggggtcagaaagaaaaaagagggtcccggggccgaggcaggaggacatcagaggaagacacaccaaagaaaaagaagcacaaaggagggtctgagttcactgacaccatcctgtccgtgcacccctctgatgtgctggacatgcccgtggacccaaacgaacccacgtactgcctgtgccaccaggtctcctatggggagatgattggctgtgacaatccagactgtccaattgagtggtttcactttgcctgcgtggaccttaccacgaaacccaaaggaaaatggttctgtccacggtgtgtccaggaaaagaggaagaagaagtaggaggagctgtgtgcccggatccgaggagcaagttaatctgtcccttcattcgtgtcgcaatatttcccttccttttaaaactaccttgttcggttgatacttagtaactccgtggccagttgaagcgctggatgtttcctagaacaagaaccaccaaagcctgttcgcacagaagggcgaccttgcagggactcgccgccgcgacctcagtgtggcttttacaggactccccccgagcatcagcagggaccccggcggacgtgggcgggcgcgcgtgagctcgggctgcccggccgggcgtgcgggcggggacatggtaacctggtccacggagg

SEQ ID NO: 355322 - DNA, 1871 bp, Homo Sapiens
cttattttatataacaatatatcactaatcataacatgatccaaaaatactgatataccatctttacattatctaataaaaagatttacaacattatctttcctttacaaagggaacatagataataattccttgaaaataaaaatgtaacattcatgttaaagcggcatcatcgttgtgcatgaaacgtggttaaaggtggacaccacaaaagacatacagaggaagaaagaaactccaacacaatctctcctgaatgggaacattttcttacacttcccctggcttaaaattcctctcagcacaagtattgaaggccaatcactgctcactaaaaattgagaaaaaccttaagtcttcaatgcccataattaacatccctcacggttttactctaaaccatgaagacctaacctaggacagggcagaccctcggctctggggtcatgtgggaagctgctctgggccagcgtcattgctcaaagcagccccagccagggctcccaacgacaggacaggaggccaagtccggcagggctgctggacaccagacaagctggccggtgtccccatcagtcccagcaaaccctcccaccgccaccagtctgcacagctgcttctcgctgctccaggcagactggaaaacacccacgccacaaagccctggccaacagtgagacgggcggtcagctgctgctcaggcagccacgtaggcctccgcacggcgtccctggccaacagtggtctcatgtccacccgcccaggggtcccgtccagcaggagacgggtagtcagctgctgctcaggaggccacgcaggcctccgctcggcatccatgtccccagcagcagcacctagggcacattcgcagatgcagagggctcggtttcaccagctcctgttttcactgcagcctgccttcccctacaggatttcctcagatcactgactgataccgcagcactgaaaacaaggaaaatgggcagaacgctccttcccatcgaggtcaatcgcacagccacagaggacccacaccttcggctcagatgaagctgccacagtgacccactggttccagcccacacaccctcaatccaagagatgggtctggggccgggcagctgtggaggggggtctggtccgagaccaaatccttgaatcacccccagggagaaggcggccaggccttctggagcaaggcgtggatggtgcaaatggggtggcttctgtgtccctgcaggggcggggccaggccaggggccatgacctttctttttctggccaaacggccactcctgagtgtgtctctcccacgggtagacagcgtcagccacagagcactcaggattcagttggggtccaaactacagcccaaggaattggctcattctgctcatgttttctatggttcttccaaaactctatgcatattaatttggtgatattattgtaagtggcaaaagtaaacattaaaaacactaagcacagaaacttgaaaagaaaaggtcaaaattcaatacctgggatggtgcacagtggcaggcaggaccacatcatcacgtgtcagacaaaagcgtcccacagggaagccagtcatctttccccaaaaagcagcgagacctcaggaagccgggcagccaaaagcatcaacaaccccagcgctttccaggggtagccacaggtgtgaacagctcaaaggtggagcgcaatatcaaattcatttctgaaaaattgccaggcgctgtttcagcacaaactccctgcacttacctatccctcttcccaaaaatggtaaaagagagaaaaacattttccacaatttatcctccacgatcaataaacatctgtgttggccgggtgcggtggctcat

SEQ ID NO: 355323 - DNA, 1467 bp, Homo Sapiens
cgctttccaggggtagccacaggtgtgaacagctcaaaggtggagcgcaatatcaaattcatttccatttccagtttcacagccgtggcggagggtgtgaagcactgtagcctgccctctctggcgctttcccttctaagccgcaggaaggcaccgcttggagggagccccttcaggcccagacactggcagggacgagcagcagcagtggccgaccgcccgcctgcacctgcctggcacctgcgcccggaggatccactcccacccacaccctcggaaaaggacaggtggcccagaggcatccgtgtgttcaagaaccgcagaacatgaatgtggacaccatcccaaccaggactgttcagggtgttcttgttctcttgttctcactcactgactaccagcttctcgacggggagggccccgtctgagacacagagcttcacacgttccttctgctttatttcctgctccctagtgaaacattaaacacaggaggaaaagatacagatgtagccatcagaaggaagtgaggctgtcattccaaatggccccccaccatgaagaaacccaggcttcttaaatcaggaacctcacgtctcagttttccctcaggtttctttctgtggtgtgaggacagaaacaggcgtccctgcattcctcaggaatcctctccttcctctaaaggcacgggagaggatttccgagcgcctgcgatgctgtggggaaccgcaggctgggcaccgtcaccaacgcgtcacaacagagcaaatctgcatagccttccccaactaccaccgaaaggatggctctggctcagcttggtgaacgctcattaaacaaaaagcacactcgagtttcctagcttcattccagaactgctattgtggcacaacaaattcacaacaaattcacatcggagtcccctcgaccgggagctgcgggcccgggaatgcacagcacaggcagaagcattcgtggttcgtcagctcctggcagacgggactcacttcacggacacacagacccacgatcttcatgctattagggtaatttcatcttcacagtaaaaaatcaccaattcccagagaaacggagcatcagcccagctgtcgcacagggtctcgcgggtgctggtcacgggacctgcggccactccaagctaatgaagagccgtttactccggaggtgaggtccccgagggaggactgaaagtccaagctaaaaaggcggcgccagcgaagcggaggccgcttcctccagggaagagcccccagccctcccgggcccatccgaggcgccccacgcgggagcgcacggtggccggaggcggcgcggagccgagtgtgaggagggcagccgccgccacggcagtggccccacgcgcgcctcggtggcaggtgctccagcgggcggggcacgcggagcccgggctgtaccggacagtcctggaaaaccacaggaaagcta

SEQ ID NO: 355324 - DNA, 659 bp, Homo Sapiens
  misc_feature (144)..(144): n is a, c, g, or t
atggcgacgccatgtactttggagcactatctggacagtatcgagaacctcctttgcgaacttcagaggaacttcaggctgatgcgagagctggaccagaggacggaagataagaaagcagagattgacatctggctgcagagntacatctccacggtgaagacgctgtctccagaccagcgcgtggagcgcctgcagaagatccagagccgagggtctgccctgtcctaggttaggtcttcatggtttagagtaaaaccgtgagggatgttaattatgggcattgaagacttaaggttttcctaaatttttagtgagccagtgattggccttcaatacttgtgctgagaggaattttaagccaggggaagtgtaagaaaatgttcccattcaggagagattgtgttggagtttctttcttcctctgtatgtattttgtggtgtccacctttaaccacgtttcatccaaaacgatgatgcagctttaacatgaatgttacatttttattttcaaggaattattatctatgttccctttgtaaaggaaagataatgttgtaaatctttttattagataatgtaaagatgtatatcagtatttttggatcatgttatagattatggatatattgtttaataaataaagtattttttggaac

SEQ ID NO: 355325 - DNA, 1592 bp, Homo Sapiens
  misc_feature (1337)..(1337): n is a, c, g, or t
  misc_feature (1464)..(1464): n is a, c, g, or t
  misc_feature (1470)..(1470): n is a, c, g, or t
  misc_feature (1478)..(1478): n is a, c, g, or t
  misc_feature (1495)..(1495): n is a, c, g, or t
  misc_feature (1561)..(1561): n is a, c, g, or t
gcactgagggcggcctggtcgtcgtctgcagcggcggcggcggctgaggagcccggctgaggcgccagtacccggcccggtccgcatttcgccttccggcttcggtttccctcggcccagcacgccccggccccgccccagccctcctgatccctcgcagcccggctccggccgcccgcctctgccgccgcaatgatgatgatggcgctgagcaagaccttcgggcagaagcccgtgaagttccagctggaggacgacggcgagttctacatgatcggctccgaggtgggaaactacctccgtatgttccgaggttctctgtacaagagatacccctcactctggaggcgactagccactgtggaagagaggaagaaaatagttgcatcgtcacatggtaaaaaaacaaaacctaacactaaggatcacggatacacgactctagccaccagtgtgaccctgttaaaagcctcggaagtggaagagattctggatggcaacgatgagaagtacaaggctgtgtccatcagcacagagccccccacctacctcagggaacagaaggccaagaggaacagccagtgggtacccaccctgcccaacagctcccaccacttagatgccgtgccatgctccacaaccatcaacaggaaccgcatgggccgagacaagaagagaaccttccccctttgctttgatgaccatgacccagctgtgatccatgagaacgcatctcagcccgaggtgctggtccccatccggctggacatggagatcgatgggcagaagctgcgagacgccttcacctggaacatgaatgagaagttgatgacgcctgagatgttttcagaaatcctctgtgacgatctggatttgaacccgctgacgtttgtgccagccatcgcctctgccatcagacagcagatcgagtcctaccccacggacagcatcctggaggaccagtcagaccagcgcgtcatcatcaagctgaacatccatgtgggaaacatttccctggtggaccagtttgagtgggacatgtcagagaaggagaactcaccagagaagtttgccctgaagctgtgctcggagctggggttgggcggagagtttgtcaccaccatcgcatacagcatccggggacagctgagctggcatcagaagacctacgccttcagcgagaaccctctgcccacagtggagattgccatccggaacacgggcgatgcggaccagtggtgcccactgctggagactctgacagacgctgagatggagaagaagatccgcgaccaggacaggaacacgaggcggatgatgcgtcttgccaacacggncccggcctggtaccagcccatagcacacggctcccacggagcatctcagtagaatgggccccgctctctccatcttctggcatggacagatgcgaggggacagcccagtcgcatcctgaggatcggntagggntggaatgngggggcttccagttggncccttcccggccacattcattgtgttgaggccaagttcttggcccaaaacaacctttcctaccctnccagtgtttgggagaaggaggaacccttatt

SEQ ID NO: 355326 - DNA, 1673 bp, Homo Sapiens
  misc_feature (1532)..(1532): n is a, c, g, or t
  misc_feature (1554)..(1595): n is a, c, g, or t
  misc_feature (1611)..(1611): n is a, c, g, or t
  misc_feature (1616)..(1616): n is a, c, g, or t
  misc_feature (1624)..(1624): n is a, c, g, or t
  misc_feature (1654)..(1654): n is a, c, g, or t
atcaggccaaatcggccgagctcgaattcgtcgagagcggaacgccagcgcctgcgcactgagggcggcctggtcgtcgtctgcggcggcggcggcggctgaggagcccggctgaggcgccagtacccggcccggtccgcatttcgccttccggcttcggtttccctcggcccagcacgccccggccccgccccagccctcctgatccctcgcagcccggctccggccgcccgcctctgccgccgcaatgatgatgatggcgctgagcaagaccttcgggcagaagcccgtgaagttccagctggaggacgacggcgagttctacatgatcggctccgaggtgggaaactacctccgtatgttccgaggttctctgtacaagagatacccctcactctggaggcgactagccactgtggaagagaggaagaaaatagttgcatcgtcacatgatcacggatacacgactctagccaccagtgtgaccctgttaaaagcctcggaagtggaagagattctggatggcaacgatgagaagtacaacggctgtgtccatcagcacagagccccccacctacctcagggaacagaaggccaagaggaacagccagtgggtacccaccctgcccaacagctcccaccacttagatgccgtgccatgctccacaagcatcaacaggaaccgcatgggccgagacaagaagagaaccttccccctttgctttgatgaccatgacccagctgtgatccatgagaacgcatctcagcccgaggtgctggtccccatccggctggacatggagatcgatgggcagaagctgcgagacgccttcacctggaacatgaatgagaagttgatgacgcctgagatgttttcagaaatcctctgtgacgatctggatttgaacccgctgacgtttgtgccagccatcgcctctgccatcagacagcagatcgagtcctaccccacggacagcatcctggaggaccagtcagaccagcgcgtcatcatcaagctgaacatccatgtgggaaacatttccctggtggaccagtttgagtgggacatgtcagagaaggagaactcaccagagaagtttgccctgaagctgtgctcggagctggggttgggcggggagtttgtcaccaccatcgcatacagcatccggggacagctgagctggcatcagaagacctacgccttcagcgagaaccctctgcccacagtggagattgccatccggaacacgggcgatgcggaccagtggtgcccactgctggagactctgacagacgctgagatggagaagaagatccgcgaccaggacaggaacacgaggcggatgaggcgtcttgccaacacggccccggcctggtaaccagcccatcagcacacggctcccacggagcatctcagaagattgggccgcctctcctccatcttctggcaaggacagaggcgaggggacagcccagcgccatcctgaggatcgggtgggggtggagtgggcgcttccaggtggcccttcccngcacacattccatttgttgagnnnnnnnnnnnnnnnnnnnnnnnnnnnnnnnnnnnnnnnnnngtctctgggcccaggnagaanccctattntaggttgtgttttgtttttgtataggagcncccaggcagggctagtaac

SEQ ID NO: 355327 - DNA, 959 bp, Homo Sapiens
  misc_feature (489)..(541): n is a, c, g, or t
ccggggtcagcaccgcggagacccccctcgcccggccccgcgacagcctccgagcgcccccggatcatggccaccgatggtccacaatctgcaggagctccggcgaagtgcctcactggccaccaaggtctttatccagagagactacagcgatgggaccatctgtcagttccagaccaaattccccccagagctggacagccggatcgagcggcagctctttgaagagactgtgaagaccctcaacggattttacgcagaggctgagaagattgggggcagctcctacctcgagggctgcctggcctgcgccacggcctacttcatcttcctctgcatggagacccactatgagaaggttctcaagaagatttcccgctacatccaggagcagaatgagaagatctttgcacctcgaggcctcctacttacagaccctgtggagcgtgggatgagggttattgagatctccatctacgaggaccggtnnnnnnnnnnnnnnnnnnnnnnnnnnnnnnnnnnnnnnnnnnnnnnnnnnnnnggtgggggtggtggggcgggggcccggtgactggccgagagtccctgtagggaggtgtatggccggagtgagggccttgcagacctgcggcggctgcgctaccagagcacccgcttctgagtcattctttgggctcaccctgctgcccggggtgggagcggaggtgacgggcctcatatttcctgtgggcccatcacctatgcccctgtccttaacccccgctggatccggtccacttttcctgaacctggggggcttattcacttcccgaatgtgggcctgggtcatgtgccacacagagacacgagatttccttagaaagggctggggtgtgggcgagaaacaacctattgggggcacccttatttatcacgcgcctttccaaacccgtgaagggggcagagcatacaccatatag

SEQ ID NO: 355328 - DNA, 663 bp, Homo Sapiens
cagatgtcccatcgctgtagtctctctggataagacccttggtggccagtgaggcacttcgccggagctcctgcagattgtggacctcggtggccatgatccgggggcgctcggaggctgtcgcggggccttgtacgcgtacaaggccccgccccagccctcctgatccctcgcagcccggctcctggccgcccgcctctgccgccgcaatgatgatgatggcgctgagcaagaccttcgggcagaagcccgtgaagttccagctggaggacgacggcgagttctacatgatcggctccgaggtgggaaactacctccgtatgttccgaggttctctgtacaagagatacccctcactctggaggcgactagccactgtggaagagaggaagaaaatagttgcatcgtcacatgatcacggatacacgactctagccaccagtgtgaccctgttaaaagcctcggaagtggaagagattctggatggcaacgatgagaagtacaaggctgtgtccatcagcacagagccccccacctacctcagggaacagaaggccaagaggaacagccagtgggtacccaccctgcccaacagctcccaccacttagatgccgtgccatgctccacaaccatcaacaggaaccgcggggccttgtacgggg

SEQ ID NO: 355329 - DNA, 1308 bp, Homo Sapiens
  misc_feature (555)..(555): n is a, c, g, or t
  misc_feature (640)..(640): n is a, c, g, or t
  misc_feature (648)..(648): n is a, c, g, or t
  misc_feature (655)..(655): n is a, c, g, or t
  misc_feature (706)..(706): n is a, c, g, or t
  misc_feature (709)..(709): n is a, c, g, or t
  misc_feature (957)..(957): n is a, c, g, or t
  misc_feature (1021)..(1021): n is a, c, g, or t
  misc_feature (1085)..(1115): n is a, c, g, or t
  misc_feature (1146)..(1187): n is a, c, g, or t
ctagggtaaaatcccgtctctctgccagggagaacagaccataaaaataagtaaataatatatgtgaaggtggtaggtgctaaaaaaggaagaagatggaacatgctggcaagaggcaggctgggggaggttttcagcaactttaaggtggtcagaaaaggttctctccctatggtgacacttgagctaacactcgaaagaaggtggggggacgagacatggatgatgaagaaagagcactctaggcaatggggaatacaaatgacagggctctgagctggcagcatctccagcatgttctagaaatagcaaggtcagtgctgctggagcagactgagtgaggtggagaacgcatctcagcccgaggtgctggtccccatccggctggacatggagatcgatgggcagaagctgcgagacgccttcacctggaacatgaatgagaagttgatgacgcctgagatgttttcagaaatcctctgtgacgatctggatttgaacccgctgacgtttgtgccagccatcgcctctgccatcagacagcagatcgagtcntaccccacggacagcatcctggaggaccagtcagaccagcgcgtcatcatcaagctgaacatccatgtgggaaacatttccctgntggaccantttgagngggacatgtcagagaaggagaactcaccagagaagtttgccctgaagctgngcncggagctggggttgggcggggagtttgccaccaccatcgcatacagcatccggggacagcggagcgggcaccagaagacctacgccttcagcgagaaccctccgcccacagtggagattgccacccggaacacgggcgatgcggaccagggtgcccactgctggagactctgacagacgctgagagggagaagaagacccgcgaccaggacaggaacacgaggcggaagaggcggcttgccaacacgnccccggcctggtaaccagcccatcagcacacggcccccacggagcatctcagaagattgggccncctcccccccatcttctggcaaggacagaggcgaggggacagcccagcgccaccctgaggagcnnnnnnnnnnnnnnnnnnnnnnnnnnnnnnnccctccccggcacacattccatttgttgagnnnnnnnnnnnnnnnnnnnnnnnnnnnnnnnnnnnnnnnnnngtctctggggtcaggaagaaaccttattttaggttgtgttttgtttttgtataggagccccaggcagggctagtaacagtttttaaataaaaggcaacaggtcatgttcaatttcttcaac

SEQ ID NO: 355330 - DNA, 589 bp, Homo Sapiens
tgcaggagagagaactgaatggtggatggtgggggcaggccagggctccgtggaggcaacgacttgaggttcaccctgacagaactccaagtctttgccagctatatgtgttaggtgcttctaaaccttaactggcacagcggagccctggagagatacatagggcaggaggaggacggagcaaacacacagaacccagccagattgtgctgcgaagcgtgagaaagcctcaaaggtatcaccgctcacacagagaagtctttctcaaaacagttttgcaggggagaatgagggagggagagactcatgcatgatcctacctgaaggcgtaggtcttctgatgccagctcagctgtccccggatgctgtatgcgatggtggtgacaaactccccgcccaaacccagctccgagcacagcttcagggcaaacttctctggtgagttctccttctctgacatgtcccactcaaactggtccaccagggaaatgtttcccacatggatgttcagctgaggcaacaaacaaaggacacaagttagagcttttgcgagccaggaaggacgcgaagagcggggcctgccagggct

SEQ ID NO: 355331 - DNA, 1081 bp, Homo Sapiens
  misc_feature (772)..(772): n is a, c, g, or t
  misc_feature (886)..(886): n is a, c, g, or t
  misc_feature (953)..(961): n is a, c, g, or t
agcgggagaagtggatgatggcactagtgaagaagaaaatgaatctgattccagttcatgcaggacttccaatagtagtcagacattatcatcctgtcatactatggagccatgtacatcagatgaatttttccaagcccttaatcatgccgagcaaacatttaaaaaaatggaaaactatttgagacataaacagttgtgtgatgtaattttagtcgctggtgatcgcagaattccagctcacagattggtgctctcctctgtctcagactattttgctgccatgtttactaatgatgtcagagaggcaagacaagaagaaataaaaatggaaggtgtagaaccaaattcgttgtggtccttgatccagtatgcttatacaggccgccttgaattaaaagaagataatattgagtgcctgttatctacagcttgccttcttcagctttcacaggttgtagaagcatgctgtaagtttttaatgaaacagcttcatccatccaactgtcttggaattcgttcttttgctgatgcccaaggttgtacagatttgcataaagtggctcacaattatactatggagcatttcatggaagtaatcagaaaccaggaattggtattattaccagccagcgaaaatgcaaagctcttggctagttgatgacatgaacattcctaatgaggagacaatattgaatgcacttcttacttgggtccgtcatgatttggaacagagacggaaagatctaagtaaacttttggcttatattangctacctcttcttgaccacagttcctggcagactggaaaataatgtactttttcgggatgaattagaatgtcagaaactcattatggaagcaatgaagtaccatttatttaccnagagacgaaccatgttacaaagtcctcggacaaacctaaggagtgaactggtggtcattaatttgcnnnnnnnnnaaaggtttcacacaggagccccagcttggaaagttgatctccgccaatattgggactccgtgcatataatgggagagggtcccttggggttgagggcttaagacaaccattggttggggg

SEQ ID NO: 355332 - DNA, 2016 bp, Homo Sapiens
agcgggctggcagcaggcagcaggcagcaggcgggcgcgctgtggctccgcgccgcgcggtccgggctctgttcattcatgattggtactcggccctccgagacccagcccgagcgcagggaggggagccgagtgtgcggcaggaggggcgggcggacggcggctcccgcaccgcacgcggcgctggctcggcagcctcggccgggcgggcgctctggccccgtgtccagtgccaggcaggcttcagggcaccgtcctcggccctgggcgagggaaccgccgggccgggtcctcgcgcggggaagcggttccgaaggctcgcggggagcggctagccctgagtccctgcatgtgcggggctgaagaaggaagccagaagcctcctagcctcgcctccacgcttgctgaataccaagctgcaggcgagctgccgggcgcttttctctcctccaattcagagtagacaaaccacggggatttctttccagggtaggggaggggccgggcccggggtcccaactcgcactcaagtcttcgctgccatgggggccgtcatgggcaccttctcatctctgcaaaccaaacaaaggcgaccctcgaaagataagattgaagatgagctggagatgaccatggtttgccatcggcccgagggactggagcagctcgaggcccagaccaacttcaccaagagggagctgcaggtcctttatcgaggcttcaaaaatgagtgccccagtggtgtggtcaacgaagacacattcaagcagatctatgctcagtttttccctcatggagatgccagcacgtatgcccattacctcttcaatgccttcgacaccactcagacaggctccgtgaagttcgaggactttgtaaccgctctgtcgattttattgagaggaactgtccacgagaaactaaggtggacatttaatttgtatgacatcaacaaggacggatacataaacaaagaggagatgatggacattgtcaaagccatctatgacatgatggggaaatacacatatcctgtgctcaaagaggacactccaaggcagcatgtggacgtcttcttccagaaaatggacaaaaataaagatggcatcgtaactttagatgaatttcttgaatcatgtcaggaggacgacaacatcatgaggtctctccagctgtttcaaaatgtcatgtaactggtgacactcagccattcagctctcagagacattgtactaaacaaccaccttaacaccctgatctgcccttgttctgattttacacaccaactcttgggacagaaacaccttttacactttggaagaattctctgctgaagactttctatggaacccagcatcatgtggctcagtctctgattgccaactcttcctctttcttcttcttgagagagacaagatgaaatttgagtttgttttggaagcatgctcatctcctcacactgctgccctatggaagttccctctgcttaagcttaaacagtagtgcacaaaatatgctgcttacgtgcccccagcccactgcctccaagtcaggcagaccttggtgaatctggaagcaagaggacctgagccagatgcacaccatctctgatggcctcccaaaccaatgtgcctgtttctcttcctttggtgggaagaatgagagttatccagaacaattaggatctgtcatgaccagattgggagagccagcacctaacatatgtgggataggactgaattattaagcatgacattgtctgatgacccaaactgcccatgtcatttgtttccagaaacgaggaccaataattctctcacactggcatttgtgctggtagtacaagtcctttaatatgtccaggaagggagccattgcccagtggtccatatctccaccacatcccctgcttgagcccagcactgcatgtccctcccaagaagtccagaatgcctgcaaattgctgtaattttataccatgttccaaccaataaacagaactatttcttaaaaaaa

SEQ ID NO: 355333 - DNA, 941 bp, Homo Sapiens
  misc_feature (397)..(397): n is a, c, g, or t
gctcccacgtctatgttcacatttgtggtcctggtcatcaccatcgtcatctgtctctgccacgtctgctttggacacttcaaatacctcagtgcccacaactacaagattgagcacacggagacagatactgtggaccccagaagcaatggacggccccccactgctgctgctgtccccaaatctgcgaaatacatcgctcaggtgctgcaggactcagaggtggacggggatggggatggggctcctgggagctcaggggatgagcccccatcatcctcatcccaagatgaggagttgctgatgccacccgacgccctcacggacacagacttccagtcttgcgaggacagcctcatagagaatgagattcaccagtaaggggaggggaggggcncctggaggccacatcctgccccaccccacccccactcccacggacactaaaacgctaataatttattagatctaaagccccttcctccccagcccctgctttcattaaggtatttaaacttgggggtttcactgctctccccccatgatggagggagggagccccccaacctcagtgaggagagccccgagccggccccggggcaaagaggggtgcagagggagttcccccagatcagtaccccccacccctccccagctagtagcatgaccaggagagggttaatgagagccaagaggagtacctggtgcacctggtgccggtggctggagacctggggggcaggtggatctggggctgttcccccccctccgttttttccaccccacagttcctcctgggatctggccctccagggaagtggagcctccagcccctaggggatgcatgaggggggagggggtgctgagtgggaggaagagtcaggctcacagctggggtggcctgggggtgggggtgggcaaggctgacactggaaaatggg

SEQ ID NO: 355334 - DNA, 955 bp, Homo Sapiens
ggggtcgagccaggacggtgacagcgtttaacaaagcttagagaaacctccaggagactgctatcatggcagagaagcccaagctccactacttcaatgcacggggcagaatggagtccacccggtggctcctggctgcagctggagtagagtttgaagagaaatttataaaatctgcagaagatttggacaagttaagaaatgatggatatttgatgttccagcaagtgccaatggttgagattgatgggatgaagctggtgcagaccagagccattctcaactacattgccagcaaatacaacctctatgggaaagacataaaggagagagccctgattgatatgtatatagaaggtatagcagatttgggtgaaatgatcctccttctgcccgtatgtccacctgaggaaaaagatgccaagcttgccttgatcaaggagaaaataaaaaatcgctacttccctgcctttgaaaaagtcttaaagagccatggacaagactaccttgttggcaacaagctgagccgggctgacattcatctggtggaacttctctactacgtcgaggagcttgactccagtcttatctccagcttccctctgctgaaggccctgaaaaccagaatcagcaacctgcccacagtgaagaagtttctacagcctggcagcccaaggaagcctcccatggatgagaaatctttagaagaagcaaggaagattttcaggttttaataacgcagtcatggaggccaagaacttgcaataccaatgttctaaagttttgcaacaataaagtactttacctaagtgtcgattgtgcctgttgtgaagctaatgaactctttcacattatatgctaattacatatacaatcccaattcgtgaacttagttaacatttgatttgctccttaaggatcggatgtgattccgattccattcttttctagccag

SEQ ID NO: 355335 - DNA, 1386 bp, Homo Sapiens
  misc_feature (447)..(520): n is a, c, g, or t
  misc_feature (523)..(553): n is a, c, g, or t
  misc_feature (718)..(778): n is a, c, g, or t
  misc_feature (811)..(871): n is a, c, g, or t
  misc_feature (1091)..(1120): n is a, c, g, or t
  misc_feature (1163)..(1277): n is a, c, g, or t
catattcattgctcatgaaaactgtacttcataaatattttttcttgaattttaaaactttacagtaaatttaggacccgaagacaccaaatatagacactgcttggggaggaagcctagtatgatgaggttaactgtgggcaatttcatttcctaccctaggtgccttggatagcattaccaagtatttccagatgtctcttgaggcagaggagagggtgaatgcctccaccacagaacccaacagcactgtggagcagtcagccctcatgagagacagagtagaagacgtgatgatggagcgagaatcccagttcaaggaaaaacaagaggagcaggctcgcctccttgatgaactggcaggcaagctacaaagcctagacctttcagccgctgccgaaatggtaaggtttggggatgtggccttactgctatggtgcaaagacnnnnnnnnnnnnnnnnnnnnnnnnnnnnnnnnnnnnnnnnnnnnnnnnnnnnnnnnnnnnnnnnnnnnnnnnnnggnnnnnnnnnnnnnnnnnnnnnnnnnnnnnnncgccacaagcagaccagaccaccacaatttattgaaaaaaaggagagcgccaaaaagagagacgacctaatatataaaaacgacggagaggagacgaggaacaaaacaaagacgaaagacaggagaaaaagaagacaagaagagaggcgacatccgagagaagannnnnnnnnnnnnnnnnnnnnnnnnnnnnnnnnnnnnnnnnnnnnnnnnnnnnnnnnnnnnagagagaaataataagaccacaacgacagagannnnnnnnnnnnnnnnnnnnnnnnnnnnnnnnnnnnnnnnnnnnnnnnnnnnnnnnnnnnnataaacgaagacgccgaagaaaagaaaagagcaagagcaccagcaccaggcgcgagatcaaccgatcaaacagcacacaacaaccactatccaccaccagcgggggcgggcctaataaccgaacaagacacaagcaacacgaccgaacaacacaccacgccacaaccccacgccgcaaaaacacaacagaccacaacaacacgaccacaccggaccacgnnnnnnnnnnnnnnnnnnnnnnnnnnnnnngggaagacgagaaggagaggggaaagagaaggaacaggaacgnnnnnnnnnnnnnnnnnnnnnnnnnnnnnnnnnnnnnnnnnnnnnnnnnnnnnnnnnnnnnnnnnnnnnnnnnnnnnnnnnnnnnnnnnnnnnnnnnnnnnnnnnnnnnnnnnnngcgccacagcgaccacacgaggaggcagcgggaggagaaacgacgacaagagacagaggagaaagaaaaaaccaaaacaaagaccggccaacacggccaaagcggcgaa

SEQ ID NO: 355336 - DNA, 1457 bp, Homo Sapiens
gctggaccggtccggattctcgggatcgcgagccccgcagcagagccactgaaaaacattgggaatctctttgaggaagcagagaaactgattaaagatgttacagaaatgatggctcaagtagaagtgaaattatctgacacaacttcccaaagcaacagcacagccaaagaactggattctctacagacagaagccgaaagcctagacaacactgtgaaagaacttgctgaacaactggaatttatcaaaaactcagatattcggggtgccttggatagcattaccaagtatttccagatgtctcttgaggcagaggagagggtgaatgcctccaccacagaacccaacagcactgtggagcagtcagccctcatgagagacagagtagaagacgtgatgatggagcgagaatcccagttcaaggaaaaacaagaggagcaggctcgcctccttgatgaactggcaggcaagctacaaagcctagacctttcagccgctgccgaaatgacctgtggaacacccccaggggcctcctgttccgagactgaatgtggcgggccaaactgcagaactgacgaaggagagaggaagtgtggggggcctggctgtggtggtctggttactgttgcacacaacgcctggcagaaagccatggacttggaccaagatgtcctgagtgccctggctgaagtggaacagctctccaagatggtctctgaagcaaaactgagggcagatgaggcaaaacaaagtgctgaagacattctgttgaagacaaatgctaccaaagaaaaaatggacaagagcaatgaggagctgagaaatctaatcaagcaaatcagaaactttttgacccaggatagtgctgatttggacagcattgaagcagttgctaatgaagtattgaaaatggagatgcctagcaccccacagcagttacagaacttgacagaagatatacgtgaacgagttgaaagcctttctcaagtagaggttattcttcagcatagtgctgctgacattgccagagctgagatgttgttagaagaagctaaaagagcaagcaaaagtgcaacagatgttaaagtcactgcagatatggtaaaggaagctctggaaaaagcagaaaaggcccaggtcgcagcagagaaggcaattaaacaagcagatgaagacattcaaggaacccagaacctgttaacttcgattgagtctgaaacagcagcttctgaggaaaccttgttcaacgcgtcccagcgcatcagcgagttagagaggaatgtggaagaacttaagcggaaagctgtccaaaactccggggaggcagaatatattggaaaagtagtatatactgtgaagcaaagtgcagaaaatgttaagaagactttacatggtgaacttgatgaaaagtataaacaagtagaaaattttattggccacaaacccacaccagc

SEQ ID NO: 355337 - DNA, 812 bp, Homo Sapiens
aagcaaaggcggcgtgccgcctggcgccaagtgggttaaccaagttgaagccgcccaagtttttggcgaaaggggccaaaccccgggccacctttaaccggaggcatctctcggggaatgttgaccatggcttgggtaagccagctctccagggctctgggcaaagttccgggatcgcttggggtcaaggcactggggatgggcccccagcacgtcggaaatgaggatttccaccaggcctgggtacagcacgttgtcacagtgcttggtccattggagcacgggctcgaacttggagaggagcaccaggatggctttgggcagtcgcttctcggcctcgtcatgtacagccagcggtggcgcctcactgggctggctgaggttgtacctccagaaggtcttccacagcgtctccaccagggtgaactgcaggttcaccatgacgtcgacaatggcctcacagtgttcccggtacaggacctggaaggctttgatgtccccgggcccgacgccctcaggcagcaccttgccctggaggtcgagctctgtgaagtcagggaggctccgagaggcatccaaaaattgctggtactgctgcacctgggcgctaatgtccgacagccccgtgctcggctgctgccccaccgccacgccgttggtcatgccttccatcttctggatgggcttgagcctctgcttctgcgagaagggctggccccgcatggccatgtgctgctggtcctccatcagccgcagcaggggtgagctggccttgatgcgcaggccatagtagtggtacttggagttgcccc

SEQ ID NO: 355338 - DNA, 1035 bp, Homo Sapiens
ttcacaatttgctgtctccttcttactgtgtattttccagggggccaatttgagttgtggaggaacaatttgggtctcggtgattaatcctttataggatgtgctatggaacaatgagcacccagcatgatcgccatgtgctttgggggtcttctttcagctaatgccttggaggcccagtgaaatgagctgcggctggccacagagatggggctcctcccaggaaccaaggtccaattcccacagctttacgggcctatatgtgtagctgccatctgtacttgtttaggaagacaaaggttggaacagaacctgggacatgaagtccccagttgtaatcaaatccacactggtttctagcgctttcaaaataagtttaaaacaccgaccaatttctttcttagaaattcgtgatacggcacatatttctttaaatgtcctaggaaccccttcttgtctacaggcaatatagagacaagcagaagctatagcatcattagctcttcccttcaggctcttctgttcatatacttgcttgaataaattatttgttcgatcaactatatttcgaggtagattgattctgtctgccatggtagtgatttctttgaatgcattcatcattgcccgatcagaactgctcattgttctccgattctggtacttagaattgccaaattcgtcaaaacttgcagctcctgtgcccttgccaatcatggtagacaaatctccatcactcagaagaggattctgagaatctccaactcgagatggatcttttgttgctttgtcattgctgaaagttcgccattcagatcccacatcaataacccggtcacctacaaccaagccacattcaggacagatcatatcaccggctctgtagtcctccactaaaatcgcatctggatggtttggacatgtgactcttggaagagcatccaaacggctggtagacgccatcttcacggcgactgcggtgcccgcaacaagacacaacagacacaccgaaagcaggaagcgaatgtggcgaag

SEQ ID NO: 355339 - DNA, 1057 bp, Homo Sapiens
  misc_feature (44)..(44): n is a, c, g, or t
  misc_feature (857)..(902): n is a, c, g, or t
ccagggctgggcgctttgcaggggagtcctggcgagtaggtggnccccggatgcggtgccgctggaccagctcatcagcagaggggtcagtccagtagtgatcggctgtcttgagcttagtgtattccaaggcacagggtcccactgtggagacagagacagccagcccagacgatgctccctcagcacctgccccgtacccactgtgcctgtgctctcaggctcacctagaagagaggccaggatcgggccgaacacagggtctgccagcagtgcctccttctcgtagtacttgctgcagttttccgccaggtattgcacgaccttgtccagaactttctcgatgagcgccgtgcgtacccatacgtgtttcaaggcctgagggctgagggccggggccttcccgctggctgagccctgtctgccgcagggccgtcctggctgacccctgagggtttcctcgccctctgcttgttgcttgcagcgtcctgtaccttgtggcaaatctcccccgccactgggcacgtcttccccaccttggtgaacagggctgccatcttgtcactgctgcaggaagccagcggcacaggcgtctcagctgatgcaagaggcaagcctccactgcaccacataaagcaatgatgtggctgctgtcttcatgcacaaacttcctggtgacagcctcctccatgatttgcttcacctccttcttcacgttccacagcagtttctccgcttgactgcgtcctctgcgctgcccatggtgtggcaggaggcggcgccgaacggtcctcagagcccccgcgccctcgccgcctccgcgcctctcggctcagcgccccacgcgcaaggcggannnnnnnnnnnnnnnnnnnnnnnnnnnnnnnnnnnnnnnnnnnnnnagcacactgcccggtgctcaggctccgcagccatctcaccccgctcatcagacgaattcagagctcggccgatttggcctgatccataacttcgctactagatttagttattcgcttataaacactgatacgctgaagttcacaggcgcacagcc

SEQ ID NO: 355340 - DNA, 993 bp, Homo Sapiens
ggggcctgggtggcgaattcggcacgaggctggcagaccctgtgttcggcccgatcctggcctctcttctagtgggaccctgtgccttggaatacactaagctcaagacagccgatcactactggactgacccctctgctgatgagctggtccagcggcaccgcatccggggtccacctactcgccaggactcccctgcaaagcgcccagccctggggatccggaaacggcactcaagcggcagcgcgtcggaggacaggctggctgcctgtgcccgcgagtgtgtggagtccctgcaccagaactcacggacgcggctgctctatggcaagaaccacgtgctggtgcagccgaaggaggatatggaggcggtccctggctacctctccctgcaccagtctgcagagagcctgactctgaagtggacccccaaccagctcatgaatgggactctgggggactccgagctggaaaagagcgtttactgggactatgccctcgtggtgcccttcagccaggtcgtgtgcatccactgccaccagcaaaagagcggtggcacgcttgtgctggtgagccaggatggcatccagaggccgccgctgcatttcccacagggaggacacctgctgtcctttctgtcctggtctggagaatgggctgctgcctcggggacagctagagcccccgctgtggacccagcaaaggaaaggggaaagtgttccccaagctaccgaaacgaagcagcattccctccgtgggaaatggaggagatggggcacggggcgggccacccgactatgtggtcccggatcatctaaccccggccacaggcacgaacacatccactattaacctacccaccccccctagcggcccagcccgcgcgggcctccggtggacccatgattgaggcacaaggagggataaaattggcacgcgcaagcccctcaaaggaactggctccgcggaaaccctccccagttcccaaatccc

SEQ ID NO: 355341 - DNA, 1259 bp, Homo Sapiens
  misc_feature (1109)..(1119): n is a, c, g, or t
  misc_feature (1130)..(1130): n is a, c, g, or t
cccgaagtgagcaggcagcaaaggctgagagtgccagctgcctgggcactgacggaccccacccacggaaacgatgccttatgaggaagctaacccgggccacttaccgacgacctgcgcaggcgtggcttgaggaaacgcccgctgtgggcggagccacccgaaaggctccggtcgggggcggaaacaggatcggcccgcgggctggcgtcgataggctgccgcagagacagggcgggctctgctaagggacgcgcctcgccgtggggcggtgcctgcgcctgagcctctacgagagggaaggaacgctgctccgagctccgcgtcgcgccgcgtagattcgcgccgccgtcgacctcagaagcggggccggaagcgctacggtttgacccccgagtccctctgttcccgaaggggcggccgtctttctcccgacccgctccgcctcctctccttcttccccattacccggaggccgaagcccccagccagggcggggcggcgcagcccgagctcccggacccggaagaagcgccatctcccgcctccaccatggagcccaccgcaccgtccctgaccgaggaggacctcactgaagtgaagaaggacgccttagaaaatttacgtgtatacctgtgtgagaaaatcatagctgagagacattttgatcatctacgtgcaaaaaaaatactcagtagagaacgacacttgaagaaatttcttgtcgaacatcaagtagaaaaagggctggaaaattgttagactacttacaggaaaacccaaaaggtctggacacccttgttgaatctattcggcgagaaaaaacacagaacttcctgatacagaagattacagatgaagtgctgaaacttagaaatataaaactagaacatctgaaaggactaaaatgtagcagttgtgaaccttttccagatggagccacgaacaacctctccagatcaaattcagatgagagtaatttctctggaaaactgagggcattcactgtcatgtacccatccagaagaagaatcagcccgacgccctttttttctactaattctctctgaatttgccctgtctaaaagtggcaaaactggaaaaaacannnnnnnnnnnaaatacacttnccaaaactgggggacccaagggcgcctctcctttggcaccagatctaccagttgaaagaagaagacacctgggccaaactttaagggaatgtttctttccttaagaacccgacctgtttaccgacaaga

SEQ ID NO: 355342 - DNA, 873 bp, Homo Sapiens
  misc_feature (185)..(185): n is a, c, g, or t
  misc_feature (189)..(189): n is a, c, g, or t
  misc_feature (760)..(760): n is a, c, g, or t
  misc_feature (765)..(765): n is a, c, g, or t
  misc_feature (783)..(783): n is a, c, g, or t
ctgtccaattctgacttttgtggttacctcctctggatggttagcaattgctgctgcatgcctgcatgtttgctgaaaaactgaagtgctggctccttggtaaggtttcctctgttcggaaaagctgtccttttccttgtttcagaagctcaacctcattcctgtaggcatcaagctgcaagcgnaganctgtcattctccctccttcagagcgtaggcctggggcacccagggctgattcatcgactctcattttctttgtagggctgtcacagttctcatcatcagacatttccatttcttcttcgcggcggatgcccatgagctgctcactttgagcattccggagctcctcagaaatctttcgccaaatgtctatgttcttgcgctgggctttcgagaaatggtcccaagctttttgtctggtagaagcgttgaaaacggccacaatctgctcaaattgagtgagaatcccagttaaggcatttttaaaattctccttggcttcctccatctcttgcctcatgggtggctttttcattcattagccggcggacgtggctgttggccgactgcaccatggaatagaactggtttgcagagcgccgattcacttcccctcgttcaatccaggaaagcagcactgtgatagcctctgaaaacttgctatcatctttcagcttttcagccagcagagcggcttcgtgctccgagtagtgcattatggcaggcggggatgggggcctgagccggtcctccntccanttgcgccggtgccgctcntcccgggcacgcatcctctgcttgcattcccactcatagaagtcatccctggcctgggcaaagtccacatgaaggcggcctgaatccttt

SEQ ID NO: 355343 - DNA, 818 bp, Homo Sapiens
  misc_feature (71)..(71): n is a, c, g, or t
  misc_feature (85)..(85): n is a, c, g, or t
  misc_feature (108)..(108): n is a, c, g, or t
ccagtaagctctttattcacttcttccagctggtcagctatcttctccacagacttctccaaatgtttcancttctttagttcancctcttcctgtggactgttcttnttcccaattaacatgacccggcaaccatcttgtattccaagtgctgacaacggtgttttccatttccttcagagattttcccttaaatatgagtttctgaaaagactgtggaacccctatgacctcttcaacaacctgggccaggtcttggacaactggttcactgctgccctgctggggaggtaacatgaaggtcgtgcttctcattgcctggcgcccgacactcactgtgggtgacagtcacggtgagcccagctgccgccatttcctccctggtcacctcctcgctccgggtcgactcctcgtcccgggtcacctcctggctccgattcatctcttcgccctgggtcgcctcctcactctgggtcgcctcttcactccaggtcgcttcctcactcagggtcaactcctcgctccgggtcaactcctcgctccgggtcgagcggcgccgggttttcttcttcatccgcggcctgcgagcgccggcggcggcgcccctggtgggtcggtcatgcccgctggcagtactccgggcaggtggacgccgagagggaggcggaccacgctgggccgggggctccgactggcgcggctcccggcctggccgaagggcgcgcagccgggaacccagccgctcccggtcgcctcgcggtctccgcgcccccccgcgctgagccaggcccgcacttgttgaccgcccagcgatggaa

SEQ ID NO: 355344 - DNA, 1914 bp, Homo Sapiens
  misc_feature (1334)..(1410): n is a, c, g, or t
  misc_feature (1416)..(1467): n is a, c, g, or t
ggcctgggtggcgaattcggcacgaggctgggaagtagtcgggcggggttgtgagacgccgcgctcagcttccatcgctgggcggtcaacaagtgcgggcctggctcagcgcgggggggcgcggagaccgcgaggcgaccgggagcggctgggttcccggctgcgcgcccttcggccaggccgggagccgcgccagtcggagcccccggcccagcgtggtccgcctccctctcggcgtccacctgcccggagtactgccagcgggcatgaccgacccaccaggggcgccgccgccggcgctcgcaggccgcggatgaagaagaaaacccggcgccgctcgacccggagcgaggagttgacccggagcgaggagttgaccctgagtgaggaagcgacctggagtgaagaggcgacccagagtgaggaggcgacccagggcgaagagatgaatcggagccaggaggtgacccgggacgaggagtcgacccggagcgaggaggtgaccagggaggaaatggcggcagctgggctcaccgtgactgtcacccacagcaatgagaagcacgaccttcatgttacctcccagcagggcagcagtgaaccagttgtccaagacctggcccaggttgttgaagaggtcataggggttccacagtcttttcagaaactcatatttaagggaaaatctctgaaggaaatggaaacaccgttgtcagcacttggaatacaagatggttgccgggtcatgttaattgggaaaaagaacagtccacaggaagaggttgaactaaagaagttgaaacatttggagaagtctgtggagaagatagctgaccagctggaagagttgaataaagagcttactggaatccagcagggttttctgcccaaggatttgcaagctgaagctctctgcaaacttgataggagagtaaaagccacaatagagcagtttatgaagatcttggaggagattgacacactgatcctgccagaaaatttcaaagacagtagattgaaaaggaaaggcttggtaaaaaaggttcaggcattcctagccgagtgtgacacagtggagcagaacatctgccaggagactgagcggctgcagtctacaaactttgccctggccgagtgaggtgtagcagaaaaaggctgtgctgccctgaagaatggcgccaccagctctgccgtctctggagcggaatttacctgatttcttcagggctgctgggggcaactggccatttgccaattttcctactctcacactggttctcaatgaaaaatagtgtctttgtgattttgagtaaagctcctatctgttttctccnnnnnnnnnnnnnnnnnnnnnnnnnnnnnnnnnnnnnnnnnnnnnnnnnnnnnnnnnnnnnnnnnnnnnnnnnnnnngagggnnnnnnnnnnnnnnnnnnnnnnnnnnnnnnnnnnnnnnnnnnnnnnnnnnnngaagtattatagcaacagaaaggggggcgccccataatagggaggcgcggtactaataataacagtcgaagacgaggccgacgcgcacacatacaacaacacgagagcagagacgagaaacaacaagcgacaggaggacatactataggtagcaagacacaacaccatatagcacgcggggggggcaacaccaataaggagggaggcgaccacacacacccaggagaaggatagataccagaccccgctcagaggcgagaaaaaataaacacacgactcacgcagggctaggaaggggggagaaaaaccaaccgctcgcgtcagaaatagagcggccggagagagcagacgacatactcacggagcaccagcaggggagcatgtataacaggagaaaacgaatatactacacacggggcgggcagcttcggtatcaacaacgggaag

SEQ ID NO: 355345 - DNA, 836 bp, Homo Sapiens
  misc_feature (772)..(772): n is a, c, g, or t
  misc_feature (779)..(779): n is a, c, g, or t
agaaactctctgcttctgaagttgaagtccagctcatcagagagtcgctcaaagtggcgttgcagaagcattctgaggaagtgaagaaacaggaagaaagggtcaaaggtcgtgataaacatatcaataatttgaaaaagaaatgccagaaggaatcagagcagaaccgggagaagcagcagcgtattgagaccttggagcgctacctggctgacctgcccacactggaagaccatcagaagcagagccagcagcttaaggattctgagttgaagagcacagagctgcaggagaaagtgactgagctggagagtttgctggaggagacccaggcaatctgcagagagaaggagattcaactggaaagcctgaggcagagagaagcagaattctcctccgctggacatagcctgcaagataaacagtctgtggaggagaccagtggagaaggtccagaagtggaaatggagtcctggcagaagcgatacgattcgctccaaaagattgtggagaagcagcagcagaagatggatcagttgcgctcacaagtacagagcctagagcaggaagtggctcaagaagaaggaacaagccaagccctgagagaggaggcccagcgaagggatttcagccctgcagcagctgcgcacagccgtgaaaggagcttttcagtgcaaaaccaaggaacttgattgaaaagaatctgacactccagggaacacctggcgccagccccaaccagggttcttcaccttcaccagaacacggcccnagttggnaacttgagctgccccaagagttggccagttgcctttcaaaacttgaaggctggcttt

SEQ ID NO: 355346 - DNA, 992 bp, Homo Sapiens
  misc_feature (84)..(152): n is a, c, g, or t
  misc_feature (225)..(275): n is a, c, g, or t
cggtccggaattcccgggatgcgagggagccgcgggcgagggatcgcaggatgagcgatcggggcccgggcagccggcagcggnnnnnnnnnnnnnnnnnnnnnnnnnnnnnnnnnnnnnnnnnnnnnnnnnnnnnnnnnnnnnnnnnnnnnatcacccacgtcccccgagccccacgggccatgcccggccggccctaagcgcgggccggggggcgtccccttnnnnnnnnnnnnnnnnnnnnnnnnnnnnnnnnnnnnnnnnnnnnnnnnnnncatggcgttcaccttcgccgcgttctgctacatgctcaccctggtgctgtgcgcctccctcatcttctttgtcatctggcacatcatagcctttgatgagctgcggaccgacttcaagaaccccatcgaccaggggaaccctgcgcgggcacgcgagcgtttaaaaaacatcgaacgcatctgctgcctcctgaggaagctggtggtcccagaatactccatccacggcctcttctgtctgatgtttctgtgtgcagcagagtgggtgaccctgggcctcaacatccccctcctcttctaccacctctggaggtacttccaccgtcctgcagatggctctgaggtcatgtatgatgcggtctccatcatgaatgctgacattctcaactactgccagaaggagtcctggtgcaaacttgccttctacctgctctccttcttctattacctgtacagtatggtttatacgttggtgagtttctaagggggaagccggccagggagcgagcccagaacggaccggacgcctgtgcacccccagccctgccccttggccgcagaggcctcagccctggggaagggagggggcactggtgcccccagcctctccaaggccccgaagagctgctgctaggaaggaaccacgcgaacagcacgaccacggaaacgacgcaccagagagggccagagagaaagggcaccaccaaacatgaaaac

SEQ ID NO: 355347 - DNA, 1820 bp, Homo Sapiens
  misc_feature (73)..(73): n is a, c, g, or t
  misc_feature (89)..(89): n is a, c, g, or t
  misc_feature (97)..(160): n is a, c, g, or t
  misc_feature (1097)..(1109): n is a, c, g, or t
  misc_feature (1555)..(1558): n is a, c, g, or t
  misc_feature (1560)..(1748): n is a, c, g, or t
ccccccctccccttccctccaaccccacaactccgcgagaaggccggaattttcaaaacagagcgatcggggnccgtttacccggaagnggacgcgnnnnnnnnnnnnnnnnnnnnnnnnnnnnnnnnnnnnnnnnnnnnnnnnnnnnnnnnnnnnnnnnatcacccacgtcccccgagtcccacgggccatgcccggccggccctaagcgcgggccggggggcgtccccttgcgcccgggccccgcgctggcgccccccgggccgccgcccggcgcgggggccatggcgttcaccttcgccgcgttctgctacatgctcaccctggtgctgtgcgcctccctcatcttctttgtcatctggcacatcatagcctttgatgagctgcggaccgacttcaagaaccccatcgaccagtggaaccctgcgcgggcacgcgagcgtttaaaaaacatcgaacgcatctgctgcctcctgaggaagctggtggtcccagaatactccatccacggcctcttctgtctgatgtttctgtgtgcagcagagtgggtgaccctgggcctcaacatccccctcctcttctaccacctctggaggtacttccaccgtcctgcagatggctctgaggtcatgtatgatgcggtctccatcatgaatgctgacattctcaactactgccagaaggagtcctggtgcaaacttgccttctacctgctctccttcttctattacctgtacaggtgaggccttgcccacagcagtcagaactcagggaagggatgtcccagcatcacgcttccaatcccaagttcctgccttttgcccttgaggactgagggcagcccagggtgtgaccaggtgggcatctgggtggctgtgtgtgtgcagggctaggctcactggctcatcttcctacagtatggtttatacgttggtgagtttctaagggggaagccggccagggagcgagcccagaacggaccggacgcctgtgcacccccagccctgccccttggccgcagaggcctcagccctggggagggagggggcactggtgcccccagcctctccaacccccaaactgctgctgcggggaannnnnnnnnnnnngccttcagagccctcccccttggactagagcggctgggcagagctctaaacaggggcaggggctcctctgccagcctgtgggcatggcagtcattcctggaaggggcaggacctccggccttgtccatttcgggggaaacttgggccctgccaaggggcagagcttgaccctggaaattctgggccatccccctccacccccaccctgaggctccccctgcaggtgggggggtacccgcaccgggaatgagcaggctcagcaggggggcagccccacccctagtctgccctcccctctcccccaggctctttctccagccctgtctccatctgccccaacctcagcccaccttgtctcttggacctattttctatgtcgcctggaggagtccggcaccccctccccggccatttgtgacaaaatatgaataaactactgcaaatannnnannnnnnnnnnnnnnnnnnnnnnnnnnnnnnnnnnnnnnnnnnnnnnnnnnnnnnnnnnnnnnnnnnnnnnnnnnnnnnnnnnnnnnnnnnnnnnnnnnnnnnnnnnnnnnnnnnnnnnnnnnnnnnnnnnnnnnnnnnnnnnnnnnnnnnnnnnnnnnnnnnnnnnnnnnnnnnnnnnnnnnnnnnnnnttttaacacacccttaaacggggaaaaaccccaaacctggggaatccgggttaaaagaaaccaaaacctcct

SEQ ID NO: 355348 - DNA, 941 bp, Homo Sapiens
  misc_feature (56)..(100): n is a, c, g, or t
  misc_feature (104)..(139): n is a, c, g, or t
acacaccaccacccccacaccaccaagcatgatagatcataagggcctagctttannnnnnnnnnnnnnnnnnnnnnnnnnnnnnnnnnnnnnnnnnnnnccgnnnnnnnnnnnnnnnnnnnnnnnnnnnnnnnnnnnnagtcgacggggccggacatatgcccgggaattcggccattacggccgggcatcgctgtgctcctgtgaacatttcctgctatgccaagtttgcagaggccctgatcacctttgtcagtgacaatagtgtcttacacaggctgattagtggagtaatgaccagcaaagaaattatattgggactttgcttgttatcactagttctatccatgattttgatggtgataatcaggtatatatcaagagtacttgtgtggatcttaacgattctggtcatactcggttcacttggaggcacaggtgtactatggtggctgtatgcaaagcaaagaaggtctcccaaagaaactgttactcctgagcagcttcagatagctgaagacaatcttcgggccctcctcatttatgccatcttcagctacagtgttcacagtgatcttattcctgataatgtaggttatgcgcaaacgtgtcgctcttaccatcgccttgttccacgtagctggcaaggtcttcattcacttgccactgctagtcttccaacccttctggactttcttcgctcttgtcttgtgtgggtgtactggatcatgacacttctttttcttggcactaccggcagtctgttcagaatgaggcaggcttcgtggagttcacaatttctgggtctctgcagtacatgttggtggtaccatgtggtgggctggattggatccgtggaattatcctagcatgtcagcgctaccgcggcagactgtggtaacttctatttaacaggataaggattggcctacactattggc

SEQ ID NO: 355349 - DNA, 1193 bp, Homo Sapiens
atcaggccaaatcggccgagctcgaattcgtcgagagcggagtagagcaggagacgcgtagccgccgtcgccgccgccgggggatgtggccggcgcctgcctctagccgcgccgcctcttgagtaccagccgccgctgcagccgccgccgccgcctagccgtgcggtgccaggccgcgccctccccgggcgcccgccggctcgcatgccgaggggctccggggcgtagctgcgcgcccggcgccgcctccgggctccttcggccccgccatgggctgctgcagctccgcctcctccgccgcgcagagctccaaacgagaatggaagccgctggaggaccgtagctgcacagacataccatggctgctgctcttcatcctcttctgcattgggatgggatttatttgtggcttttcaatagcaacaggtgcagcagcaagactagtgtcaggatacgacagctatggaaatatctgtgggcagaaaaatacaaagttggaagcaataccaaacagtggcatggaccacacccagcggaagtatgtattctttttggatccatgcaacctggacttgataaaccggaagattaagtctgtagcactgtgtgtagcagcgtgtccaaggcaagaactgaaaactctgagtgatgttcagaagtttgcagagataaatggttcagccctatgtagctacaacctaaagccttctgaatacactacatctccaaaatcttctgttctctgccccaaactaccagttccagcgagtgcacctattccattcttccatcgctgtgctcctgtgaacatttcctgctatgccaagtttgcagaggccctgatcacctttgtcagtgacaatagtgtcttacacaggctgattagtggagtaatgaccagcaaagaaattatattgggactttgcttgttatcactagttctatccatgattttgatggtgataatcaggtatatatcaagagtacttgtgtggatcttaacgattctgggtcatactcggttcacttgggaggcacaggtgtactatgggtggctgtatgcaaagcaaagaaggtctcccaaagaaactgttactcctgagcagcttcagatagctgaagacaatcttcggcccctcctcatttatgccatttcagctacagtgttcacagtgatcttattcctgataatg

SEQ ID NO: 355350 - DNA, 929 bp, Homo Sapiens
gggacggcgcacttttcctgcaggatggggacgtgcagcgccacctctacctccaggacgtgatcatgcaggtggccgacgtgcctgagaagcccagggtgcccgcgtttgcctgccaggtggccggctgctgccaggtgttcgatgccctggacgactacgagcaccactaccacacgctgcacggaaatgtttgctccttttgcaagcgggccttcccttccggacacctgctggacgcccacatcctggagtggcacgattcgctcttccagatcctgtctgagaggcaggacatgtatcagtgcttggtagaaggctgcacagagaagttcaagaccagcagagaccggaaggatcacatggtgaggatgcacctgtaccccgcggacttccggtttgataagcccaaagaaaagcagaagccaagcctcagcagaaagccccaggggacagtggagagcggtcagaaggggaggccatggaaatctgctctgagcctgtggcagcctcccctgcaccggcaggtgagaggcggatctacagacatagaataccctctaccatctgctttggtcagggtgccgctcgaggatttaaaagcaacaagaagaaaaccaaacaatgctgatagactcagaaaaggagtggggggcagtcaccactgctgggcgtggcatccgccttgggcctttctccgaccttctggtgtggccgccctgggggccaggccctcgccatcctccccatccttgttcctcagcaaatggcattagcagctgtcatcagaagctgtgagggacccacagattttggaaacgacctggacacactattgggaaggagatgtggacggcctgtctcctcctgcagggcccaccctaagaatgtatttttaaacacatgaaataagtatttttcactgaaaa

SEQ ID NO: 355351 - DNA, 1394 bp, Homo Sapiens
  misc_feature (31)..(31): n is a, c, g, or t
  misc_feature (60)..(60): n is a, c, g, or t
  misc_feature (67)..(67): n is a, c, g, or t
  misc_feature (86)..(86): n is a, c, g, or t
  misc_feature (135)..(135): n is a, c, g, or t
aaagccgaaaaaaaactaagttattccacangaccctgaaaatatctggaacttccttcnctggcgnaaacccgattttcttaccnagcgttaacctttcctgaaattccagtaatgaagaaaaagctgcggccnaggtgcagcccagaatcctcagcaccgaacacatgttgagaacgggtttcagaaagagctcagacactgacctatagtctgtagatccgcctcccacctgcccggtgcaggggaggccgccaacaggctcagacgcagattttccatggcctccccttctgaccgctctccactgtcccctggggcttctgcctgaggctgggcttctgcttttctttggcttatcaaaccggaagtccgcggggtacaggtgcatcctcaccatgtgatccttccggtctctgctggtcttgaacttctctgtgcagccttctaccaagcactgatacatgtcctgcctctcagacaggatctggaagagcgaatcgtgccactccaggatgtgggcgtccagcaggtgtccggaagggaaggcccgcttgcaaaaggagcaaacatttccgtgcagcgtgtggtagtggtgctcgtagtcgtccagggcatcgaacacctggcagcagccggccacctggcaggcaaacgcgggcaccctgggcttctcaggcacgtcggccacctgcatgatcacgtcctggaggtagaggtggcgctgcacgtccccatcctcgaagaactggtgctcccgcgggaagcgcacggggcgcgcaacgaagcgaaagggcgcggccccagccgcgggatcccgctctacaggcagcggctccgccgccccgggccccgcagcgaggcgggcgcacagcgcggggggcaactgcatcaccccgggcgcgggcgggcgcagcctgtcggccaccgtccgcgagccgagccggacgtgacgtcacgctcacttccgccgccgtcgggggctgcgcgggggctgtggctccgggactgcggtgagtcctggccgaacgcgggcgcgggcgtgatgagggggttgggggactgccaggcccgggggggcccacgaggcgacggggctggcgggacgcggctcttcccgcgcgctccctctggctgtgcagcggtccccgaactctggggccgaagcccttcgggcctgcaccggccaggccagcgtcttgccccgcggcccgacactcagccggggcggggcggagcgggcctccgggtcgtcccgggtgtcccctcccagccctgggaagccgggtcgcaggtccccctctcgcacgccctctcccgtccgccttgccccgcctgtagtctcccgctgcagtccccggtccgggagattccggaccggtaccagcctctgt

SEQ ID NO: 355352 - DNA, 864 bp, Homo Sapiens
caccttctataatcttactcagatgatgttcgttcggatgtcttgttcaattgcaccaaggtgatatgcacgagtgttggaataatcttctagttgaattctggggactcccagtttaaacatgacatcaaattcattaggggcagaaatctgtcacgtgctcatagtagctcccggtgttcagcagcccgacgcctctgaacgcggagtcgcacttcagtctgagcagcaggtggtccacaaccccgtgttcaccatccccgccgccgtggagatatcatcgcggctgagcttcaacttctccaaaaccgcccggagcttcgaggccccaggcgccgcatccctccgtacgagaatgggggccgagaccggcaggccggggctgggcacgtcccagggcccgggcgggggtcttggcttcgtggagcagcgcgcgcccctctggcggcaagaaccagccctggaaagagccggctcccgagccgcaggaggctccagcccctctgccccaggggcgctggtggcgtcagacggctgcgtgtcctgggcgcgctgaggggcctttttggcgcgggccccagttgcgcggacgggcggcctctcctgggtgtccggggcgctctttttctgccgggatcccgacttcctggcggggccgaactttcccgccttaggcagggcggcctcgggggcagccggagactcgttgggatccatcggggcgcccctggcattccgtgcggaagccttgggggcagtggctccggcctcggaagctctctgcatggcctttccgtgccaaggctgcatggctggcgctttctgttccccgaaagaagaatccgtttcaggaaaagccgcaag

SEQ ID NO: 355353 - DNA, 1022 bp, Homo Sapiens
  misc_feature (360)..(392): n is a, c, g, or t
gaaaaatggcagccgccgctccggactcacgtgtgagtgaggaagaaaacctgaaaaagaccccaaagaagaagatgaaaatggtaactggagccgtagcgtcggtgctggaagacgaggccacagacacttctgatagtgaaggaagctgtggatcggaaaaggaccacttttattctgatgatgacgcaatagaagctgacagtgagggtgatgctgagccctgtgacaaagaaaatgaaaatgatggagaatcaagtgttgggactaatatgggctgggcagatgctatggctaaagtcctcaacaagaaaactcctgaaagtaaacctactattctggtcaaaaataagaagctgnnnnnnnnnnnnnnnnnnnnnnnnnnnnnnnnnctagagaaaataaaacagcgtgataagaggctggagtgggaaatgatgtgcagagtaaagccagatgttgtccaagacaaagagacagagagaaatcttcagagaattgcaacaaggggtgtggtgcaattatttaatgctgttcagaaacatcaaaagaatgttgatgaaaaggttaaggaagctggaagttctatgagaaagcgtgctaagttgatatcaactgtttccaagaaagatttcatcagtgttttgagagggatggatggaagtacaaatgagactgcttcaagcaggaagaaaccaaaagccaaacagactgaagtgaaatcagaagaaggcccaggttggacgatcctacgtgatgatttcatgatgggagcatctatgaaagactgggacaaggaaagtgatgggccagatgacagcagaccagaatctgcaagtgactctgatacataaagcatcataggaaatacaattgcagtcgttttattttttctagaaaaatatgtcatcctctgatagttggggaattataaggataccatttgtaagaaagccaaaagacttttgccagatttcatatttccccttttcatgtacactttatatatacttcattaaaaa

SEQ ID NO: 355354 - DNA, 855 bp, Homo Sapiens; identical to SEQ ID NO: 10698
  misc_feature (534)..(537): n is a, c, g, or t
  misc_feature (539)..(540): n is a, c, g, or t
  misc_feature (547)..(547): n is a, c, g, or t
  misc_feature (719)..(719): n is a, c, g, or t
  misc_feature (727)..(727): n is a, c, g, or t
  misc_feature (760)..(761): n is a, c, g, or t

SEQ ID NO: 355355 - DNA, 1161 bp, Homo Sapiens
ggcagtaactataacggttataaggtagcgaggcctgggtggcgctttggcctttgctggctgtgtggcggctccgcggttcgcaggtcgttcgctgagcgtctctgcttagccgcggtcatgagccggcacagccggctgcagaggcaggttctgagcctgtaccgcgatctgctgcgcgccgggcgtgggaagccgggcgccgaggcgcgagtgcgggcagagttccggcagcatgcgggcctgccgcggtccgacgtgctgcgcatcgagtacctgtaccgccgcgggcggcgccagctgcagctgctacgctcgggccacgccaccgccatgggcgccttcgtacgcccgcgggccccgaccggggagcctggcggcgtgggttcccagcctgacgacggcgacagtccaaggaacccccacgacagcacgggggcaccggagacccgccccgacggacggtgacaggcgaagagccgaactcgctcgatggcgtggtggagccaggaggctcgcctgactgcatggggggactggggaacccgcctaaggtgagaggtcttaagagactagcttgacgaattggggatgtcagagactcctccttggcgacgcagggggcctagagagccccgtgatggacggcaagggaggcccgccttttccgatgcttggagacaggtcggtgctcctcccccatgagggcttggggcggcctgggacgctggcgggctggacagtgtcaagccaagagctacttgcccgaaggtacggggagccaggacgacccccggtggacagggagagcctgagacgcccttctcttgacccctgagaacatacccacttctggctcctcaaggagtctcccctctcctgtatttaactctgagaagtgcagactttttgctgagaacgttttgggaaggtgccctgatgagcggtgagaagcccggaatccccttctggaaaactttcccccattaattgtgacaagccaggaccatgaggaaggggtaggggtctatcaccctggttgatcaactgaagacccccaaaggcccctacttgatggttttgaggggcaacattgactcatttgccccttccctctcggaatgttggacaaagggaataaaattggggatatgtctaaaa

SEQ ID NO: 355356 - DNA, 1096 bp, Homo Sapiens
  misc_feature (377)..(377): n is a, c, g, or t
  misc_feature (706)..(707): n is a, c, g, or t
  misc_feature (996)..(996): n is a, c, g, or t
  misc_feature (1012)..(1012): n is a, c, g, or t
  misc_feature (1078)..(1078): n is a, c, g, or t
atgtgctcccctgcacctctggggtgcagaaacctcttgcctccagatttgggtggagcctctgtgggaaccataggaagtgtgtgggctgccttcctgggcaagtatttcccagtgggaagttggagggggctttaacaaagttttactccctgccctgttcccctgatctagtgctcaggacccttcaccatcaggaattccttcctgtcatctaacctcagtcctgcctactgcagttccagccaacctgctctttcctgagttcaaagcaggtggagactggctggttaccatctttgcactggcccttcggagattcggggactcagttctggtggggtcaccctccctgtcctcccgcctgtgggagggangggaggggctggctcaggcatcgtctcccgcaatgggcagagagagcagagacaggtggaccaacagacagctggcccctggaggcagaaaggcccttctaactccagattgtatgcttgagtgatgggtccccagcccaagcccactctttcctcagctcacccttcagcctgttcctttcttgcctgaccccagcccgtgcagctgctctactccaggaatggatgtggggactcttcctggggtctggctcctgcatagctcaccccacctcatcatgagcctcaactgcctacatctggggcaagcagcacaccggctgcagatnntggcatacccccattctgattcttcttggaacaagccaaattctttcccctgtcagtacgtttgcatgtgtagtacatgttgcatcccaggcctgtctgccttcttaccctattttattttcatcatagcacttactaccatctgaaatgatctcatttatggtttgtctcctcagtgattaacacagttcctgcacacagtaaatcagtagttctcaacaggaagtgaagaggtcatcctgaggggaacatttagcaatacctaggagacattttctggttgttcatnaaccgggggaatgctnccagttggataggagtcaggggaggctgttaaacccctttcacaatgcacaggattggaccaaggntggtctttcaatcaggat

SEQ ID NO: 355357 - DNA, 451 bp, Homo Sapiens
  misc_feature (15)..(15): n is a, c, g, or t
  misc_feature (88)..(88): n is a, c, g, or t
gttcccccctccggnatgaccctcttcaacttccctgttgaagaacctactgatttactgtgtgcaggaactgtgttaatcactgagnagacaaacccataaatgaagatcatttcagatggtaagtaaagtgcctatgatgaaaataaaatagggtaagaaggcagacaggccctgggatgcaacatgtactacacatgcaaacgtactgacaggggaaagaatttggcttgttccaagaagaatcagaatgcaggtatgccaggatctatatcctagggaaagaacaacaaaaagaaacaggtgtgattggcagagcaggtggactgagttgaggctgaaaagtagatgggagcctggtgaggtcttggtggtttgatcttaactgcagttggaaagaattggaagacaagcagggaatgacagttggaaagaacgggaagacaagcag

SEQ ID NO: 355358 - DNA, 372 bp, Homo Sapiens
  misc_feature (268)..(268): n is a, c, g, or t
  misc_feature (330)..(330): n is a, c, g, or t
ggcccactgcgggggggctggccctcggaaccgtggggaggccatttgctggcctggggatcatgggcaactcgtgacagcctctgactcaccacgatgacgcctctggacctcggtgatgccttccgacaccactgggaaccaagggccctcactcaggaaccctgggagacagaagtcaggtgtcatcatcagacttgcggccacagcactagagtcacccccccagggcctccagaaccttactgggcactgtgggcactgccancaggcaatgccctgccttgctgcctttcaccctgaacatttagttaccctgcaggccagggncagctttcccttcacttaaaccaccccattaccagttcaact

SEQ ID NO: 355359 - DNA, 845 bp, Homo Sapiens
cgcgtcatcccatccgcagcagccgagccggacctgcctccccgggcgtgctccaccggccccgccggcggcccgcagcgagagacaggcgctccccgcagctccgcacgggacccaggccgccggaccccagcgccggaccaccgtccgtccgccccgaggagtttgcctgactgccggagcacctgcgcacagatggagctggaccaccggaccagcggcgggctccacgcctaccccgggccgcggggcgggcaggtggccaagcccaacgtgatcctgcagatcgggaagtgccgggccgagatgctggagcacgtgcggcggacgcaccggcacctgctggccgaggtgtccaagcaggtggagcgcgagctgaaggggctgcaccggtcggtcgggaagctggagagcaacctggacggctacgtgcccacgagcgactcgcagcgctggaagaagtccatcaaggcctgcctgtgccgctgccaggagaccatcgccaacctggagcgctgggtcaagcgcgagatgcacgtgtggcgcgaggtgttctaccgcctggagcgctgggccgaccgcctggagtccacgggcggcaagtaccccgtgggcagccgagtcagcccgccacaccgtttccgtgggcgtggggggtcccgagagctactgccacgaggcaggacggctacgactacaccgtcagccctacgccatcaccccgaccccagacgctggcgagctgcccgggcaggagcccgcgaggccagcagtaccagccgtgggtccccggcgaaggacgggcaggccagccccggcgtgacaacgcagatctacgaggaacc

SEQ ID NO: 355360 - DNA, 1454 bp, Homo Sapiens
gtcaggtccagatagttgcgccagacatctcgggcctcccgttggcacgtggtagcggaagacagcccgctcagtgtaggcccacaagctggcctgtgggaggagtccttcaccatgtgcttcagcggcccaaatttctccaggaagtgatcccgcagcaccacctgcccggtcagtgtgcacactgcctccacccggtctgccagtagcagcaggaagtggaactgggtcaagacgatggctaggggtgggctggccccaggccctaccccctctgggtactcccagactcgctcctcgctcagcagagagtcagggcgcccacagtccaatgccccatacaacacacaatcccccatcatccaggcgaagggcccggggtgcggagcgcagcttgggggtgtagaaggccaactcactgtagcccaggttgctgggaaactcacggaatgggggtgggtggtccgtgtaagctgcaaagagccactgagaaaccctgggcactcagccccctctgctgctcggcactatgaactggaagaggcgctgccgagtggtggcaataacaaagctacgcccatcagggccccgctcggcctcaagggagcacacaggtgctggacccccttcttcatttagcacgtacaatgggcggaagtagagatccggagcagggccgaaaagcccaccttctgctggctgagagctctgcttcaaagatgtggccttgggcagtcccgaccaggatggggcctgtgctgctctccgtgcccagtgccttgttccaacccacactctccaccagctgccccattccagcgtgctagtggccgtaccttctgtccatttcggttcacgtagaggacctccgtgctgctcagggcaatcagcaggtgagagccagtatggtcaaggaacatcttgtgaacttttgcgtcatccttacgtcccagctccacgtggttgggctcatttgccttgcccaagtcaatgcggagcagtgtatccttgcccaggctcatgcacagctgattgctggagacgacaagactggtaatgcgctcggaaggggtgaagtcaatgcgctgctttgtgaagatgggcacttccttctccagctgggcattcacataccccgagtgggggatgcccacgctagggcagccgggctgcaagacggccgagcgggacagcgagttctcgtactcatccaggatggacgccatggtgcccggcctctgggctctttgtccggggcctggggattacaaaagggctacccccccggggtccccgtcgccccagaatggaagctgtaactccccagcctctgacagatactgggaacctgcagccgtcgcctcctctttacaatcctgaggatcctcttcctcttgccttatgcagacgagataatcgggcagccctcgtccttgaatctggcgcagtcttgc

SEQ ID NO: 355361 - DNA, 502 bp, Homo Sapiens
atgctctgcactcagctctggggggcacaaagaagaaaaagaagactattgtgactgatgttttccaggggtccatgaggatcttcactaaaaagcttccccatcctgatctgccagcagaagaaaaagagcagttgctccataatgacgagtaccaggagacaatggtggagtccacttttatgtacctgacgctggaccttcctactgcccccctctacaaggacgagaaggagcagctcatcattccccaagtgccactcttcaacatcctggctaagttcaatggcatcactgagaaggaatataagacttacaaggagaactttctgaagcgcttccagcttaccaagttgcctcccatatctaatcttttgtatcaagagattcactaaggaacaacttctttgttgaggaaggaatccaactatttgtcaatttccctatttacaaatgtggatctgagagaatacttgtctgaagaagtacaagcagtacacaa

SEQ ID NO: 355362 - DNA, 1011 bp, Homo Sapiens
  misc_feature (510)..(540): n is a, c, g, or t
ggaattcccgtgatctggtcgccaagatggcgtcctccgcctccgcccggactccggcagggaagcgagtgataaatcaggaagaattgcggcggttaatgaaggagaagcagcgtctgagcaccagtcggaaacggatagaatctccattcgcgaagtacaaccgtttggggcagctgagttgtgccctgtgtaacactccggttaagagcgagctcctgtggcagactcacgtcctgggaaagcagcaccgagagaaagtggccgagctgaaaggcgcgaaggaagccagccagggttcgtccgccagttcagcgcctcagtccgtcaagaggaaagcgccggacgcagacgaccaagatgtcaagagagcgaaggccaccttggtgcctcaggtacagccctccacatctgcgtggaccaccaactttgacaaaataggaaaggagttcattagagcgactcccagtaagccttcaggactcagtttactccccgattatgaagatnnnnnnnnnnnnnnnnnnnnnnnnnnnnnnnatggagaaagaaaaaggggggacgccagcaagccgctctccgacgcacagggcaaggagcactcagtttcctcttcacgggaggtaacaagtagtgtgctgccaaacgatttctttagtactaatcctcccaaggcccccataattccctcatttcagggtcaattggagaaagcagaaatacatgaaaaaagtggtggaaaaggagagaaaacaccggcggaagcgttacccggaagggttttttttgacgaaccctgaggtaaatgccaggagtacgaaagggttgatgcctccaaaagatcagaggggacaaagagtggggaagaaattcccaaaaagcccatggagggcagggccaacaccctattttccgaaagcccctaaattgcccgaaaaagggttgaggggagggaacgggttgggaaccgcccaaaatggggggagaattccattgagcccaaattagagg

SEQ ID NO: 355363 - DNA, 1909 bp, Homo Sapiens
  misc_feature (1704)..(1704): n is a, c, g, or t
  misc_feature (1772)..(1772): n is a, c, g, or t
  misc_feature (1818)..(1818): n is a, c, g, or t
  misc_feature (1864)..(1865): n is a, c, g, or t
gcttctggtgtgagaatgttaaacctatgttgagaatgaatgctgaggcccctaacctcgagccaggtactcgctgcttcacgttgattaagtctcttttaaaagccaacagctcatcaaggaagtggatgccaaaactactcatggaattctacagaaaccagtggaggctgacaccgacctcctgggggatgcaagcccagcctttgggagtggcagctccagcgagtctggcccaggtgccctggctgacctggactgctcaagctcttcccagagcccaggaagttctgagaaccaaatggtgtctccaggaaaagtgtctggcagccctgagcaagccgtggaggaaaaccttagttcctattccttagacagaagagtgacacccgcctctgagaccctagaagacccttgcaggacagagtcccagcacaaagcggagactccgcacggagccgaggaagaatgcaaagcggagactccgcacggagccgaggaggaatgccggcacggtggggtctgtgctcccgcagcagtggccacttcgcctcctggtgcaatccctaaggaagcctgcggaggagcacccctgcagggtctgcctggcgaagccctgggctgccctgcgggtgtgggcacccccgtgccagcagatggcactcagacccttacctgtgcacacacctctgctcctgagagcacagccccaaccaaccacctggtggctggcagggccatgaccctgagtcctcaggaagaagtggctgcaggccaaatggccagctcctcgaggagcggacctgtaaaactagaatttgatgtatctgatggcgccaccagcaaaagggcacccccaccaaggagactgggagagaggtccggcctcaagcctcccttgaggaaagcagcagtgaggcagcaaaaggccccgcaggaggtggaggaggacgacggtaggagcggagcaggagaggacccccccatgccagcttctcggggctcttaccacctcgactgggacaaaatggatgacccaaacttcatcccgttcggaggtgacaccaagtctggttgcagtgaggcccagcccccagaaagccctgagaccaggctgggccagccagcggctgaacagttgcatgctgggcctgccacggaggagccaggtccctgtctgagccagcagctgcattcagcctcagcggaggacacgcctgtggtgcagttggcagccgagaccccaacagcagagagcaaggagagagccttgaactctgccagcacctcgcttcccacaagctgtccaggcagtgagccagtgcccacccatcagcaggggcagcctgccttggagctgaaagaggagagcttcagagaccccgctgaggttctaggcacgggcgcggaggtggattacctggagcagtttggaacttcctcgtttaaggagtcggccttgaggaagcagtccttatacctcaagttcgaccccctcctgagggacagtcctggtagaccagtgcccgtggccaccgagaccagcagcatgcacggtgcaaatgagactccctcaggacgtccgcgggaagccaagcttgtggagttcgatttcttgggagcactggacattcctgtgccaggcccacccccaggtgttcccgcgcctgggggcccacccctgtccaccggacctatagtggnacctgctccagtacagccagaaggacctggatgcaatggtaaaggcgacacaggaaggagaaccgggnagctgaggagcaggtgtgaggagctcccacgggaaaaacctggaanctgggggaagatcatgggacagggttcgaaggaggttgtgtaccanngcccatgggaggaaagtttcagaaagcagaaaagggaaactttt

SEQ ID NO: 355364 - DNA, 970 bp, Homo Sapiens
actccggcgcgccggcggccatcaagggctagaagcgcggcggcggtagcagccaggcttggcccccggcgtggagcagacgcggacccctccttcctggcggcggcggcgcgggctcagagcccggcaacgggcgggcgggcagaatgagtctgcaggtcttaaacgacaaaaatgtcagcaatgaaaaaaatacagaaaattgcgacttcctgttttcgccaccagaagttaccggaagatcgtctgttcttcgtgtgtcacagaaagaaaatgtgccacccaagaacctggccaaagctatgaaggtgacttttcagacacctctgcgggatccacagacgcacaggattctaagtcctagcatggccagcaaacttgaggctcctttcactcaggatgacacccttggactggaaaactcacacccggtctggacacagaaagagaaccaacagctcatcaaggaagtggatgccaaaactactcatggaattctacagaaaccagtggaggctgacaccgacctcctgggggatgcaagcccagcctttgggagtggcagctccagcgagtctggcccaggtgccctggctgacctggactgctcaagctcttcccagagcccaggaagttctgagaaccaaatggtgtctccaggaaaagtgtctggcagccctgagcaagccgtggaggaaaaccttagttcctattccttagacagaagagtgacacccgcctctgagaccctagaagacccttgcaggacagagtcccagcacaaagcggagactccgcacggagccgaggaagaatgcaaaggcggagactcccgacggagccgaggaggatgccggcacggggggtctgtgctccgcagcagtggcacttcgcctccggtgcatccctaggaagctgggggagcaccccggaggtctgcctgggaaccgggtgcctgggttgggacccc

SEQ ID NO: 355365 - DNA, 1205 bp, Homo Sapiens
  misc_feature (469)..(482): n is a, c, g, or t
  misc_feature (698)..(720): n is a, c, g, or t
ggatccttagaatccaaatgtctagataagttgaggacacatacctgcattgttgagcttctctactggggacgccccggcattattttattcccaagccagcagaccggcccagacagccaggctgtggctggtccagaccaactgctatggtggaaaatgcagcttccaggtcccactaccctgacatttccgtggaaggaagaacctggtggctcgtggaggaaaccagctttctatgagaaaggactgaaggattgcgcaccctgcacaagtacagattgaccaggaaaagacaagtgtcttctgtgtgtcacagggaaagccaggagtggccttctctgcaggccagcaagcctgcagcagcaggtgcccccacgtcaggtgctgactgtccgctgtccgctcctgtagaaggtagggagcacaatacctagggactaagggatgttcgccggttgtggtttgnnnnnnnnnnnnnnccttggttaagaaaacaaatttgcagaatttaatctacaagttgtattatgctttgaaaactccatccctcctaagaatcttaaaaaacttgaaatgctcgccaaatgtccccatgggatttttgaccaaaagtaaggtgataactgaagaaatttttagttctttgatcacttcagtgacaatacccattaatgaatcttctccatgatttgggnnnnnnnnnnnnnnnnnnnnnnnacacttcttaacctgttgatctatttgaggtctttgtgtttatcaaacttattcttaagtttaaaaaagaaattaaaagggtggtttttttaagattttaaagtttgctaacatattaaaaatcttcaaatgcttattaaatagagcagttcttgccacccagtcttgtattctgtctttagctagccaaattgtccttgaatttgggttttccacaacctcaaagggttatttgaaatcttttgttgtattttaaaatattttttggaagagctgctaattttattttaaaaaacaaagttgtgaaaacatgcctcctttttaaaaaataacccctccatccaggatatggaatccagcaccacagtgcacaggtcagggctcggagggagcctctgtgcagatgtgctttctttacagtggctgtaaaaagtttgtatttattatgtataaaatgttgaataataaaaaaaatggaattaaaa

SEQ ID NO: 355366 - DNA, 419 bp, Homo Sapiens
  misc_feature (391)..(391): n is a, c, g, or t
ttccacaactaacagacttaaaataacagtgtccttcgtattaatatctgtgccattcatttagaattagcagagctaatatggaggggctgaactagtagccacatcttgttcatcacatagactaatagaaaggaggctgtggctaaagcagaaatggaacttccggatctgaaattagccaatataatgttcttttgtatttgggtatttttcatcttaatttttacagcatatactcttcttaccagtatccttaggaatccaaatgtctaggataagttgagggacacatacctgcattgttgaggcttctctactgggggacgccccgggcatttattttattcccaagccaggcaggaccgggcccaggacagccagggttgtnggcttgggtcccaggacccaactgctat

SEQ ID NO: 355367 - DNA, 2311 bp, Homo Sapiens
  misc_feature (8)..(8): n is a, c, g, or t
  misc_feature (30)..(30): n is a, c, g, or t
  misc_feature (129)..(192): n is a, c, g, or t
  misc_feature (319)..(319): n is a, c, g, or t
cgcccggnagcgcgcccttctctgcccgcngtcggtgcgctcggccggacgccgcggcggaacggaacccagagaaggggacgcggggcggcggcgctcggggcttgcccgcggcgagggaggctgcgnnnnnnnnnnnnnnnnnnnnnnnnnnnnnnnnnnnnnnnnnnnnnnnnnnnnnnnnnnnnnnnnccgcgctctgggactgggactacctggaccgctgcttcgcccgccaccgcgtctgcatctccttcggcctgtggatctgcgcctcctcctgctggatcgccgcccacgcgctgcttctctatctganatgtgcacagaaacccagacaggaccagtcggcactgtgtgctgcgtgctgcctcctgaccagtctgtgtgacaccgtcggggctcttctggccagacagctcacaatccaggttttcactggtgcctacctagcagctattgacttagtgaactttatgttcattctcttcccagtctgtggatccaaattcaagtctaattcagatcgggaagcccgagagaggaagaggaggcggcagctcagggccagtgtgtttgccctggccctgccgctgagcctgggcccgtgctgggctctgtgggttgctgtcccgaaggcttcagccaccatccgggggccacagcggaggctgctagcgagcctgctgcaggaaaatactgagatcctcggctacctgctgggtagcgttgctgcctttggctcctgggcttctcggatcccccctctctccagaatttgccgggggaagacatttccctccatccacctgtggacccggctcctgtcggccctggctggcctcctctatgcctcggccattgtggcccacgaccggcaccctgagtacctgctgcgggccacaccctggttcctgacctccctcggccgtgcggcactggacctcgctattattttcctttcgtgtgtgatgaagagcaagatgagacaggccttaggatttgccaaggaagccagagagagccctgacacccaagcccttttgacctgtgcagagaaagaggaagaaaaccaggagaatttggattgggtgcctctcaccacactgtcacactgcaagtcactgaggacaatgacagcaatcagtcgctacatggagctgaccatcgagcctgtgcagcaggcaggctgcagtgccaccaggctgccaggtgacgggcagacgagcgccggagatgcgtccctgcaggaccccccgtcgtaccctcccgttcaggtcatccgggcccgggtgtcttccggcagctcctctgaggtctcctccatcaactccgacctggagtgggaccctgaagatgtgaacctcgaaggcagcaaagaaaatgtggagctactgggatcccaggtgcaccaggactctgtgaggacagcacacctgagtgatgatgattaacaccttctggagccagctcatcagctcagagcccagggtcaggagtttgttcagtaacgcagcgggaatcaatctgcactgacaccgcggcaggaactgaaagctgccctggcaagtgaggaaccaggagccgtcactgagtgtggctgggctacatcatagctcatcacggagctacgactttgggtactgcggacagacctggataggcccagcattcgttctgaagatcacagttcacagaagcttttgcttcctaaagataatccaaaggacctgagacccgcttttccttttcccttcattcccttgagagtcagccataaacggaatacctgctaggttccaggaatgagctcacctaacagacagcaaatgtgtctggttagatctcagcagagcccattctgcaagacctggctgagccagatgagagggtgggccctgtgctggggggccttgggtcacacacaggaaccgagacctggcttccaccccccagtcacccacttgggttatctgctggaagttatcgataggactgtgtggccaaccaagtgcttgtgagatcactgacactgcaaaaacaaagcaaactgctccgggtaccaggacttcctccaacctggcaagggtgtgcgctgaggcggggcttgcaggtgagggggctgtatgcttcaggaactaactaaatgcatgcagaaggtaagaggcatgatgggaggtgttcaagcacagcaatcccatttgggagttattttgatactgcgatgagtaagggtaagggcgcatggaatggggctaaggtgggagtgaacactggggtgaataaattttaaatcaattcaagtaaaaaa

SEQ ID NO: 355368 - DNA, 846 bp, Homo Sapiens
  misc_feature (512)..(550): n is a, c, g, or t
tgggtttctcccgagacgcgggggtgtgtgtggtgggggcagccctctgtggcctgtgctgtccctctccttgcctggcttcctgacctcccagtccagctggggaagccagacggtccctgggtgaggccaagagattatatagaataatggatagatacatacatgaatacacaaatacataactggaaggacccagccggatgggggaagggcattggcgaggtgctccagacctcccccctacaagtaaggaaggggatctgtggccctggggatgggggaaagtgctcagagaatctggggctagggcagctccagactgtggaagcccaggttgtgccggggtgagagaggggttacattagggggcagggccctgaagtgcccctcaagccccctccaggttaggtagactcagaggggtgagagctgctagagaggtgagggcagctggagctggggctgggagtgggtgatgagatccccatggactgaagacagtaggaacnnnnnnnnnnnnnnnnnnnnnnnnnnnnnnnnnnnnnnnaatggccggacctaaggcctgagcatggatgggatcagggacagatcggagacttcaagaagggtgaagattagatccccagatggacacactctgggagattcagcagaggccagagggatggtctggggttggactgtggtctcagggcggcagggcctgcgtccaggtgtggatggggaaactgaggcaggtatgggcgtcaagggtataggttgcggctttcattgggggctccagcctcgtgccgattcaccacccggcctcgctacctagcctatagtttgttggccgag

SEQ ID NO: 355369 - DNA, 844 bp, Homo Sapiens
  misc_feature (16)..(16): n is a, c, g, or t
  misc_feature (81)..(81): n is a, c, g, or t
  misc_feature (149)..(187): n is a, c, g, or t
aggggccaggcccctnaaatgcccctcaacccccctcccagtttagttagactccagagggttgagagctgcctagagagntgagggcagctggagctggggctgggagtgggtgatgagatccccatggactgaagacagtaggaacnnnnnnnnnnnnnnnnnnnnnnnnnnnnnnnnnnnnnnnaatggccagacctaaggcctgagcatggatgggatcagggacagatcggagacttcaagaagggtgaagattagatccccagatggacacactctgggagattcagcagaggccagagggatggtctggggttggactgtggtctcagggcggcagggcctgcgtccaggtgtggatggggaaactgaggcaggtatgggcgtcaagggtataggtttgcggctttcattgggggctccagtagaggaatggtcagagagattcagctgagaagcgagagaaatagatctagaagttagaagagcagcgcggggtctgggagggagaaatttccggctctggggcagcgggagaggtgcggacctggtgcctgagttgggagccttcgaaggcgccggacagggggctcaaggtccgatgggatggccggaaaggatgaagtgggtcgggggacgctggggaagatcggtgtggaagtgagtcgtgggtttggggcttggggagaaaagttccgggccaggcccgggggtccccacgagcgggtcatgggcagggaaacgcagccggggctgggcgagcgcgctgcgggcaaaggtagggggcccggggcgcgtggagataaccaccgggcctcgctaccttagcctgatggtgtct

SEQ ID NO: 355370 - DNA, 429 bp, Homo Sapiens
caggatatttgatgattttgtttatgtagaattaggtaacaaagccaattatgctatccttattattgaaggattaatcttatgacttaacataagctttggttatatttgggtgtagtctttggctaagtacccattaaggctagtagcaaacacttggaaggtggctaactgggactgggaatacgtgtctcaacttgagaaaccaaatagtgcgaagggactcagggtggccagacctgtgaccttggcctcatttgtatcttgttttcgctgaggtgatcagacacttagtaccctagaaatggactggaattattgaatcttcttctgtaacatcacaatcttcctggttttcagaataaacgtttttgtgcttttgatataaatatatactctataataaaatgtttgactaatttatatagt

SEQ ID NO: 355371 - DNA, 1438 bp, Homo Sapiens
agaacggctcgggcgactttaatggagcgaaacgtcgaacatgaagaatactatagtacaaaattagtgccaaaaatactgtatttttaaccagcaagatcattggggcattattatacaacattaggtgttttttgcaaaactagttcccatccccaaacaatagacagtacatgcatttgaatgacattttaggaacagtaaatattcttttaaatactgcaagttaaaaatgttttctgacaaaactccctaaatacataggtctagtaagggtttccaacaggatgatgggtgaggaatccagcaaggagttgcatttagagagttctttgaggaaaagaaatccaccaaaaacgtgtttcagtcaaagtaacctggacaaagttacgtagtattattccagctttctttcctgaacttaaaaatgttctaccaacgaatacctttctgttttttctgtctaccaaaagcttatataaaagtcagaatttctttatccaagatctgattttacccaatagatgttttcataacatgtaaatgtcatttgctatattgggttggaatcatacggggaaatggaggacacagggtagataaggaaggcaaggaggaaattaatatttgagcacctactatgtgctaggtgtgtattcatactttgaacatatgattctagaggcaagagtgttattgaaagggcagtgatcattgggaagacagcaggaaatggctattctgtgagaaaaacaaatgacaagtttagggtctgtactaagttatctactaaacagcaggtgtctggctccaaaaatctctagctaatcatatacaactaagccatttcttttcctaatttgatggaaccaaaatgaaatcccaaagacacagttaccaggacagatctattaacgctacatatgctggaaatatgtagagatagataaacatacaatattactagttttatttttttgtgtttctaaccaaagatatatctttggaagaaaatattaatgtataccaagcacaccttatttgtatcaattgagatgttgattaccaattaagtggttttaaacccttatttaatttgaagaagagcagcaatatacattacaatatttgggtacactttatttttatatgggttaacattctgctatatttcatttcattcgttttgagaaactgaaaacaaagggaaatcaagggtaatcggtaggtgatttgagggaaatttccaaccaatatgtgagtcttgcagtatttcattatacagccctttcttcccattatttatttttttgcaaataagtcattttgacccaaatccagcataaatagcttttcaccaattcctaacttaagacaactaaaatttacaatcatgtggcagtataaattttaaaattacagttcgtacactttgaca

SEQ ID NO: 355372 - DNA, 237 bp, Homo Sapiens
ataatgtagtgaaaatactacactttctgcagtggcaaatcttagcagagattgtaaatctaagcagagaggtatccaggattgtggtagtctacactgagtatgcctcacatgatggtagagaaaaaaaataatgaagattacatgcaggatagctccctaagaatatcagataagaacttctgcagaacaacttgttatgcaccttctggtccaaattttcaaagaaactgctgc

SEQ ID NO: 355373 - DNA, 797 bp, Homo Sapiens
  misc_feature (55)..(55): n is a, c, g, or t
  misc_feature (57)..(57): n is a, c, g, or t
  misc_feature (77)..(77): n is a, c, g, or t
  misc_feature (83)..(83): n is a, c, g, or t
  misc_feature (130)..(130): n is a, c, g, or t
  misc_feature (166)..(166): n is a, c, g, or t
  misc_feature (170)..(170): n is a, c, g, or t
  misc_feature (182)..(182): n is a, c, g, or t
  misc_feature (184)..(184): n is a, c, g, or t
ggtaattatccaataacctagggttaacttcctatttaaacccctattagttccngnttcattttccttggatttanaagaancattatgaaaaacctgggaatctctctcaccctataccttacccagnaagatttagagtttaataatttttaattctttaatngtangtacttttattncnccagtttggggaaaatcttcataaaattgaatcagttttattcagtgttctctaaggtgataccttttaattttgaaagactaaataattttaatcgagaatttccagtctttcagtctgatctatttaattcactacctgttacataatccagtgaaaactctacttgttgaaattatgacataaagatcttgcagctttatttgagtatttgttcttttgtgtagtttccatcttttaaaatatttaaaatattttcaagataaagtattatcttctctgcaaaaattcctggagtaattttctctcataatatttgaagtcagtggttctcggttgtattagtggggtaactacatcaaaataaataaagtcttatttttaaaatgcaaattttagaccatactcccagtgattcttagttggtcttttcggaatgagccataggtaatgtttatgtccaataaaatctaggaaaaactgtctggaactttgctcttcttgccatgaataccttaggaagtattaaaaaacaggccaatgtaatatgagtaggttttcttgtttgttacttttctaagaatattttacttcccttagcaggcttttggct

SEQ ID NO: 355374 - DNA, 479 bp, Homo Sapiens
  misc_feature (450)..(450): n is a, c, g, or t
gtaacttatacaggactggaagagaatgtcggaagacggataatgacttaaaagcgaaaacaattgaattctttgagctacagtgctgtgtcctgagagtgcagttattttccactgcagtaatgctttcaaaaacatttatctagcttctctcactttctcatttgctgtcattggtgtgaaaaatcgagttaccagaaggttcacccatgttccacaggtatgaatactgaacgttttatttagtgtctcattaacagctggcctgtggctcctccttctcggcttgactctgccctgtccagggaaatggggaatcacgcctaaggattagcagggtgcctattttcacttacagtgcttcattcctgtgttcatgttacctattccctttacaaaatacgaatgtactatctttatgtgacaggcaatattctaactactttacanaaacgttatcttattctggttaactcctt

SEQ ID NO: 355375 - DNA, 488 bp, Homo Sapiens
  misc_feature (21)..(21): n is a, c, g, or t
  misc_feature (31)..(31): n is a, c, g, or t
  misc_feature (47)..(47): n is a, c, g, or t
  misc_feature (478)..(478): n is a, c, g, or t
tcccccaggccctaagggccngccttccccncgggtaagccccattnatatgccatcctaagtgcctggggaggtttaaatagcaccttaaagaatattccatgagagttcctgaaatgaaggtttccgtctttagctattgactgtaggatttgtaattcaaatcatcacagcatcctaaagaaatactgtgtgaatggaatgcacacaattcctacagaacacacaaactgatgtccaaaaggcacagagtaatgctggtggctctttctagtcagttaagaaacaataaaaagtctgcattattctttcataatttaaatacttaagtaatctccactttattattttataacaatgacttcaaatttacattattttaagtaccattgtaatagcttagtgtataatacagatatttgcgaatatcccatccaaatattaaaaaaaacttcttcactatatatatatttatatnaaaattattc

SEQ ID NO: 355376 - DNA, 757 bp, Homo Sapiens
ttagagctcagtgacctgtcactcactttgccactctgtcattttcttgacttctgtcccaacgccagccctgtaatatggagataaagagtggggaggacagaactctgaaacctaaaaggcaagatttttgctaaaccggagaacgtaaaaatacattcctagaggcaatctaaccagccagataaccagaagtttaccccccaaagccaagaaccagtacccccacctcaccttccatcctctcttaggccttgtctatggccctaaggggagttttccagttgactgatgaggccctgactggtagggaaagccggcagggaaaccctgtggcaaagcacacccttgaccacccacttaacaagaaggtctagcaggacattcttgacccaggccagcttctcccctgaaaataatacatatttttaatttctgtttgaaaaaaccccactgtgaaattactctgcttatattagaaggtatgaagacagtagttatgtactgttcgtttgcatacggtcattttgagatagaaaaattaaatttttttaggaaaagaatttcaagcaactttctacgaaaatacagcttgtggttaaatttcctaatgaaagaggaattattcactgaaaaatttgtctaatctgtgccacctcaaaataagaattgtgcctcttcaatgaatgttgtatatgagaatgttacatttgtaacagcacaggaaactcaataaattataaatgaattaaaaaaa

SEQ ID NO: 355377 - DNA, 753 bp, Homo Sapiens
  misc_feature (14)..(14): n is a, c, g, or t
  misc_feature (34)..(34): n is a, c, g, or t
attgggaattgaanccaaaggtaggaggccctanaatttaaggcactcctgaaagtcaaacccccggacaaggcagtcatccacataagaacagctaccttcctcccactggtggccacaagaggtagggaggggagtatgggttccatttgcttcgcattatggcaaggtgaaaccgtttgttttccctctccattttccctaactaaatgaaaaggacacattctgaaatcccttttgttggagaataagtcagtctgaggggaaatgggaggccagagatgagaaccctttgaaaagattgtaaaatactgattttcattctttcaagcttatttgtaaatacctatttgaatgctgtgtatttgtacaggaatttgagcaaaaaatgtatagagtgtgatgtccaattggtattcagcactataaatgtgtttttaacctcccgcattctgtgcttatttaaaacaaggaaacttctaaccatttcttttgtgtattcatgtttaaagaaaaaaagtgatttaaaaatgatcttacctgtaccagaaaagcaaagttaaaggaaacaaaatttgtaccattgtcccaagaggtattttactgtatatattgtggtagcatgttcaaaatccaacaagtaatgtgaattttagatgtaaatatctgccacttgattttttttccccctttccccacttccttgactgctgtgatgtgaattaaagataaatacgtgatactgaaaaaaaa

SEQ ID NO: 355378 - DNA, 641 bp, Homo Sapiens
  misc_feature (528)..(541): n is a, c, g, or t
ttcactaacaagagttgaaaatagccaggaagctaagccctggctcctgggctcctgggcagatacttaatcaggaggaagaaggaaccaaaatcatgaacacaactggctctctcagggggaggctgtcaccctccaagctcttcttccccttcctcaaatggagattcacactcatccctagttcaggagagccgccattgatgatgaggaaatccgtgtcaaagaagctggaaagactgctattcattgtgagaattttgtttccactgctacattacattgtttcttcttgttttcccttccaatttccagttaagaatctttcacagaaaatttttaattttatcaaaaactgcacagatatcacacagctgcacccccatttggtgacacaaagcatacccttctgtgaagattttcactttacgccaaggcatgattgtcactttatgccaaggcaataaatttttacaaattttgtataacaggagctgaattctgggttctcaaatgtgaaatgtggcnnnnnnnnnnnnnngatttaattcaagcattttgtcatgtggttcttatttcttcaaccaagtttgtttacagtcactgcctttgaaatacagtcaaatacatctgtttgcttc

SEQ ID NO: 355379 - DNA, 904 bp, Homo Sapiens
caaaaactccttttaacgtgggagttttaccaaatttcaaacacttttcaccaatttggggcggtatttaaaagccttgccccatagaacaaatggctttggcatcatcatcggttttctttttcaccccaaaaagttgagcagcctgaatgagaggttccagggtttctttagccccactattcatcagattcttgtcacgcagccattcttccagtggactgacattgtacttgatctgcatgcctttactccaggagcacatgtccttccgcaggagaaggttgttcagggtgatggcccctatgatgtagaacatctgcttgaccacctgcttgatcatgttcagggtccatgccatgctgacactatgagccgtagtggaaggagttgagctgccggaggatggagtccagtgtgtaggtgccctcatcggcgatactggaggttcgctttctcaaccctgtgggcttcaccccagacacgccctgaatcgtttcatgttccagcatgcctgagacaatcattggctgaaggatgttctctaacacccgcacgagctgctggtagatctgaatggccaagtcactcagcacctgccgatactcagccaggtcaaaattggtgaggcagtgttcattctggcgagatgtgttgtgcttcataaagccctcttctccactgtactgtttcaagcagtgcaaaaatcggcatgtgttagagagccagaaggagacggtttcaaaatcatcacctcttttcttcaatacttttttgatgctgttaattgttgatgttagcaacgaccttactttctgatcatcattcaggtagtcagcatgtcgaacacacatgaacaggatatatggcggtaacctggaatccaatgactgctaacacgtgg

SEQ ID NO: 355380 - DNA, 392 bp, Homo Sapiens
  misc_feature (229)..(229): n is a, c, g, or t
  misc_feature (256)..(256): n is a, c, g, or t
tgaatggccaagtcactcagcacctgccgatactcagccaggtcaaaattggtgaggcagtgttcattctggcgagatgtgttgtgcttcataaagccctagagtcataaggcaaagttaatgatacacatgaagtaacctgtctcttcagtttaactatctccaatttgatcagcatcttcatgctcttttctgctctgttccaaggagcttccccactaatgccagngactgacaattctcaaatggctgaagnggtgttttgttttgccttccatcaataaccccccttccagttcttaccaagcttttgaaacaaaccctaaatctggggaaacctaacctttttaggtttttaggctttccccaaaaaacaaaattgtctaaaagag

SEQ ID NO: 355381 - DNA, 989 bp, Homo Sapiens
  misc_feature (36)..(36): n is a, c, g, or t
  misc_feature (47)..(47): n is a, c, g, or t
  misc_feature (179)..(179): n is a, c, g, or t
aagatgtaaaacatctccttgaccaacctgcctgancaattcagggnccaagccaagctgaaaacatgacccaaatggaaggaattgaacctgccggaaggaaggaagtcccaatgtgtaggtgcccctccatcggcgaatactggaggttcgcctttcctcaaaccctgtggccttcnacccccagacacgcccctgaaatcgtttccatgttcccagcatgccctgagacaatcattggctgaaggatgttcctctaacacccgcacgagctgctggtagatctgaatggccaagtcactcagcacctgccgatactcagcccaggtcaaaattggtgaggcagtgttcattctggcgagatgtgttgtgcttcataaagccctcttctccactgtactgtttcaagcagtgcaaaaatcggcatgtgttagagagccagaaggagacggtttcaaaatcatcacctcttttcttcaatacttttttgatgctgttaattgttgatgttagcaacgaccttactttctgatcatcattcaggtagtcagcatgtcgaacacacatgaacaggatatatgccggtaatcctggaatcaaattgactgctacaccacgtggcttcagttccagaatcaggttcttaacaagtttttgctcatcctccttcttgtattccagcatcccttggaaatccttttctttcctgggaatgttgactggtcggatgggttcatcaatgatctgtcctggggatatgttctccatctggcccacttctagttcgccaatttttttggcaaatactttcagttgttttttcagtttacggaccgtcttatcctgtttttcaagttgttccatcaaatccaagttttcgttggtcagccgggtgatctcgtgctgcaggctggcctcaatgcgggcctctgggggcagctgcaggttctgggccagcagctgctgctgtcggttgttctcctccttac

SEQ ID NO: 355382 - DNA, 844 bp, Homo Sapiens
  misc_feature (630)..(630): n is a, c, g, or t
gggaagaggctgactatgaagatgatttcctggagtatgatcaggaacatatcagatttatagataagatgttaatggggtcaggagcttttgtaaagaaaatctctctttctcctttttcaaccactgattctgcatatgaatggaaaatgcccaaaaaatcctccttagtgtagtatgccattttcatcagattttgaggattttgactacagctcttgggatgcaatgtgctatctggatcctagcaaagctgttgaagaagatgactttgtggtggggttctggaatccatcagaagaaaactgtggtgttgacacgggaaagcagtccatttcttacgacttgcacactgagcagtgtattgctgacaaaagcatagcggactgtgtggaagccctgctgggctgctatttaaccagctgtggggagagggctgctcagcttttcctctgttcactggggctgaaggtgctcccggtaattaaaaggactgatcgggaaaaggccctgtgccctactcgggagaatttcaacagccaacaaaagaacctttcagtgagctgtgctgctgcttctgtggccagttcacgctcttctgtattgaaagactcgggatatggttgtttngaagattcaccaagatgtatgtttgatcatccagatgcagataaaacactgaatcacctttatatccggggggttgaaaattttggaaaagaacattcaccaccggattccagaaataagggttacctttctccgggcttttacccttggcctcctaccactaccatacctattcccggaattggtacccccgcgcgttaagaattgcccgggt

SEQ ID NO: 355383 - DNA, 442 bp, Homo Sapiens
  misc_feature (62)..(62): n is a, c, g, or t
  misc_feature (342)..(342): n is a, c, g, or t
  misc_feature (353)..(353): n is a, c, g, or t
  misc_feature (422)..(422): n is a, c, g, or t
tagttccatttcaaagcctttgcaatggtatttggttctgttaagcatgatcagcagtcttngagctggcgaggtctatatcccttactcagtgcagttctcaaagtcctttgtatgtcgtacaggatcacatctgtacatatcacactcttgtggggtaagcccagaagctcatacacagcttcatgggtttactttcccaagcacttcctccctccctgcaatatctccccagcactttctgcttccctcagcttccccttttcaaccttgtaggccatggaaggtgttgctgtcgctttaggtgactcttctctgccacacggttcctgtggcctttgncttccttgggngtgaattcgggcagggaaggaccaaagaggggggaaaaaggaggtcacggggggaacccttttgggggnccttacaatcaggggaggga

SEQ ID NO: 355384 - DNA, 932 bp, Homo Sapiens
ggcccaggcactctgtgaggatttgtcagcactggttaaagaagagtacttgaaagcagaacttagtaggcaactagaaggcatcttaaaatcatttaaggatgttgaacagaaagcagagaatcatgtccagcaccttcagtcggcctgtgcaagctctcatcaatttcagcaaatgtctagagattttcaggcttggctggatacaaagaaagaagagcaaaacaaatctcatccaatatctgccaaactcgatgtcttggagtcattaattaaagatcataaagactttagtaaaactttgaccgctcagtctcatatgtatgaaaaaaccattgcagaaggtgaaaatctgttattaaaaacacaagggtctgagaaggcagccttacagttacagcttaatacaattaaaaccaattgggatacatttaataagcaggtgaaagaaagagaaaacaagttaaaagagtcattggaaaaagcccttaagtataaagagcaagtagagactctctggccatggatagacaaatgccaaaacaacctggaggaaataaaattttgcttggatcctgctgaaggagagaattctattgccaagttaaagtctctgcagaaggaaatggaccaacactttggtatggtagaattactgaacaacacagccaatagcttgctcagtgtctgtgagatagataaagaagttgttacagatgagaataagtcactgatccagaaggtggacatggtcactgaacaacttcacagtaagaaattctgtctggagaacatgactcagaagtttaaagaatttcaagaagtttccaaagaatctaaaaggcagcttcagtgtgcaaaggagcagctagatatccatgattcgctgggatcccaggcttacagtaacaaatacctgaccatgttgcaaa

SEQ ID NO: 355385 - DNA, 1718 bp, Homo Sapiens
aactcccagtccaaaaaaaccctccaatgttaaggaattggaaaggatttaaattattcggcaaccctaaatattaccatggaaaccccactggagacaatccctattaggtaaggaaggtgggaaacccttcaacaggtcttgtcaactatctcagcacagaaaacttccccctggagagaaaccttataaatgtaaggattgtggaagagccttcactgtttcctcttgcttaagtcaacatatgaaaatccatgtgggtgagaagccttatgaatgcaaggaatgtgggatagccttcactagatcttcacaacttacagaacatttaaaaactcacactgcaaaggatccctttgaatgtaagatatgtggaaaatcctttagaaattcctcatgcctcaatgatcactttcgaattcacactggaataaaaccctataaatgtaaggattgtgggaaagccttcactcagaactcagaccttactaagcatgcacgaactcacagtggagagaggccctatgaatgtaaggaatgtggaaaggcctttgccagatcctctcgccttagtgaacatacaagaactcacacctggagagaagccttttgaatgtgtcaaatgtgggaaagcctttgctatttcttcaaatcttagtggacatttgagaattcacacatggagagaagccctttgagtgcctggaatgtggtaaagcatttacgcattcctccagtcttaataatcacatgcggacccacagcgccaaaaaaccattcacgtgtatggaatgtggcaaagccttttaagtttcccacgtgtgttaaccttcacatgcggatccacactggagaaaaaccctacaaatgtaaacagtgtgggaaatccttcagttactccaattcgtttcagttacatgaacgaactcacactggagagaaaccctatgaatgtaaggagtgcgggaaagccttcagttcttccagttcctttcgaaatcatgaaagaaggcatgcggatgagagactgtcagcataaggaatgtgggaaaacctaaaggtgtccctgttctctctgaagacatgaaaactcactggggagaaaccctatgaatgtaaaaatgtggaagcaactttgtatctcaggtcttaatgaacacatatgaattcacagtggagaagaccctgcatcagggaatgtggaaatgactttgctgaattctcaagccttaccaaacacatcagaaatctcactggagagaaaccgtatgaatgtagagaatctgggaatacctttctgaatcccacaaaccttaatgtgtgtatgtgaactcacattggagagaaaccctgcaatttaaatggtatggtctggatgatgccccactccatatttgtaagccctaagtcctagttccttacactataactgtatttggacatagggttttcaaacaggtgagtaacttcaaatgaggttgttgggttcgatccctaatctgacatcactggtgtccctataagggaaactgaaggaaggatacacatggagaagactgtgtggatccaccagaagatggccatctacaagccaaggacagagacctggaacagatgctttcattatggcctccagaggaaaccaaccctgtctccaccttgatattgcacttccaggctccagaactgtgaggcaataaatttctcttggttaaatc

SEQ ID NO: 355386 - DNA, 203 bp, Homo Sapiens
actatcacttaagggaaacaaacaactaacagccatcaatccagaggaaagcgattttacagtagagtgaacgaaacttgagaaggaaaacatccaagaggcatctgtttgacgcgagcaacgcaaggaacacataccgtctggcaagaatcccactaggaccacgagaaacaaagcaaattaaaacattatccactacacga

SEQ ID NO: 355387 - DNA, 208 bp, Homo Sapiens
  misc_feature (172)..(172): n is a, c, g, or t
cggtagcaataggctataacatatagccgaggtataggctacactagctaggttcgtgtaagtacactctatattagcacaacgataaaattaactagtgatgcatttctcagaatgcatccccatcgttaagtgacacatgactgtccctcagtatcaccggaggactggnccaggacctcctggcggcaccaaaatccacgagcgc

SEQ ID NO: 355388 - DNA, 247 bp, Homo Sapiens
ggcgtcaagtggcccaatctaacagctccagggtagccacaaccatcgtgatggattgccattattgtgtgctagtggctagaggtagacccaatagaactctgccccaacagggcaacagccaagctcaattctccaagccccctgaacagaccttccacatccaggagaagctgttgttgtctagagctacttagtgtcagaatccaggccagcttggctgcttgatgcgactggctataggatt

SEQ ID NO: 355389 - DNA, 234 bp, Homo Sapiens
  misc_feature (215)..(215): n is a, c, g, or t
gcatgaccccatggcactgaaggtgctcaggttagtaaaggagtgtcatgcaggtcaacacatgtcgcacatggaccacaaagcctgccaccagcaggatgcacggggacttctgggaggggagtggacaggatacttatctgtgactggaatgcaggcgagaggcggagaagagagtgaaggataactcatagagggggcagcatttgtttcgngttgaaagaggcagaaaat

SEQ ID NO: 355390 - DNA, 166 bp, Homo Sapiens
  misc_feature (11)..(11): n is a, c, g, or t
  misc_feature (31)..(31): n is a, c, g, or t
agccccctctnacctctcacctcaccagtcncaataatacctgtccaccccccccaaaagtcctgtgcatcctgctggtggcaggcatttgtggtccatgtgcgacgtgtgttgacctgcatgacactcccttactaactgagcaccttcagtccaggggccatgt

SEQ ID NO: 355391 - DNA, 160 bp, Homo Sapiens
ccggcagccactcccatccatttacatgctgtccacggtgagttgagagttgactagttgcaacaaaaactgtatggctcacaaagcataaaatacttactatctggtctttacagaaaaagtttgcaggtcccggaattccatgagcgccggtcgctac

SEQ ID NO: 355392 - DNA, 254 bp, Homo Sapiens
ctcgttgtccctgtgggttaagttaactctcccagggcaaaggatgacttgcacgtcttcagtttgcttacagggcaaacgtgaaggcttaagaatcattcgttgattggtttgcccatctccgtaatcattgaaatactctgccctttttccattttctcctgattgttgttggtgctattttttcttgattagtctcaccaggattcattaattttattagtcctttggctctgttgattctccccccattt

SEQ ID NO: 355393 - DNA, 743 bp, Homo Sapiens
  misc_feature (58)..(58): n is a, c, g, or t
agcggctgaccttgcccaaaatgccaattcattctcatgcacagcccccagatgccanggaagaggatatcatacttgaaggtcaacagagcctgccatcccaggcttcagattggagccgatactcaagcagcttactggaatccgtctctgttactggaacactaaatgaggctgttgtaatgactccattttcatcggaacttcaaggaatttcagaacagaccctcctggagctgtccaaaggaaagccctccccgcatcccagagcctggtttgtgtctcttgatggaaagccagttgcacaagtgaggcactcctttatagacctgaaaaagggcaagagaacccagagcaatgacaccagtctggactctggggtggacatgaatgagcttcactcaagtagaaagctcgagagggagaaaacattcatcaaaagcatgcatcagcccaagatcctttacttagaagatttagacctaagcagcagtgagagtggaaccaccgtctgttcccctgaagacccagctttaaggcacatcctagatggagggagtggagtgatcatggagcaccctggagaagagtcgccaggaaggaaaagcactgttgaagattttgaagctaatacatcccccactaaaagaaggggcagaccaacactagccaaaagagatagcaagactaacatctggaagaagcgagaggaacgcccactgattcccataaattactccaaa

SEQ ID NO: 355394 - DNA, 1143 bp, Homo Sapiens
aagagtatcaaaggttcctaaggaaaagaaagcagtgcttttatttgacttgttccaaattaaacactccgccttgtgactcagcaatgctatctaccttcacactcctgagctccgccttcctttgttttgatacagtcattatatttgattagtattcccaggaatacccccacctagttactcaaatatttttcacttaactttttatactcttattttggtaataagcttacaatattaagaagctggggacttttttttaactgaagacttgagtcccctataccgggaatgcagctattaatagattcccatattttaaaaggaggggaaaggacaatttaatataaatttctgtttgtgcatttctgacaggccattattatctgctttgacaaagcctttctgaaacgcagtgtacaatgaatcttaatgatgttatgaaaacgagctttgctcggggctcttgattggagcttccggtatgtgatgacggtatgtcatgtatgcatggatgtactcaactgtgtttaatactctgaattttaattagaaaaaaatacaatagcagcaaggccctggtttctaagctgtatccttttattcatgtgggacatgagcaaatggcagaattaggggcgagtgctttcaatgctcgaaactaagcaagtataaatttttcctcttatttgcatgaaaggacaagacactgttatgccctgtcctaaatgtgaagacagaggttgaattttttaaaaaatatctttaaaagactgatcacaaaatccaaggtgctacaggaaacaagcacactcaagaaagtttttttctgaataacagttttttccaatttctccgttttataagacatttcctaatttatggggattttaattgaaaataaacttgagtcccaatagagctgtttttttctcacttcctacaaaatgcaaatgcaaaataaataactaagcagcttttgtttggttctgaaccgtatgtggcgtattgttattaggttctagcttcctttaaactaataaagaataagaaaacttgttatgttttaaaacaaacaagacactagaaagacacaaaccatcaacactcgacgcccacccaccaccatgcaaacaaggg

SEQ ID NO: 355395 - DNA, 932 bp, Homo Sapiens
  misc_feature (2)..(2): n is a, c, g, or t
  misc_feature (61)..(61): n is a, c, g, or t
  misc_feature (76)..(122): n is a, c, g, or t
  misc_feature (170)..(171): n is a, c, g, or t
  misc_feature (255)..(255): n is a, c, g, or t
  misc_feature (308)..(308): n is a, c, g, or t
  misc_feature (312)..(343): n is a, c, g, or t
  misc_feature (444)..(457): n is a, c, g, or t
  misc_feature (625)..(655): n is a, c, g, or t
  misc_feature (917)..(917): n is a, c, g, or t
ancaatttttttaagtttttaatgctgcagctttgtgtacagtcgcaaaaaatttccccgntgcgacctacaactnnnnnnnnnnnnnnnnnnnnnnnnnnnnnnnnnnnnnnnnnnnnnnngctacccatacagtttcatcttggtaacacatggtaaaataacatctnntaaatagtaaaataaagtaacaaacttttactcataatgattccaaaaatctacaaagaagaattattcagaatctgacaattnttttgtaatattcatggtataaaaggattgctcctgcgaaaaataagccaaanatannnnnnnnnnnnnnnnnnnnnnnnnnnnnnnncctactagggtgtactacagtctattttatagcaaaagagcactagacaaacaaagctttataacaaaaagccaggcactgatacatggtaaatctctgcnnnnnnnnnnnnnncttatcttcacttaattgcatcacaagtaacaagaatgaaaaaggccacagttcatatattttcaccattacatatgtctataatacttgaaatgagtatggcaaaaccagcactgcacaaagatgagtccacttcaagtcccatgagaaagagcatgtctctaaagnnnnnnnnnnnnnnnnnnnnnnnnnnnnnnngagaggcctaaaggccttggtgccccattgtgttggaattcatcatattccatcttgacttttttgcttccagtcagccagcagactaaatttttgtgcttgtttatgctgaaattgattcattcctgactcaagttcacttttggacacagatcatattctgcctgttggatgcaaaagatgaaaatcctcttaactccaagtcttggttcgactccctccccactccccaacccctcatcaaaatcaagatcacaaatanaaaggaaaattcagg

SEQ ID NO: 355396 - DNA, 1342 bp, Homo Sapiens
  misc_feature (101)..(132): n is a, c, g, or t
  misc_feature (322)..(367): n is a, c, g, or t
  misc_feature (423)..(484): n is a, c, g, or t
gcagagatttaccatgtatcagtgcctggctttttgttataaagctttgtttgtctagtgctcttttgctataaaatagactgtagtacaccctagtaggnnnnnnnnnnnnnnnnnnnnnnnnnnnnnnnntatatttggcttatttttcgcaggagcaatccttttataccatgaatattacaaaaaaattgtcagattctgaatatttcttctttgtagatttttggaatcattatgagtaaaagtttgttactttattttactatttaaaagatgttattttaccatgtgttaccaagatgaaactgtatgggtagcnnnnnnnnnnnnnnnnnnnnnnnnnnnnnnnnnnnnnnnnnnnnnnagttgtaggtcgcagcggggaaattttttgcgactgtacacatagctgcagcattnnnnnnnnnnnnnnnnnnnnnnnnnnnnnnnnnnnnnnnnnnnnnnnnnnnnnnnnnnnnnngataaacagttacaccttgttttcaatgtgtggctgagtgcctcgattttttcatgtttttggtgtatttctgatttgtagaagtgtccaaacaggttgtgtgctggagttccttcaagacaaaaacaaacccagcttggtcaaggccattacctgtttcccatctgtagttattcgatgaagtcatgtacatgaccgttctgtagcaataaatgtgccatttttataaactgtttctgacacttgtttcatttcattttgcattgtccatatagctatgattctcttctgtaagtaaaacgcatctatatttcattttccaagtgttggaggtattgacagcttaacaaacaaaacatacaagaaaaatcacaaaatcaaattgaaaagcaaagcacatgattgatcaaggaagagatgcccttaatgaaaatggaacgggatgcatgcaaaacaaaaagaaaactgtctagaggattaactaattgaaggaatataattaatgtgtgtgtaacactgaagctatgcatttgaagagctctgaactgcaccagtgttttcggttgtgctgcaggttgctaagtcaagtcagccttaaccttttgcaccagttggtcggctgtttggcagaacattctcagatcttttcagtcaaaaatctaagatgatttaatttggatcaactttgttaaaagctgaatattgttaactacagttaatattaacactgtatttatactttctcaaactacacccgccccaccacttctggttgcctctgttgactattaatccagatgtaacaaccagatgtttttttcctacctgtacaaactgacgtgtgcaaccagcacgaaa

SEQ ID NO: 355397 - DNA, 528 bp, Homo Sapiens
  misc_feature (116)..(116): n is a, c, g, or t
  misc_feature (238)..(238): n is a, c, g, or t
  misc_feature (244)..(304): n is a, c, g, or t
  misc_feature (360)..(393): n is a, c, g, or t
  misc_feature (397)..(397): n is a, c, g, or t
  misc_feature (402)..(402): n is a, c, g, or t
  misc_feature (473)..(473): n is a, c, g, or t
  misc_feature (483)..(483): n is a, c, g, or t
  misc_feature (513)..(513): n is a, c, g, or t
atttgaatcccttggaataaaaatggcacatttattgctacagaacggtcatgtacatgacttcatcgaataactacagatgggaaacaggtaatggccttgaccaagctgggttnggttttgtcttgaaggaactccagcacacaacctgtttggacacttctacaaatcagaaatacaccaaaaacatgaaaaaatcgaggcactcagccacacattgaaaacaaggtgtaactgnttatcnnnnnnnnnnnnnnnnnnnnnnnnnnnnnnnnnnnnnnnnnnnnnnnnnnnnnnnnnnnnnaatgctgcagctatgtgtacagtcgcaaaaaatttccccgctgcgacctacaactnnnnnnnnnnnnnnnnnnnnnnnnnnnnnnnnnnacanacaanaaagctacccatacagtttcatcttggtaacacatggtaaaataacatcttttaaatagtaaaataaagtnacaaactttnactcataatgattccaaaaatctacaaagnagaaatattcagaat

SEQ ID NO: 355398 - DNA, 1300 bp, Homo Sapiens
  misc_feature (55)..(55): n is a, c, g, or t
  misc_feature (99)..(369): n is a, c, g, or t
  misc_feature (705)..(713): n is a, c, g, or t
ggaggttctaattaacttaattaattaatttgaaaacagaatcctccactgtgtngccccaggcaagacctccgtcctgggccccgaatcctcgttgcnnnnnnnnnnnnnnnnnnnnnnnnnnnnnnnnnnnnnnnnnnnnnnnnnnnnnnnnnnnnnnnnnnnnnnnnnnnnnnnnnnnnnnnnnnnnnnnnnnnnnnnnnnnnnnnnnnnnnnnnnnnnnnnnnnnnnnnnnnnnnnnnnnnnnnnnnnnnnnnnnnnnnnnnnnnnnnnnnnnnnnnnnnnnnnnnnnnnnnnnnnnnnnnnnnnnnnnnnnnnnnnnnnnnnnnnnnnnnnnnnnnnnnnnnnnnnnnnnnnnnnnnnnnnnnnacgtctagtcggctcacgggtgcttgagccagaagtgggaagggtacacttgtattttgggctcaaatggttttcaaataaaatacatctgaccaaataaagtgaacacagtcctgagccctcctctctccagatatgcatgcaatccacaccatcaaaagaagagttcactgttcccaaggccaagaagaggctatgctgtactgcaaagaactctatagcaaaatcgaacacccaaattaagtgccagaatgatgcagcccgctctcaccaggaagaacgacatgtgagaaaacttatagcagatgcaaaaatgtcaacccaccatgttatttnnnnnnnnnttttatcaggatacaaggacacttcactgtttttaacccacacaaggttaggtaatgtttaccttgaaacataatcgcatatggccctttatgccactcacctaggcctttaataatgagggcaattgctaagtgtgctgtctcttctggggacttctctctgaaagggggatgatatattgataaaatattttattaatcagttaagaatttttgatctacttgaaaaagattaaattataatatttcactttgaaactgctattgctcatgcaaaagtacttgattttcatactatatggagctcacaatctttggactacacaaacattctctaaaagggcaatgacttatattttccaaagtttagacatgacatccaaaggacaaaaggtaactattttttttaccaatgtggttggaacagtgacaacgagcaatgtattcaccaaactgatcaaaaaatctgcctgtggttccttcactgtatgtgtgtgcagagaaaggcagaaaagcttctatccatgtcattgtctctcttgcccatgtgccagtaatttgaataagatgagaatgggccaggcgca

SEQ ID NO: 355399 - DNA, 769 bp, Homo Sapiens
agcgggggttcccgctgagcccgcagcctccggcagccgggaaagtgcgggcgcggggccgcagcctgcccgcccggagcggcccaggagcacgccgcggggagcgcgggcgtccggggctggagtcgcgcagaatgaagacaaacacagagatggtgtgtctaagaaacttcaaaaggtgtagacctcctgactgaagcatattgtatttatttaactttttttcactgtatttctgtcctcctacaagggaaagtcatgattacactaactgagctaaaatgcttagcagatgctcagtcatcttatcacatcttaaaaccatggtgggacggcttctggtattacatcacactgatcatgctgctggtggccgtgctggccggagctctccagctgacgcagagcagggttctgtgctgtcttccatgcaaagtggaatttgacaatcactgtgcctgtgccttgggacatcctgaaagccagcatgaacacatcctctaatcctgggacaccgcttccgctccccctccgaattcagaatgacctccaccgacagcagtactcctatattgatgccgtctgttacgagaaacagctccattggtttgcaaagtttttcccctatctggtgctcttgcacacgcctcatctttgcagccttgcagcaacttttggcttcactacccccagtaccagttccaggctccgaagcatttgtggccatccttcacaagtgcttcgattctcccatggaaccaccggccct

SEQ ID NO: 355400 - DNA, 805 bp, Homo Sapiens
agcggagcgccggggcttcccgctgagcccgcagcctccggcagccgggaaagtgcgggcgcggggccgcagcctgcccgcccggagctggcccaggagcacgccgcggggagcgcgggcgtccggggctggatgtcgcgcaggtaatagttaacctcttctgctgagaagtcagaaggtgatctctttaatgctttctttttaatgaatttctcagaattgacgactaattgcagaggttccagttgaccagcattcataggaatgaagacaaacacagagatggtgtgtctaagaaacttcaaaaggtgtagacctcctgactgaagcatattggatttatttaatttttttcactgtatttctgtcctcctacaagggaaagtcatgattacactaactgagctaaaatgcttagcagatgctcagtcatcttatcacatcttaaaaccatggtgggacgtcttctggtattacatcacactgatcatgctgctggtggccgtgctggccggagctctccagctgacgcagagcagggttctgtgctgtcttccatgcaaagtggaactttgacaatcactgtgccgtgccttgggacatcctgaaagccagcatgaacacatcctctaatcctgggacaccgcttccgctccccctccgaattcagaatgacctccaacgacagcagtactcctatattgatgccgtctgttacgagaaacaggtccattggtttgcaaagtttttcccctatctggtgctcttgcacacgctcatctttgcacgcctgcgcgaactttgc

SEQ ID NO: 355401 - DNA, 2148 bp, Homo Sapiens
gcgtggtcgcggccgaggtacgcgggatgaatattttatattaaaatatgaaggtttgagagcaggccgttggctactgactgtattttgttttccttttaccattttatcttgctttggaggaccttaaatgctactgaaacttacctgagaaccataggactgtggcaaacaaaaccaattcatgaagtgaattaatgatgaggatctgaaaacttggctggggctatatatactggaagttgaaggttaaaggaaaagcacaagaaactttggaagcactttttctgcatacttagatgatcttcatgggcccacagggtaccaggataaagccgaactggtaccatctactcttttgaagtgttttagtctagttattggatcagtgaaaaacattagtatacgtttttaaataggctaatttttcaacttggatcattaggcttacgtactacttgtttcaaatgtgtcaaatacaaaaatggtaactaggttgacagatactttgtatttttcttttgaattcagacctggaatgtaagtaagtgacaatgcttatggaaagccagttagttagaattggaaatctgtcttgtcattttacaagcattagattcctttcctgtgtgaagaaagcctcagtgaaacaggtctttgccataactttatgaagtgctacagaaagcacaaagaattgattcatgttcatcaatacctgctgagagtactgtcccagggaatatccagtggatggattcatcatccaggaggttcaaaagtaagatggttttcaaatcatttttgagactggttgcataacagcagggtacctgaaagagccttctgggagttagtgaactaggtagattgttttgttcacataacgccaccatcaacttaaagtgaattgtctttgttataaatgaggtcactatggacttaccctaaagatcttctgtacttctgtcttccataggacaaatgataagtactacatacctcatctcttgggttattattgtagtcttgcattcatggttatgaatttaaaaataaataccaattatggaaatagtactaaaggcttgcgcggcatgaaacattaattggtttaaagtccctttataaagagtgctacatggtttagataaaggaaacatataactattgagttacaggggattttattaattataaaatgcaatcaatttaaattacgtaggtttaagactagtcccttggataagccccaagcgaatttgtcttcagattattaaaattagtgctgtaaatcagggtgggcaattcacagcctttctgaactgactgaactagagcttgcagtgaagtgttctgctgagactgagcaccttacagatatttttctccagaagatggtgctgggtaataaaatcatcacaattagggaatggttagtggtctctactgtggcaaatgccaactgttggaattcactttattgtagaaaaacccaaactgagactcttaagttttgtttagcaatgtgtttctggtatgaaacaaactactgtgtcactgtccaggtaggaaacaattctttcaactgggttttcagcataaatgggaactgatgtagaaggcaggatttagcccttctaggcaaaagaaaagctcagttgggtttcacgagtgttcctgtgcttatattcagtctgtgcctacatgttctcatgcatgtctaacctgatttacctcttacctgtaacctaccttatcatgtggcttttaattggcagtcactcgccatttctaagcagatatagtactacctttcagaactcacattggcaagtgtaaaaagatgacttaaggtgaagtgaggacaaaatcacattctgcatactaacctatttttttctccctttaaggtgctaaacttgcacctcatgtccactcagtaacaagtattgggacgtagagcacagcctcactcagctctgaaaggtaatacagcctgtgaggaagtgagccagcagtggcctttgcaattgtggatcttaagctctgctctcagcagatttcaggtgtaaccatttgttaactgtactgaaggtgtgtcctcaagaagaaagtgttcaaattaaaaaagctgctgccaagtac

SEQ ID NO: 355402 - DNA, 483 bp, Homo Sapiens
  misc_feature (49)..(49): n is a, c, g, or t
  misc_feature (62)..(62): n is a, c, g, or t
  misc_feature (65)..(65): n is a, c, g, or t
aaaaaaaccctcagtgaaaacgggtcctttgccccaaaaacttttatgnaagtgcccaacanganaagccacaaaagaaattggattccatgttccatccaaataccctgcctgaagaagtaactgtcccccaggaatatccccagtggatggattcatcatccaggaggttcaaaagtaagatggttttcaaatcatttttgagactggttgcataacagcagggtacctgaaagagccttctgggagttagtgaactaggtagattgttttgttcacataacgccaccatcaacttaaagtgaattgtctttgttataaatgaggtcactatggacttaccctaaagatcttctgtacttctgtcttccataggacaaatgataagtactacatacctcatctcttgggttattattgtagtcttgcattcatggttatgaatttaaaaataaataccaattatggaaatagtaaaaaaaa

SEQ ID NO: 355403 - DNA, 559 bp, Homo Sapiens
  misc_feature (424)..(424): n is a, c, g, or t
  misc_feature (501)..(501): n is a, c, g, or t
  misc_feature (516)..(516): n is a, c, g, or t
  misc_feature (541)..(541): n is a, c, g, or t
ggagagagtttgaacagaaaaatacaattttccccctattcccctcctaaatactcttcattgatacaagcttctgtgctaatccagaaaatggcaagaaattaatcttcacaacgtgattaagagttctgttctttttgtaattgaaatgtgagtggctcacaattttacaattcaaaataacgtcatgaacaatgaccctttagggattttccacaatctttccctccaattcccaccatgctggtgttgctacagggcaatcagggaagtgcaggtaggggacttcagagataatgatcaaggggataggtgaggatgggaagcctgggcgtctttctttaggaaggtcccacaacttttctaggaaggtacttgcaggtcttttcccctcctggatttgtggggtggccacagagggaanaggggccatagggaaggaacctaaggggaatatgggtggggaagttttaggtccaaggtaactgggttttgaagggnatacggaggactgtngtacttaggtagggatatacttgantcccagggcaaacaatag

SEQ ID NO: 355404 - DNA, 864 bp, Homo Sapiens
  misc_feature (469)..(485): n is a, c, g, or t
tcccaggcacccgctgaatttctgaggccttgcttaaagctcagaagtggtttaggcatttggaaaatctggttcacatcataaagaacttgatttgaaatgttttctatagaaacaagtgctaagtgtaccatattatactcgacgtcgatcatttctcagtcctatttctcagttctattatttgagaacctagtcagttctttaagattataactggtcctacatcaaaataatgcttctcgatgtcagattttacctgtttgctgctgagaacatctctgcctaatttaccaaagccagaccttcagttcaacatgcttccttagcttttcatagttgtctgacatttccatgaaaacaaaggaaccaactttgttttaaccaaactttgtttggttacagttttcaggggagcgtttcttccacgacacacagcaacatcccaaagaaataaacaagtgtgacnnnnnnnnnnnnnnnnncctaaatgctactgttccaaagagcaacttgatggttttttttaatactgagtgcaaaaggtcacccaaattcctatgatgaaattttaaattaatgggcacctttcaacatcatttgcttccttatctacagtttgattcagaaatctgcattttttattcttttatatgacttttaagtaaaagatttatatggaaccccccaaccagcaccaaacaaaaacccatgtccggcccgccctcggcccctcaaaaaatttttcaaaaccatttccttttggcgccccgggccccccagtagggtaagaggaaacatgggcccttaacctggtttccctaaggaaaatcctggggcactgaaaataggggtttgggaatt

SEQ ID NO: 355405 - DNA, 3051 bp, Homo Sapiens
  misc_feature (2493)..(2495): n is a, c, g, or t
  misc_feature (2499)..(2501): n is a, c, g, or t
  misc_feature (2503)..(2503): n is a, c, g, or t
  misc_feature (2512)..(2512): n is a, c, g, or t
  misc_feature (2514)..(2515): n is a, c, g, or t
  misc_feature (2517)..(2517): n is a, c, g, or t
  misc_feature (2519)..(2519): n is a, c, g, or t
  misc_feature (2523)..(2523): n is a, c, g, or t
  misc_feature (2527)..(2527): n is a, c, g, or t
  misc_feature (2530)..(2532): n is a, c, g, or t
  misc_feature (2536)..(2538): n is a, c, g, or t
  misc_feature (2540)..(2543): n is a, c, g, or t
  misc_feature (2546)..(2548): n is a, c, g, or t
  misc_feature (2550)..(2550): n is a, c, g, or t
  misc_feature (2553)..(2553): n is a, c, g, or t
  misc_feature (2595)..(2595): n is a, c, g, or t
  misc_feature (2597)..(2597): n is a, c, g, or t
  misc_feature (2599)..(2600): n is a, c, g, or t
  misc_feature (2602)..(2602): n is a, c, g, or t
  misc_feature (2612)..(2613): n is a, c, g, or t
  misc_feature (2615)..(2615): n is a, c, g, or t
  misc_feature (2629)..(2629): n is a, c, g, or t
  misc_feature (2710)..(2710): n is a, c, g, or t
  misc_feature (2715)..(2715): n is a, c, g, or t
  misc_feature (2728)..(2728): n is a, c, g, or t
  misc_feature (2739)..(2739): n is a, c, g, or t
  misc_feature (2762)..(2762): n is a, c, g, or t
  misc_feature (2775)..(2775): n is a, c, g, or t
  misc_feature (2788)..(2788): n is a, c, g, or t
  misc_feature (2792)..(2792): n is a, c, g, or t
  misc_feature (2796)..(2796): n is a, c, g, or t
  misc_feature (2804)..(2804): n is a, c, g, or t
  misc_feature (2807)..(2807): n is a, c, g, or t
  misc_feature (2809)..(2809): n is a, c, g, or t
agcgtggggtcaggaagaaagaggaaagagaagagatcgctcagggtctgtggtgtgtggtccatcctcttgctgagcacattgaaaggaactggctatctttgatctcttcctccagatcagagtcaaggaatgtgtttataatggacacttcatccaaagaaaatatccagttgttctgcaaaacttcagtgcaacctgttggaaggccttcttttaaaacagaatatccctcctcagaagaaaagcaaccatgctgtggtgaactaaaggtgttcttgtgtgccttgtcttttgtttactttgccaaagcattggcagaaggctatctgaagagcaccatcactcagatagagagaaggtttgatatcccttcttcactggtgggagttattgatggtagttttgaaattgggaatctcttagttataacatttgttagctactttggagccaaacttcacaggccaaaaataattggagcagggtgtgtaatcatgggagttggaacactgctcattgcaatgcctcagttcttcatggagcagtacaaatatgagagatattctccttcctccaattccactctcagcatctctccgtgtctcctagagtcaagcagtcaattaccagtttcagttatggaaaaatcaaaatccaaaataagtaacgaatgtgaagtggacactagctcttccatgtggatttatgttttcctggggcaatcttcttcgtgggaataggagaaactcccattcagcctttgggcattgcctacctggatgattttgccagtgaagacaatgcagctttctatattgggtgtgtgcagacggttgcaattataggaccaatctttggtttcctgttaggctcattatgtgccaaactatatgttgacattggctttgtaaacctagatcacataaccattaccccaaaagatccccagtgggtaggagcctggtggcttggctatctaatagcaggaatcataagtcttcttgcagctgtgcctttctggtatttaccaaagagtttaccaagatcccaaagtagagaggattctaattcttcctctgagaaatccaagtttattatagatgatcacacagactaccaaacaccccagggagaaaatgcaaaaataatggaaatggcaagagattttcttccatcactgaagaatctttttggaaacccagtatacttcctatatttatgtacaagcactgttcagttcaattctctgttcggcatggtgacgtacaaaccaaagtacattgagcagcagtatggacagtcatcctccagggccaactttgtgatcgggctcatcaacattccagcagtggcccttggaatattctctggggggatagttatgaaaaaattcagaatcagtgtgtgtggagctgcaaaactctacttgggatcatctgtctttggttacctcctatttctttccctgtttgcactgggctgtgaaaattctgatgtggcaggactaactgtctcctaccaaggaaccaaaactgtctctaatcatgaacgagctctctttccagattgcaactcaagatgcaaatgttcagagacaaaatgggaacccatgtgcggtgaaaatggaatcacatatgtatcagcttgtcttgctggttgacaaacctccaacaggagtggaaaaaatattatattttacaactgcacttgtgtgggaattgcagcttctaaatccggaaattcctcaggcatagtgggaagatgtcagaaagacaatggatgtccccaaatgtttctgtatttccttgtaatttcagtcatcacatcctatactttatccctaggtggcatacctggatacatattacttctgaggtgcattaagccacagcttaagtcttttgccttgggtatctacacattagcaataagagttcttgcaggaatcccagctccagtgtattttggagttttgattgatacttcatgcctcaaatggggatttaaaagatgtggaagtagaggatcatgcagattatatgattcaaatgtcttcagacatatatatctgggactaactgtgatactgggcacagtgtcaattctcctaagcattgcagtacttttcattttaaagaaaaattatgtttcaaaacacagaagttttataaccaagagagaaagaacaatggtgtctacaagattccaaaaggaaaattacactacaagtgatcatctgctacaacccaactactggccaggcaaggaaactcaacttttagaaacatgatgactggaagtcatgtcttctaattggttgacattttgcaaacaaataaattgtaatcaaaagagctctaaatctgtaatttctttctcctttaaaaaaatgtctactttgttttggtcctaggcattaggtaatataactgataatatactgaaacatataacggaagatgtcagatgataaaactaagcccggaacgnnngaannnanataaaggangnnanancacncacngannncacnnnannnngcnnngngcncattgatatatattagctgtacccctagaagaacaattgtcncnanngncacacatggnnanattaaaagtaatcnctgaactgtgtaatgtgtctagagtaagcaaatactgctaacaattaactcataccttgggtcccctcaagtattaccccnatagnattcccccccatngccgtccccanctgtgtattttaataatgatctnaggatggagcagnacatggagaggangatnccantttaagcnccncnatttctttgaaatacaataatttatatagaaatgtgtagcagcaaattatattggggattagaattttgaattaatagctctcctactattaattaacatgtgctttttgtgtggcgctataagtgactatggttgtaaagtaataaaattgatgttaacatgcccaattattgttcttttatgaatccaatgaatttaaaactattgttaaatataatactgccccactttaatatatgta

SEQ ID NO: 355406 - DNA, 795 bp, Homo Sapiens
  misc_feature (728)..(728): n is a, c, g, or t
  misc_feature (739)..(739): n is a, c, g, or t
aaaaggagaaaacaaattctcattctaacttcattatatagatgatatctggacagaaaactaagagcatcaacactatttactttcttggttgctctacctttagttcaccacagcatggttgcttttcttctgaggagggatattctgttttaaaagaaggccttccaacaggttgcactgaagttttgcagaacaactggatattttctttggatgaagtgtccattataaacacattccttgactctgatctgtcaaagttagtttttaaagtaaaaataaataaatactacgcaatttattaaatttttttattcaacagtataccacaattctatagacgcaatttaaagtgaatctaccttttgttgtcacagtaagttggcaaatgttttcaattaaaatcaaccaggatctctgattaactaatcctgctattggaactctgtagccagcattctttctcaatctgcccagtttaagcctcattatggcaaagaataaatttaagtgttgcctttggaataaataatgaggcagaattttgctaactttgtggtcttgccagtttaaactaggagcaagcaggaaaggaagaagaggaattcaactatttgaatattgattcattaggataaagtctttaaagcttttaaatctatcttcttagcaaaacaaatagaagttttacattcattataggtccctgtaccaccttatgattncctgtagcacnccaatgtgagccttaaaatatgacaaaaaagaagaggtcccaattggtgtatgttt

SEQ ID NO: 355407 - DNA, 1014 bp, Homo Sapiens
  misc_feature (18)..(18): n is a, c, g, or t
  misc_feature (78)..(78): n is a, c, g, or t
agaggccaggaagaaagnggaaagagaagagatcgctcagggtctgtggtgtgtggtccatcctcttgctgagcacanttgaaaggaactggctatctttgatctcttcctccaggggatgaactgtagcctccttggaacatactacacttgcaataatttgcgcattaaccatcaagacacttcagtaaagctatgcagtgccaatagtttaagctggatcctattttgccctaacacaaagtgaactgagatgactatatttatatttcattatacttttgaattttagttacagtgatttttgtgtcaacacctccatatattagataacttaaaatgtgctatagtatctcaagtttttcagtagtgtttttaacataattattttttctctttgacattagcattctagatgtaacactttggatcttttaaagataaatttaggataaatgatagcagattttattattaaacaatttatttgtattttctggtcactgactttaatattatgactgatgagaaataatatgatatctgaatccccaaaaacagaaggccaatttgaattatacaatttaatccttggaagaatattgcaatttaagcccagaaatttaataattacccgtgtcctgattttaaaacctttctggctggaatacctcttgcttggcaatatttttactccatagttttgtagtaaagatacctatttaacattgtataactctgcatttcccaaaccctgttttccttgtcctggcaaaatactgttctagaaaagtagtcctagtgactcagtagatataggaagttggctgttggtatcagatactgttaaggaagaatctctatattcttcatttcttaaactttgttttttaaatcagtaatagatgtcgaattttatcaactgatgtttttcatgtaatgaaattctattttttattttgaattattcatgtggtaatttaggtgaataaatttcctgtaattaaccaaaaa

SEQ ID NO: 355408 - DNA, 201 bp, Homo Sapiens
tcagtggaggaattaaaactggtggagaaggggaggtcaggttatcagttgaaatgccaaggttatctctaatcttagctagattctgccaaagttcacagaggtaatcaaaaactcgagcatgtatttaaggatccatgattgaatttacatctcccaaaacgcctagcattcttcgccacattacagtagcaacatcag

SEQ ID NO: 355409 - DNA, 1285 bp, Homo Sapiens
  misc_feature (495)..(606): n is a, c, g, or t
cccctgcccctcatgctccgcctgcctccgagacggctgccttctctttcctctctgctcactttcttctctttctcttctgcttgttgtccgccttcgtttttcttgttcatgacttatagcctgcccccgtctctgctcgccagccctcttcggtggtgtgcccctcagtgcgcggcttgtcttgttctctgtctatccgtctgtgtctctgtcccgctcgtgattctttccccgcgcatctcttgtctcgccgcattgtgttaccgtcctctttttcgtctcaatacctgttctttagcggcttgtgttcccttcgattgttcgtgcagcctcctgtactcagcttctatctcttttgtctattagagtctgcagtcacagctatcctgatttgtttattcacttgtttgtcgtcgtcgattgtttcttttcttctttttcgttgcgactgagggtggtgtgcttgctgctgtctcccttttgggtcgctcnnnnnnnnnnnnnnnnnnnnnnnnnnnnnnnnnnnnnnnnnnnnnnnnnnnnnnnnnnnnnnnnnnnnnnnnnnnnnnnnnnnnnnnnnnnnnnnnnnnnnnnnnnnnnnnngttgtgttgtttgtcaatgaacataaaataattttattaaatataacaaaaattaaaacataacaaaagtatcacagtattatagtaccatttaaatataacatagaaaaatactacaaaataagaaatacaaaaacaaaaactaggtaagatttttatttactataatgggtgtgcttgccttgttcataaattcattccagtctggaacacaggaagataatgctacccgcataactgctgcacaattcagcccatttctttcctttgtttttaactgcgttaagatggaaaaccctagttcacacaaactagatgttgtgaatggtagcaatagcaggacactctttctacttaacaatggaaagtcttcctttaccttcatccaaaatgctgataaacttaaggtttcataatcattcttcaatgtatatgaagaactaagctgcaataattcattctcttcttcaggcaccaagtttagctcaattattgattcagggtttcgaaaagcaaatggatcttttacccaactgttttcccttaatgtttcaaatttttcttctggaaagaaatggttaaaagtttgagacagagaagtgagatgcaacaatatctctaattttatttctttcaaaatgttttcattaataatattctcttcaatatgctgcaaaaa

SEQ ID NO: 355410 - DNA, 333 bp, Homo Sapiens
ctagctgactctagaggatacacggctcatttcagctcattctcttcttcaggcaccaagtttagctcaattattgattcagggtttcgaaaagcaaatggatcttttacccaactgttttcccttaatgtttcaaatttttcttctggaaagaaatggttaaaagtttgagacagagaagtgagatgcaacaatatctctaattttatttctttcaaaatgttttcattaataatattctcttcaatatactgcaaaaatcttggaaacatgtaatagctaggacgattacttttaagtctcacttgccataacaataatgtctttcgaaat

SEQ ID NO: 355411 - DNA, 925 bp, Homo Sapiens
tgcgatatgggaatcaaggtctctattggaaccagaacccctaaggcaaagtgttgactgccatcctactccatgccagctagtaatgacaaactgcacagtaaatatgcataggtaaatatggaaagcagattacccgtgatataagtatttatcatgtattctgtgtctggaatacaattcaatgacatatttcagaaaaatcttctcaagtactggctgaaagagtgggggatacattaagagactgcaaataaactggcaatcacaagaacttttttagataaaatggagttgttccgaaatgtatacatttttcattccctaaccagaccttattcttgtctttttaaagaaaatcaaatcttctcggccacctagagatgatttcctttgtatcccaccagatggttcagatcttctttaaatggatcatagccttgttcttttaaacaacgcagtccccagaaaagctggtccaggggaggcagttcttcccaaggaacccactcccaactttcatttttttcaggctctacattctttggttctgaatcatgagtcacatccacttctcctttcattaatatagtaacataatggtaattctccttctcaatgaaagaattcacacactgaggcaaagtgaacatttttcaggtgaagagctgcttcttcccaggtttccctttgagcacattcttcccaggtttcaccgaactccagatgacctccagggagttggaaactgccagctccaaccgagcctttcctcttccccaggaggacgcaacgcggatgcttgcagctggtcaccacgactccgactccgactcctggccgccgcccgcgcggctgtgcgctggccgtcatagcgcgcgggaggacgcgcctggcagcggcaggaagtgacgcgctcactccc

SEQ ID NO: 355412 - DNA, 358 bp, Homo Sapiens
  misc_feature (23)..(23): n is a, c, g, or t
  misc_feature (57)..(57): n is a, c, g, or t
cccatattattccggggtccccngcccatatgtgtggggtacccctactgatacacncgtattcaaagtttatgggtacaacaaagacatagtacatgtacataatatgtatgtgaatatagttaaatatatttcttcacaatattttaaactgtgaagaactttatcatacaggaaacttaaaacaagaggtgtcaaaagacccaaattaggtgcattttacttgtttatgatggcataaccattgctttaaaatgtttagacagtagaatattgaatttatgctctatttttgtttatttaagcaacacttaatgtaaaagtgcaacaggcaattgaatccaaaatttcaacgaca

SEQ ID NO: 355413 - DNA, 1032 bp, Homo Sapiens
  misc_feature (674)..(724): n is a, c, g, or t
cggtggcttccccccccggctcacttctccgacgtcgtcctatcgctgttttctcttttatgccgcttgtccgcgcctcttttcctctgtactttctctccctcccttggttttgcgctctccgtcgaaagtctgcccctgtcctcctagtcctcctttgggtttcttttatcctcctccttcgtattctatcttctgtctgcgctttgttcctcggttctttcgtccgcttgcgattacttgtttgtgcgaagtcccccctagtccgcctcccctcttgtgggcgtgcgagaacctctatatggtctgatagccgcgccttcccgcccaaagggtcctcaatttggcccaatgctcgtgtttctggtccttccaacatctcccctctgggtgtagtaggtgccacctcagggcacgctctcttggtggacgtgtcacagacgactcgcgcaccggtaagtctgcgctttggacgtgttccgcgtgtatgctcttggaagtgcccacgtccccttggcctccagttcaactgggcaattcatcgcaccagctacttctaacgtaaagagctacctaaatatgtagccgtggcttggtcggcggctcgcctggtaatgcccgagctacatttgggaggctagaggcgtgagaatctctgtgatacccatgcgatnnnnnnnnnnnnnnnnnnnnnnnnnnnnnnnnnnnnnnnnnnnnnnnnnnnttacagagggtagactcctccgtctcagaatatatatgaaataaaataaacttgtgagctggccccaacccctcctaggtaatcacagctccaccgtactggtgccgaccgcagtggccaagttgcgacagctgcccacggcccctccctctgatgcagattcagggcttctcttcgatcatgatcgggtatttgattctgtttttccatgactgcaaaaccctctttcctctcctctatttgggacaagagcctggttttctacgctgcccttggccaccacactgataaccccacgagctggatga

SEQ ID NO: 355414 - DNA, 1200 bp, Homo Sapiens
  misc_feature (1063)..(1063): n is a, c, g, or t
  misc_feature (1072)..(1072): n is a, c, g, or t
  misc_feature (1078)..(1078): n is a, c, g, or t
  misc_feature (1100)..(1100): n is a, c, g, or t
  misc_feature (1121)..(1121): n is a, c, g, or t
  misc_feature (1132)..(1132): n is a, c, g, or t
  misc_feature (1143)..(1143): n is a, c, g, or t
  misc_feature (1162)..(1162): n is a, c, g, or t
  misc_feature (1176)..(1176): n is a, c, g, or t
  misc_feature (1183)..(1183): n is a, c, g, or t
cagcctcccagcaggcccaaccatgaatcctcggagaagacgacaaagggacaaaggggtggatccagagaaggcccccagcctgactcggcagtcccaaaaccctccgtctctgacagctcccttgggcatgccctctgcctgctcctgtctcccgtgtggcccagccccggaagctgccatcattctagcgggtcctcccaccgccctcactgtcctgcccaaggggacaggcctcaagaagagcaaacgactgctcctggagtccctcatgcggaggaggattgcacacctgaagtggggtcttccccggcggatcctggagtcctatttcctgtttaacttcttaggatcttgctcattgacccttgctggggcgaggctctctggactgaacacaggccaggagctccaagcccagcaggaaaggtattgtgaggcccaaggctccccaccaggccttaagtccccagagaggttccagagggttcagcgcccagacagaaaaagctcgaaacttcctatacaagccagagctctggagaggaacagaccgcacatgtcagagcccattaagcatttccatccagcctgaaaaggccaggagagtcaggccaccagggggcgccagagaaccacaggagatccaggaagcgcttgctaggaccaagctcccagctcccaggacccccaggccggcagcggagtccaggagctggtgtggcccacaaaaggtctggagagcctcccaggtgagaaacagtaggggcaggaaaatgatcaggtcaagggtctcccagctggcagagagggctcccagcagagtgaggacttcattctctagggcagaccacgcccactggaggaaggaatgtacatcctgggaggcctctaagctccccagactcaaatgccagcagctcacatactggagaagaggaagcctggaatctacagggtgcagaggggctggtcagcagccttcctgccattctgcagaacctgtcagcttcaaagggaggctccactctgcggtggcaaagctgggcctgacccttctggncaagatgtnctggtncccacagctcgccaagcgcaanactttggcccttaacctgagncttaggggacntgattttattntgcctcccaaagtgggtgntctcgtgcaagggnggacagnttcggggtcacattgtt

SEQ ID NO: 355415 - DNA, 533 bp, Homo Sapiens
  misc_feature (200)..(231): n is a, c, g, or t
taggctgacacctaactcttctttcatttcttctacaactcatacactcgtatgatacttcgacactgttcttagctcaatgagcatgtttagactttaacataagctatttttctaactacaaaggtttaagtgaacaagagaagcattctcattggaaatttagcattgtagtgctttgagagagaaaggactcctgnnnnnnnnnnnnnnnnnnnnnnnnnnnnnnnntgtattttatgttatatataaatatattattacttgtaaatataaagacgttttataagcatcattatttatgtattgtgcaatgtgtataaacaagaaaaataaagaaaagatgcactttgctttaatataaatgcaaataacaaatgccaaattaaaaaagataaacacaagattggtgtttttttctatgggtgttatcacctagctgaatgtttttctaaaggagtttatgttccattaaacgatttttaaaatgtacactcgagcacgccgacgaaccccaaaaccctaaaacttgt

SEQ ID NO: 355416 - DNA, 1544 bp, Homo Sapiens
cctttcacaggagctgttgagaaggtccgttgctgcagcatttctagccctgtggcactcaccaccctttacagatgtcagcccaccttgccagagatttcatccatgcatggtagagagcattagagggtaaaaattggggggcagtctttggcaggatatactgtcaaagtttaacaatgttgcttcgtaaggaaggtagaccttgtaacatggttatctttaattgtgattgatatgttgacaaaataacagtagcaatggcgtgtcgtaagccagaaagaacgtctgatgtacgcaggtactaaattcagataagcattaaagtttttagaaatcaggctctcttaagctcactaattttggtcattgaagtgaactgaaatgaaaggatataatttattctcttgcttcattacagaatcttgctgctgagaaaacatacaataacctagatatcacggtgacccaggcccttcagcaccgttcacagtattttgaaggtgttgtgaagtgcaataagctggaaatactggagaccatcgtggacagaatagtaagagctgaggtccatcggctggtggtggtaaatgaagcagatagtattgtgggtattatttccctgtcggacattctgcaagccctgatcctcacaccagcaggtgccaaacaaaaggagacagaaacggagtaaccgccgtgaatgtagacgccctaggaggagaacttgaacaaagtctctgggtcacgttttgcctcatgaacactggctgcaagtggttaagaatgtatatcagggtttaacgataggtatttcttccagtgatgttgaaattaagcttaaaaaaggaaagattttatgtgcttgaagattcaggcttgcattaaaagactgtttttcagacctttgtctgaaggattttaaatgctgtatgtcattaaagtgcactgtgtcctgaagttttcattatttttcatttcaaagaattcactggtatggaacaggtgatgtggcataaggtgagtgcacggtatgttcagatcacagtgccttatgtccgaatacagcaatatgtcaccgccgcagccggggcgcacgcgtgtgaaacaacaccgagcttgaatgtggaagtctttgaaccttttaccaaatcagtttgttttctttagatttgtcaaaaagttgtaatttgaatataaataattactttaaaattgtaatgacacttttacacgtaagtgttttgttctgggctaccgtgtcaacgaggctgctttacaacagctttatttatttttactttcatgcaatttttttacacatcttttggtggagtaaacttcaccacatccatgaataaactctcagttattttgaaatggcaaatttctcattatttaagtttggatctggaaaggacatgacttctgaaatagccgctgctgggttttaaaagctgaggtctctcaaagtgtggaggagacgttgccgtcaggcgggagccaagtgccgggaagatgtctattttttttcttgtgtattg

SEQ ID NO: 355417 - DNA, 229 bp, Homo Sapiens
acaccaatggcagccgtgcccaatggcagccgcccaaggcagcccggaacaaaacacttacgtgtaaaagtgtcattaaaattttaaagtaattatttatattcaaattacaactttttgacaaatctaaagaaaacaaactgatttggtaaaaggttcaaagacttccacattcaagctcggtgttgtttcacacgcgtgtgccccggctgccattggggagtgccgt

SEQ ID NO: 355418 - DNA, 800 bp, Homo Sapiens
  misc_feature (623)..(678): n is a, c, g, or t
ccaagtaggttcccctgtaacctcctacaaagcaatattccaaaggaacattttaactgtaaaggctggagacaagaaaaaataagtagatcgttttaataacaattatttaattgcctataagtttgctgtttcagaggctagcccaaaggcatcaaatttaataaagttaaacaaattgatttacttcagagcaaatatgatcctattaaaataatatagggtaaataccctacctctttaggaaagggcaaaaatgcaaaggaagctttcttttaaaactaaaagggttttttggggggggagttggcggggaggaaataaggctaacagaggttgacctaaaattagccttacaaaggagaaaggaccacattgcttacttgaaacagacaatgaaaacaaccaaagtgatatataaaatagttgatgagaactagacttatgactgtagtttactagagtttagttttcagttgctgaagtagctcattttctcttactaatgtttggttcctcagggaagaatctcacttgactagagaggaggtgggaacagaagagagaaggaggcagggaaatgtatttcttaaggctcaccccttcacagactgacagaatgnnnnnnnnnnnnnnnnnnnnnnnnnnnnnnnnnnnnnnnnnnnnnnnnnnnnnnnnagaatggactctaagctctgtcacccaaggctggaaatgccaatggtgccgatctcggcttcactggcaagcctccgccctcccggggtttctcaccctttcttcctggcctccaacctccc

SEQ ID NO: 355419 - DNA, 784 bp, Homo Sapiens
ttaaagcactacatctgttttcactaattgttaatttctgtttgaacccttcatttaattttctcatagatttaagtaaacagatgtattttgcacagtgcacttatgtctattttaacaatcctcctgcatctgtattttatagtcagccttttgaccacctggtgccagctatataaggaataaagttgattcatatcaacattagaactccagtcccaaactaatctgtcaggttcactggtacataaatacctaggaaatatttttccagtctacaatttggtgctattgtgcagtaactaatagtactcttaccagaggagaaattatattaacgaccctgctaatatcctttcttagttatttgctccttgcaaattaaaaaagcaactaagagaaagaaaaacattgtagatatctatttatatttaaagtttatgtttcatgaactgcagctgcaggattctggcattttgcatgccattctccatcagatctgggatgatggctcagaacatgtacacagactaagagtaactgtgtgatctgttaaggggtggataacataatatgcagcttaggatgctattttgagatgtatgatattcagttcattcacctgattactttggttgcagcacaactgtatatattgtataaccgaaattgattattttcattgtccttaatgcagtgatttataattagagcatgtttaataagtttactcttcttgttaactagtcatttgactggaaaaaaataaaatacttttaaatgg

SEQ ID NO: 355420 - DNA, 455 bp, Homo Sapiens
  misc_feature (46)..(105): n is a, c, g, or t
  misc_feature (151)..(151): n is a, c, g, or t
gtgagacggagaaaaagatgaccaatctatgaggtctaccatctgnnnnnnnnnnnnnnnnnnnnnnnnnnnnnnnnnnnnnnnnnnnnnnnnnnnnnnnnnnnncaaaggaaaatttccccaagctaaagaagtactcaaatccccaggnttaaaaaagtcctagagtccttgaaaggattgaatgacaaacgtcccacaacagacacatcctttgaaatttcaagtaatcaaaagataaacagaatattcctcaatgctttcagaaaggaaaatacaagtcatctataaaagaattggaatcaaactcaaactggcaccagacttctcactagcaacactggatactagagacaatggaataataactgcaaaagttctgagaatgtgaatttgaacttagaaatctacactgagactgggtgcgatggctcacacctgtaatcccagcactt

SEQ ID NO: 355421 - DNA, 435 bp, Homo Sapiens
cctttgattaatgaagaaaaaagcctatattttccaatgacaaagttataaatgatggaaattcttagtcatgtaaggcatttctcattgtacaccatttattataatccacttgaaattcaatcatctgcccttcctaaatttcagccaaaataggatttggggtagcttcagtatgattcccaagactgtgtatctctctaccatctagctcagccatcacctggctttcaatagaaccagcatgtgaatctgttgtaatactagattttacgtgcacctgggcagaaagtaggatgagtattacagcatctgacagcaggtagctgaaaggaactggcaattctttcagtcctgcctgctcatgaattctagatacagcaagaaatgtaacaggtaaaattatatttatgcttaacaaaggccctgggccgg

SEQ ID NO: 355422 - DNA, 961 bp, Homo Sapiens
  misc_feature (854)..(891): n is a, c, g, or t
agcggcttgacttctgaaaccagtgttctggggagaggcatttgagagtgacccaggcctgggaaccggggcttttctcggtggtcttagtgcctgttctgcaaccaaggcaaggccaggatttccggaaatatgaggaaggctttgacccctactctatgttcaccccagagcagatcatggggaaggatgtccggctcctacgcatcaagaaggagggatccttagacctagccctggaaggcggtgtggactcccccattgggaaggtggtcgtttctgctgtgtatgagcggggagctgctgagcggcatggtggcattgtgaaaggggacgagatcatggcaatcaacggcaagattgtgacagactacaccctggctgaggctgacgctgccctgcagaaggcctggaatcagggcggggactggatcgaccttgtggttgccgtctgccccccaaaggagtatgacgatgagctgaccttcttctgaagtccaaaaggggaaaccaaattcaccgttaggaaacagtgagctccggccccacctcgtgaacacaaagcctcggatcagccttgagagaggccacactacacacaccagatggcatccttgggacctgaatctatcacccaggaatctcaaactccctttggccctgaaccagggccagataaggaacagctcgggccactcttctgaaggccaacgtggaggaaagggagcagccagccatttgggagaagatctcaaggatccagactctcattcctttcctctggcccagtgaatttggtctctcccagctctgggggactccttccttgaaccctaataagaccccactggagnnnnnnnnnnnnnnnnnnnnnnnnnnnnnnnnnnnnnnaattgctgccaggattgtcactccaaaccttactctgagctcattaataaaataaacagatttattttcc

SEQ ID NO: 355423 - DNA, 617 bp, Homo Sapiens
ggtaggacgggtagttttccaggttccagactggcttcatcatctcttaatgggaactcgaatcctctttaaaaacaccctggaaatgtatactgattactatcttcagtgtaaactagaacagctatttcaggagcaccgtttggtctcactcataacacttctcagagatgctatattctgtgaaaacactgaacctcgctctctccaagataagcaaaaaggagcaaaacagacttttgaagaaatgatgaattacattccagatctgttagtcaagtgtattggtgaagaaaccaagtatgaaagcatcagacttctgtttgatggcttacagcaaccagtactcaacaagcagctgacttatgttttattggacattgtgatacaggaactgtttccagagctcaataaggtacaaaaggaagttacctctgtgacatcttggatgtaaacacttggatttggtatagaataacccattgaaatttctgctgtgcgagggtggtagaaatttacttttttgggtatattcttatatatattatgtacatcgctgtctgaaattttagttattttttgtttttaataaagactaacacaaacttaatgattaa

SEQ ID NO: 355424 - DNA, 609 bp, Homo Sapiens
aatcattaagtttgtgttagtctttattaaaaacaaaaaataactaaaatttcagacagcgatgtacataatatatataagaatatacccaaaaaagtaaatttctaccaccctcgcacagcagaaatttcaatgggttattctataccaaatccaagtgtttacatccaagatgtcacagaggtaacttccttttgtaccttattgagctctggaaacagttcctgtatcacaatgtccaataaaacataagtcagctgcttgttgagtactggttgctgtaagccatcaaacagaagtctgatgctttcatacttggtttcttcaccaatacacttgactaacagatctaaacaaaaaggccaaatgtgaaataattttatattataaagtgactcaccattaactggatcataaagcaaaatcaccaccctgtttcccagatactaggcaaaaactgcaaatcaatactccccaaaccagtgtttctataagaggctcctggataagaggtttctatggtcaagttgacaaatgcagtatcatgtatcccatttttggagattcacaatcacaaggcataatgcaaactctgagaaatgctgcagt

SEQ ID NO: 355425 - DNA, 457 bp, Homo Sapiens
aaccctgtcccctattcaattggcaacaggctgccctggaccctggggccttgatttggatctcaaataagcccatagaggagagaggtcttgaggggtgggagcaggtgtgtactgaaaattcccctcccacatgtcttgagctgggacctcgtcatctgagacttccccatgccccaacaaatgcaaatgcacacaaacccatgcatacacaagcacacacacacaggcatctccccgtctggttgggggagcatgggagggggcacttcacagggagaagataaatagttccacacctgaagaccctccaacagcttctgcctccctcctcatcacttcctctctccaccccctctccaacactggccccttcccctaattaattccctggtgaggacagccagaggagctgcgacttggtattttttggaataaatagacattttcctgatac

SEQ ID NO: 355426 - DNA, 649 bp, Homo Sapiens
  misc_feature (532)..(532): n is a, c, g, or t
  misc_feature (621)..(621): n is a, c, g, or t
caccatctactagggtccaccatgaccctggtgttatcatctcccaggatccatgaggtccagtgttgtcaccatctattaggatccaccatgaccctggtgttatcatctcccaggatccatgaggtccagtgctgtcaccacccactaggatccaccataaccctggtgtcatcccagagtccactgcaaccatgtgccatcatcccccaagagccatcatcttaggagccaagtaccgtgacgggctgtatttcagttgtcctctggggccgcatggtacttacagttgttcacttaaggggaaccagcacaacaggccatattcccgtttccactaaaaggacaggggtggggccagctgtccccctctgaagacttcacccctactctggccctccttatgtcactgcctcactcctgaccgaggatgatgcctgcatcaatcccaccacagatgtgggccttcagccaaccttcaccttaccccccggtgagggcacccggggccccccctggacaggcaggcgtntttcccttcacccaggccatcttgattggggtggacagggggtcaaacccaggcaacctcttcatttattcaccagaggaggggaggcntttttcaaccctcaggggtggacgggcc

SEQ ID NO: 355427 - DNA, 946 bp, Homo Sapiens
agcggaccgtcaaggaggaaacgccagcgcccggcggccctgccgggaaggaggaagcgcagtgcgttcggctccgcgcccgccgcgccgggagcagcaccgcggggccaggttgcatgatggaatttgaacattacttcaagaggttttgtattttggattagttaattgggtttgtcctctgctgactgtttcttcggatgcattttttggtgtgctcttgagggattaaatgcaaagagatcacaccatggactacaaggaaagctgcccaagtgtaagcattcccagctccgatgaacacagagagaaaaagaagaggtttactgtttataaagttctggtttcagtgggaagaagtgaatggtttgtcttcaggagatatgcagagtttgataaactttataacactttaaaaaaacagtttcctgctatggccctgaagattcctgccaagagaatatttggtgataattttgatccagattttattaaacaaagacgagcaggactaaacgaattcattcagaacctagttaggtatccagaactttataaccatccagatgtcagagcattccttcaaatggacagtccaaaacaccagtcagatccatctgaagatgaggatgaaagaagttctcagaagctacactctacctcacagaacatcaacctgggaccgtctggaaatcctcatgccaaaccaactgactttgatttcttaaaagttattggaaaaggcagctttggcaaggttcttcttgcaaaacggaaactggatggaaaattttatgctgtcaaagtgttacagaaaaaaatagttctcaacagaaaagagcaaaaacatattatggctgaacgtaatgtgctcttgaaaaatgtgaaacatccgtttttggttggattgcattattccttccaaacaactgaaaagctttatttt

SEQ ID NO: 355428 - DNA, 687 bp, Homo Sapiens
  misc_feature (26)..(26): n is a, c, g, or t
  misc_feature (580)..(580): n is a, c, g, or t
  misc_feature (584)..(584): n is a, c, g, or t
  misc_feature (620)..(620): n is a, c, g, or t
  misc_feature (631)..(631): n is a, c, g, or t
  misc_feature (636)..(636): n is a, c, g, or t
  misc_feature (662)..(662): n is a, c, g, or t
  misc_feature (672)..(672): n is a, c, g, or t
accaagttccaatgaaatgcaaatgnttacttccttactggaactctctgcattaatatcaaggagctacttttgaaaataattatttaatatctacctattattgctcaaaataagtaggcataaatatgctcaattttaggtaaggtttaaaatatctactcacatgttttgacaatacattttgcagccttaaacagtttgtcaatttgatatggtgttgatttagggtgttttctcccctccatttagcttcctctttgatttttggtctcactgcctagcttttggcacagtgagaaagcaattttctccagagtcaaaattagtactgcatcatgaattattcagcccaacacattgcttcttgcagcaccctgtgctcttccagccccaaagtttgaaatcttctctttcgcacaacccaatctccattcaaccccctgcccttcacttctccttctccaatatggtggccagcaggctggcaccttggcacctgactgaattgctttatatttaaatttcaaggcacatagccgccttctactggagaagcttcacagtgcaatcacatgangcangctgctttcacataaacaacttcaaataatatctgngaaaatggganccggncttaataccttaccctaaaatagacncattggcganagcctggccaagcct

SEQ ID NO: 355429 - DNA, 231 bp, Homo Sapiens
aatatgatgaggaaagtaaggtacagagatgttaaatgatagaacacataccacaagcccagatgcgaacctggaagtctgactctaaaatccagactctagtgtagtcagtttgctacatggacttacttgtgagcagtattctatgattgtcaacatatgcacacttaatactgatctaacctgtaattatgacataattatatattgaaaaaacaggggaggggaaat

SEQ ID NO: 355430 - DNA, 885 bp, Homo Sapiens
gggggcgggggttgtggggcttctggactgagccgctgagggtgcgggctgaccctgtaagtggctgcggcgggaagatggcggagctgcgcgtgctcgtagctgtcaagagggtcatcgactacgccgtgaagatccgagtgaagcctgacaggaccggtgtggtcacggatggtgtgaagcactccatgaaccccttctgtgagatcgcggtggaggaggctgtgcggctcaaggagaagaagctggtgaaggaggtcatcgccgtcagctgtgggcctgcacagtgccaggagacgattcgtaccgccctggccatgggtgcagaccgaggtatccacgtggaggtgcccccagcagaagcagaacgcttgggtcccctgcaggtggctcgggtcctggccaagctggcagagaaggagaaggtggacctggtgctgctgggcaaacaggccatcgatgatgactgtaaccagacagggcagatgacagctggatttcttgactggccacagggcacattcgcctcccaggtgatgctggagggggacaagttgaaagtggagcgggagatcgatgggggcctggagaccctgcgcctgaagctgccagctgtggtgacagctgacctgaggctcaacgagccccgctacgccacgctgcccaacatcatgaaagccaagaagaagaagatcgaggtgatcaagcctggggacctgggtgtggacctgacctccaagctctctgtgatcagtgtggaggacccgccccagcgcacggccggcgtcaaggtggagaccactgaggacctggtggccaagctgaaggagattgggcggatttgagcccctcccagagatggcaataaaactgactctcaacatc

SEQ ID NO: 355431 - DNA, 1137 bp, Homo Sapiens
  misc_feature (537)..(689): n is a, c, g, or t
  misc_feature (790)..(849): n is a, c, g, or t
  misc_feature (886)..(944): n is a, c, g, or t
  misc_feature (963)..(975): n is a, c, g, or t
aaggagcagaagcagaacgcttgggtcccctgcaggtggctcgggtcctggccaagctggcagagaaggagaaggtggacctggtgctgctgggcaaacaggccatcgatgatgactggaaccagacagggcagatgacagctggatttcttgactggccacagggcacattcgcctcccaggtgacgctggagggggacaagttgaaagtggaccgggagatcgatggggccctggagaccctgcgcctgaaagctgccagctgtggtgacagctgacctgaggctcaacgagcccccctacgccacgctgcccaacatcatgaaagccaagaagaagaagatcgaggtgatcaagcctggggacctgggtgtggacctgacctccaagctctctgtgatcagtgtggaggacccgccccagcgcacggccggcgtcaaggtggagaccactgaggacctggtggccaagctgaaggagattgggcggatttgagcccctcccagagatggcaataaaactgactctcaacatctnnnnnnnnnnnnnnnnnnnnnnnnnnnnnnnnnnnnnnnnnnnnnnnnnnnnnnnnnnnnnnnnnnnnnnnnnnnnnnnnnnnnnnnnnnnnnnnnnnnnnnnnnnnnnnnnnnnnnnnnnnnnnnnnnnnnnnnnnnnnnnnnnnnnnnnnntttttgggggccccccgcgccccccaaaaaatttttctaaaaactttgttttggggcggggggccccaaagggaaagggaaacgggggccatatggttttnnnnnnnnnnnnnnnnnnnnnnnnnnnnnnnnnnnnnnnnnnnnnnnnnnnnnnnnnnnngggggaaacccaaggggtttctaaaaaaattcccaannnnnnnnnnnnnnnnnnnnnnnnnnnnnnnnnnnnnnnnnnnnnnnnnnnnnnnnnnnccctctaaataaaaatttnnnnnnnnnnnnnttgtacatctttttgggggaaaacgggggggcgacattcctcatataaacccttccccccccaccatcggagaaccccctctccacaaaggggggtggggaatagacctttttaaattccccccggggggtaattccaaacctttttggggggcccttgtgg

SEQ ID NO: 355432 - DNA, 1005 bp, Homo Sapiens
  misc_feature (973)..(974): n is a, c, g, or t
ggatagcattgaaggagtgaggcatgtcttcagcagagcttgtactatacatctcccaaagaaacccatggtgcatatgctttgggcagcttttgaggaacagcagggtaatattaatgaagccaggaatatcttgaaaacatttgaagaatgtgttctaggattggcaatggttcgtttacgaagagtaagtttagaacgacggcatggaaatctggaagaagctgaacatttgcttcaggatgccattaagaatgccaaatcaaataatgaatcttcattttatgctgtcaaactagcccggcatcttttcaaaatacagaaaaaccttccaaaatcaagaaaggtgcttttggaagcaatcgaaagagacaaagagaacacaaagttatacctcaatttacttgaaatggaatatagtggtgacctcaaacaaaatgaagaaaatatcctaaattgttttgacaaagctgtacatggttcattacctattaaaatgagaattacattttctcagagaaaagtggaatttcttgaagattttggttccgatgttaataagcttctgaatgcttatgatgaacatcaaacactcctgaaagaacaggattctttaaaaaggaaagcagaaaatgaatcagaagaaccagaagaaaagaaagcacatacagaagatacaacttcatcatctacacagatgattgatggtgatttacaggcaaaccaagctgtatataattatagtgcgtggtatcaatacaattatcagaatccttggaattatggacaatattatcctccccctccaacctgatgggaaaaatgtaaatttcaaatgcagtgtgtgaaaagtatgaaattattattttttttaatgagggatgtaaacagtataagcttgttgtatttgataaacctgtcttccttgtttctgtgtaaacatgatttgttttagtaataggggggaaaatgnntcattgttagctttacccacagatactgttt

SEQ ID NO: 355433 - DNA, 1056 bp, Homo Sapiens
ggaccggtccggaatttcgggataaagtttgccaaactgtcgttgatgtgggagagaaaacgtcagagttcaaggccaaaggctacttagctctggggctcacgtacagtctgcaggccactgacgcttctttgcgagggatgcaggaggtcctacagagaaaggcgcttcttgcatttcagagggcccacagcctgtcacccacagatcaccaagcagctttctacctggctctgcagcttgccatctccagacagatcccagaggctctggggtatgtccgccaagctcttcagcttcaaggtgacgatgccaactccctgcacctccttgccctcctgctgtcagcacagaagcattaccatgacgctctgaacatcatcgacatggccctgagtgaatacccagaaaatttcatactactgttttccaaagtgaagttgcagtcactctgccgaggcccggacgaggcactgctgacttgtaagcacatgctgcagatatggaaatcctgctacaacctcaccaaccccagtgattctggacgtgggagcagcctcttaaatagaaccattgctgacagacgacagcttaatacaattactttgccagacttcagcgatccccgagaacaggcaactctccagaagcatactttcatgggtttcctttcccttttttcaggtagctccgtccatggccacatcgggtagcagcctcccagaatggagcagggcactgtccggaaatgggctttcctctctggagagcaaaggccccctaaacaagggcccccctgcatcccctgggatggaccctgggaccaaaactgggctccatggagcttgaaagtctaataatcggcatccgggaaaacctcgcgaaaaccccccaccctgggtaccccagaaaaattgggcgaacctcctttcccaaaggtccccccaaagggccccctaaatgggcggggccagaatggctggaagtccccgggggaaaccttgggacaaagggcccgcgcgggggtttatataaaaaaggttttttaaactttgg

SEQ ID NO: 355434 - DNA, 527 bp, Homo Sapiens
  misc_feature (37)..(37): n is a, c, g, or t
  misc_feature (411)..(411): n is a, c, g, or t
  misc_feature (438)..(438): n is a, c, g, or t
  misc_feature (449)..(449): n is a, c, g, or t
gaagttgcagtcactctgccgaggcccggacgagganctgctgacttgtaagcacatgctgcagatatggaaatcctgctacaacctcaccaaccccagtgattctggacgtgggagcagcctcttagatagaaccattgctgacagacgacagcttaatacaattactttgccagacttcagcgatcccgagacaggctccgtccatgccacatcggtagcagcctcaagagtggagcaggcactgtcggaagtggcttcgtctctgcagagcagtgcccctaagcagggccccgctgcacccctgggattgacgctggcacagatctggctccatgcagctgaagtctatatcggcatcgggaagcctgcagaagccacagcctgttacccaagaagcttgccaacctntttcccaatgttcccacaatgttcctnttacatggcgnggccagatttgttgaggttccgggggaagcatgggacggagggcgcggcggtggtattgaagagggcttaggcattca

SEQ ID NO: 355435 - DNA, 597 bp, Homo Sapiens
aacgccttatgcagtgcccacaagtaacacaagcaggcttctttgaagtctccatgtgctgtagattggtttttctcctcatctacctctttgctgaaggtacagtcctttaagaatcctggttttatgcttagatgttgaatccaactcctcactttgtacagtctccaggccttgtaacctgttctcatatgggcattaagactcaaatccctgcaatgcccagaacagtaactcttatccccacccatggagcagccatagtgtcagctcacaaactcctgtttttcagttttttcttcacttttgtatcttggttgtttcccctactttcttgaaagctcagctgttcatttaactggatgttcattatattttagctataatttctaggtgatttgaagaagaaaggttttcagattatctaatcaaccatattgctagagacagaaacgtaggaagagctacacaaataaatccttatgacattttataaatttcaggtatagcaaatagacaaaaataactgctacatgtttaaaagtttagattgctgttaaaaaggaaagtacattacgatatcatatattacagctt

SEQ ID NO: 355436 - DNA, 549 bp, Homo Sapiens
  misc_feature (17)..(17): n is a, c, g, or t
ctttatcacaataaaanctcacccaccacaggtcttgattatttggaactggaagtgtccaagatctattaagaagatggtggcaagcaaaagaaaagagctttcacaaaatacagatgagtctggattaaatgatgaagccatcgccaagcaattacagcttgatgaagatgcggagctggagaggcagttgcatgaagatgaagagtttgccagaacattagccatgttggatgaagaacccaagaccaaaaaggctcgaaaggacacagaagcgggagaaacgttttcatctgtccaagccaatttaagtaaagcagaaaaacataaatatcctcataaagtaaaaacagcacaagtttcagatgaaagaaagagctacagtcctaggaagcaaagtaaatatgaaagttcaaaagaatctcagcaacattccaagtcatcagctgacaaaataggagaagtctcttctcccaaggccagttctaagctggcaattatgaaaagaaaagaagagagctcttataaagaaatagagcctgtggcctc

SEQ ID NO: 355437 - DNA, 991 bp, Homo Sapiens
caagccaggtgggccattctcttagaagaaattgattgcacagaggaagaaatgttgatctttgcagctctacagtaccacattagcaaactgtcgttgtctgctgaaacacaggattttgcaggcgagtccgaggttgatgaaatagaagcggcgctttctaatttggaagtaaccctagaaggtggaaaagcggacagccttttggaggacattactgatatccctaaacttgcagataatctcaaattatttaggcccaagaagttattaccaaaagctttcaaacaatattggtttatctttaaagacacatccatagcatactttaaaaataaggaacttgaacaaggagaaccactagaaaaactaaatcttagaggctgcgaagttgtgcccgatgtaaatgtagcaggaagaaaatttggaatcaagttactaatccctgttgccgatggtatgaatgaaatgtatttgagatgtgaccatgagaatcaatacgcccaatggatggctgcctgcatgttggcatcgaagggcaaaaccatggcagacagctcctaccagccagaggtcctcaacatcctttcatttctgaggatgaaaaacaggaactctgcatctcaggtggcttccagtctcgaaaacatggatatgaacccagaatgttttgtgtcaccacggtgtgcaaagaaacacaaatccaaacagctggccgcccggatcctggaggcgcaccagaacgtggcccagatgcccctggtcgaagccaagctgcggttcatccaggcgtggcagtcactgcctgagttcggcctcacctactaccttgtcagattttaaggaagcaaaaaagatgacattctggggagttcatataacagggtgattaaaattgatgccaccacccgggatcccggtgacaacatggaggattcccaatatccaaccatgtaaaggtaaccgggaaaacccggaagggggtcatcga

SEQ ID NO: 355438 - DNA, 449 bp, Homo Sapiens
  misc_feature (19)..(19): n is a, c, g, or t
  misc_feature (49)..(49): n is a, c, g, or t
  misc_feature (64)..(64): n is a, c, g, or t
  misc_feature (105)..(105): n is a, c, g, or t
  misc_feature (111)..(111): n is a, c, g, or t
tttaaaaaccgggccaccnctggaatggaaggttggccatggatccgcnttatatcccttaccncgggtatccattggccctttttatccaaaatgggggaaacntatacntttggtatttccatagttttaggaaatcggaaagttaggggactctttataagtaatgtcaaggaacagtaatttaaaaacaaagttcttaacaaatatattgtttgcttaatcacaatgccctcaacttgtatttgaataactaaataggacatgtcttccttggagctgtgggcattagttcagaagcactacctgcatcttaattttcaaaacttaagttttattagcaaatcctcttctctgtaagacttagctatgaagtggtatattttttccaaatatttttctgaaaacatttgttgttgtaactgcacaataaaagtccagttgcaatt

SEQ ID NO: 355439 - DNA, 847 bp, Homo Sapiens
  misc_feature (67)..(67): n is a, c, g, or t
aatatttctgaaacacttatgtctgaaatatatgctgtattgtatgttaacccatgacatatatganctacaaggcttgcataatcagtgagctagtggataaatcaagacaggagcaaatgggagaaagatgaataaacaaatgaaaaaagatgaataaatgaataagagagatgaataaacaaatttacattacatgtgatagttatcatggtatggccttcatgacaagatggatgagaatatcactgataggatattagccttctttcatatctttatattgaaatatgggctttacttcaatttgaaggtctttcatgaacaataaaagagagtagaaggactgtctgagaaggcaggagacatataaaacagatgactgaaagactgactagctactggaaagggaaacatttggaacatccagagtaagggcaaatgggcttctaccagcacaacaaagagcctccaggtggcaacatggaagcaggttatcatagaaaataaatgtgcagattccttatttacaatgactcacttaaccccacagacatgtttcactgctgccttccccagttgtcgctcatgtactggtgttacctttcagttacatgcctttgatcctaacattctctactttagatgccttatcagttctttgcaatctgcctgtggttatcagcacttaaagcacaattttgaaggtgaaaaaaatgactatcaccttagtcccaaagacataatttctgtcaaactgccttattagtattacagacacactgaatgaagtagcatgatacgcatatagtctactcagtataattgccctttatcatgggcttct

SEQ ID NO: 355440 - DNA, 779 bp, Homo Sapiens
  misc_feature (23)..(23): n is a, c, g, or t
  misc_feature (28)..(28): n is a, c, g, or t
aaccccagttttcggcacgaggnctctnctataacttctaaaattcggaattctagatccttgcttttgcagaatttggtgctcagacaatatttaaggacatttcagcgagacaaagtgcatgtttttatcgagtaccctgtgcaccacattatatctggcaattctttttgtttcattatgtgcatcaatatttttctcagctactattacctgaaacttgtttaacatgtattagacctagaattttcattttctttctcacatagttgcttcctggtatctgatttagaaataacatttaaatgccaagtatctgggggattgaaggaagggtctatatgagcaggtgaattagcagtactgtttttgtttagtggatattgttagtgactttttgtgtgtgttttgctttgggacctttttattttggtgttgcaaaaagtaacatattttcatcattgcttcatacgacatggagttaggacagggaaaaatcattcaacactccttatgcattaaatgatcaaataaaccagtgtaggatattaagactatcaattggtgggattaggcttgacattttatttttataaatatatattttttctgaatgtgtctgagtccaagagtgggcaaaaaataattttctactttggactaatctatagaggtttttgaaagtctgcattactaacttgttgaattcatgatattctgcctatggcacaaattgtaaacctttgtttttctaaaataaagtaattgaaaacctgcaa

SEQ ID NO: 355441 - DNA, 1143 bp, Homo Sapiens
  misc_feature (716)..(731): n is a, c, g, or t
tttttataatagcagagtggcctgttctaagaaggccatattttttaagttatctttcagggtaacatggaaatactataaagttggatgtcaaactttaatatgttttcagtgttctctaattttttggaatttttgtagactttacacctggaaaaaaagatttgtaaaatcaccggaacaattgtgtgctttattttataggtagtggttattagtattacatccccattttaaaaacaaaaacataataatggttacaacacgtggagttttactaacatacatattaaatcaaagtatattcttaaaagtacttgtgaagtaaaatctttcttgtgcattttcaatacttgtaaactggaaatcagaaaatatttactatgaacaggaaaatctgacatatagccctttttgatatgtttattaataatgattcttaatggggctcataataagtttaatatgcacagcatcttagaaaagtttaacctgcaaacacttttaaaacataatgcctacttgatttatatctataaaaagactgacaggtaattatatttggaaaacatttaatgcactaactttaaagaaattgaaaattcaggtggataaatagtcttacaaaagacaatgtgctttatgttatacctatagctttggtcccatctttaattgagaaacatttatctgtataaaacatatttttggataannnnnnnnnnnnnnnnttgtatcgctacagaaaggctctaaaaagcatttgaggaaaatatttggttcccttttctataatcatcctttaagattcttatagctacatttggtttattcatcatatttacagtatatatattgttcttttcagtgttcacatcttgttccccatttctcacttgtgtcaccagctgtttgtgccatttttagtgtaaaagttgcagacctattagatctgcagtttaagttgccatgctgctaggaaattgtcctttttctttctagctgttaacctacttcctggaaaaagtagtagctctctgtagcattatggagtttcagtggaaccaaatttttgccattaaaaactggcattatactgaactatacattgagaaatcaatcaaaataaaaatttttactttc

SEQ ID NO: 355442 - DNA, 935 bp, Homo Sapiens
  misc_feature (22)..(22): n is a, c, g, or t
tggccggcgacgcttctgcccnagctcatccaccttctgggaggtgaggtcctcatcacaggatttctggcccgccaggtgggaggagtccccatctccttcagggtagtagctgaaagcaatgcggaccctggccttgcgagggggtgatgcgtgcatgggctccccggggtccacgtcaggggccagggcgctcgggggactagtggatggggagctgcccaccagagtggcttctgactcggagctagtctccagcctgtgctggaacttaatggagtcgctccttctgggaggttttgggggtgtcagaggccccaccctctttggagggctggggagagtgagcaggcccaggacctggaagcaggtagtctatttgggggggtgtctgggggcgtttgaaagtgttagggtcaaagatggactttctttgctttggctttttataaacagagagcttctcaggcactgccgtggagctgagcatggccttgggccaggtcccgccgctgttggagccttcagagtctgccttgtccagggaggcctccccaaccccacaggggcccacctcggtctcaaagggcagcagtggccgccggccacgcacgtccaccagcccaaagccacggtccccagaggcatctgagcggaaggagctcaggctacgctcagaggcactgggacaggcctgggggcagacctgcaagggtcccccagggaatggcttatgcagaaaggagctgctgcctcctggggggcctggctccttcctgtcttccagcctgtccgtgtagaagatgtctgtctgcgtggagttattgtgctgtatcaagttccgtttgttatgagcctggacctccgggccatgggctcgaaaactcagcatcttatcagagtctttgcctcgtgccgaaatcgccacccaggcc

SEQ ID NO: 355443 - DNA, 601 bp, Homo Sapiens
  misc_feature (352)..(352): n is a, c, g, or t
gaagccctgccgctaaaaaagggtcccttgctgtgggagacaggatcgttgcgatcaatggcaatgcactggacaacaagtctctgaatgaatgggaatctctgctgcgcagctgccaggactccctgaccctgtccctcctgaaggtattccctcagagctcctcgtggagtggccagaacatttttgaaaatatcaaagactctgataagatgctcagttttcgagcccatggcccggaggtccaggctcataacaaacggaacttgatacagcacaataactccacgcagacagacatcttctacacggacaggctggaagacaggaaggagccaggccccccaggagncagcagctcctttctgcataacccattccctgggggacccttgcaggtctgcccccaggcctgtcccagtgcctctgagcgtagcctgagctccttccgctcagatgcctctggggaccgtggctttgggctggtggacgtgcgtggccggcggccactgctgccctttgagaccgagctgggcccctgtggggttggggagcctcctggacagcgactctgaaggctccacagcggcgttgatgcgtc

SEQ ID NO: 355444 - DNA, 747 bp, Homo Sapiens
tgaaggatgtagtgaggatggctttgtagccttaggactgggcagtgatcaacgcagtaaatgaaagctgcgattgccaggtgagggccccggtgctctgtactcattttattgtgcccctatctgaacaggattccgtagaaatgacttagatgcttatctagtatttgacattgagatatttattttgtgaaacaatgcaagcgattttaaatccccacatactatttgattaagtgcaacatggtacagtcatgtgtaatctctttacacgatagtgcatctagtccttagcctttagttattgcacaacaattataaagaccagtgaccaggacacgtggactctgacaggcagatcggcctacacaacgaaaaatcagaacagtacaccaactggaatggtcaaacaatttaagtcaaatgttttaatggtgcaattaaaataagggttcaaacatgttttcaatatattaatttctttaaagtcatgttcaggcaaggtgctgtttaaaaaaccactattagctttgtccacacatgtaagttatcaaaagttacccaaggtaattttgacgttgaatgcagctttaaacaataaaaaaatggtattaggtttacttctcgaagcaaagagagcccccaaccttgtaaactaaacattctgacacaaatgcacaaaattaagatggcaacattaattttgagatgtagtgtgatgctgagcaaacttttggtcttgactct

SEQ ID NO: 355445 - DNA, 549 bp, Homo Sapiens
  misc_feature (527)..(527): n is a, c, g, or t
gtaaaagaaaaagcgttcagcggccgcatatagactaaaatatcaattataacacattcaaaatgtcccctacactggcgaatgtttaatccataaggtttttttagtagtttgtcaaacagtgaccttctcacttcccagctgtaacacatagcaaaaccaattttcctacccttggctcagcaatctgggtctcaggattatttgtgcccaacaaaatctcttagccatttcttaaactactggcaggtagttagattttccacttgacattgctaagagattaaaattgtttatctcattgtcatacacaggccttttcagtttcctgctaacagattcaggttagataaggattacagaagtgatactcccaagttcctctctataacagtcgtcatcctttccccataatattatgaggtatattttattaaatctatcattcagatagctaacgcgtaagagcattatataacatataaaaaggcattatacctcatggcataagcaggagggcttagacnaacaccagctcctattcaactg

SEQ ID NO: 355446 - DNA, 424 bp, Homo Sapiens
  misc_feature (26)..(26): n is a, c, g, or t
  misc_feature (308)..(325): n is a, c, g, or t
cccacattagcccagtaatatttccnttaaacttcctccatagggacccgggaaatacaaaaaaaataaggcttttaggaacattgcagttaagcacaatttaattgttttaaatgtgttactacataaaatgcagtagatacgaacagcaggttcaaaccttaaacgtcactagcaacaaacgacatcttttgcaaggatgcccattaacagacatcacagccccgcgttacctctaagcaacgtcgttcaggaaaaccttgcattctcactttcgctcaacctttcaaaaggtaacacggggcccnnnnnnnnnnnnnnnnnnatttaacactttgttttcgaaaatagggtcttatctataactctttatttttaaaccacatcataaggatttggggtgaacgttctttcattttaatca

SEQ ID NO: 355447 - DNA, 691 bp, Homo Sapiens
  misc_feature (32)..(32): n is a, c, g, or t
  misc_feature (34)..(34): n is a, c, g, or t
gagacagagcttgctctgccacccaggctggngngcagtggcacaattgtggccactgacctggccttcctttcccttttaatatgcttgcagaaaaatctgattagagagctgtggagtacggctcagtcactttggccctgcctgaaacgccatcacagggaaaggggagccattgatgtctgtgctattcagaaataatgctgcttcacagatcccattttccatatttctttgccctagttctttaatattgaaagcatttgaatgaaaatagtatgcttaagagttcgccccctcccctcctgttcattttcctcttgtaatcatgacgtgatgtcatttctgcagttaccacagccttcttgggaagtgcggggaaggcagaaggtgcctttgaaaactgcccacaggaaacagaatcctgcatgcctagcagccatcttggatttgaacattttaaataacatcacatatttgctgcttataaaaatgcccttggtacaatggccttttctgttttatggcttttagggaaatgcaaagaataggaaagtgtctgcaaagggaaactacagaaggttagagctcgatttgtaaacacaagtatcctcttagcagctcctgcctcccctgcatactaagccccttttcagacagggaactaacttggttttgctttgtaccttcc

SEQ ID NO: 355448 - DNA, 652 bp, Homo Sapiens
gcaaaatgcagtgtaccttaaaagtgtctcacctagaaggcctctacctgtaatcacattaatttttctaaagacaatttggtgttttgaagataaatgtcattagtctatgataatagcatcataggacaattagccattttagacttgaccatattttctctttttagcatatagccatcttgatatttaggtgggagactactccaatggagcaacagtttcattttacatgattggatttagaaatttacaaattttaaactcataagaattctaaataatttgaaaatggaaacatttgacccacagtctagcagcataaatacatttataaaatacttcattgttgatcttaggtcattgatttaaaacagaatttggtgactatgggcaggtggagggggccagtgaggaaggtataaaagagaaatctttatgaattgtgttcagattgattttgtataaacataatatattcatggttgtatctcttatttataatacccaactaacatgaaggtggtccaagggaaggatcaatattttaaataacatatttgcttaaaatatcatacagtggctgcttcataaaaatcttataaacttttattaaccaagttcagaaataattagaggggtgatctccccc

SEQ ID NO: 355449 - DNA, 426 bp, Homo Sapiens
  misc_feature (16)..(16): n is a, c, g, or t
  misc_feature (30)..(30): n is a, c, g, or t
  misc_feature (61)..(61): n is a, c, g, or t
cctccaaccggccccntagtccacccaaancccggttttaaaatccaaggaccctaagacncaacaatgaaagtattttaataaaatgtaattaatgccgcctagactgtgggtacaaatgtttcccattttccaaattatttagaaatccttatgagtttaaaatttgtaaatttcctaaatcccaatcatgtaaaatgaaactgttgcctccattggagtagtctcccacctaaatatcaagatggctatatgctaaaaagagaaaatatggtcaagtctaaaatggctaattgtcctatgatgctattatcatagactaatgacatttatcttcaaaacaccaaattgtctttagaaaaattaatgtgattacaggtagaggccttctaggtgagacacttttaaggtacactgcattttgca

SEQ ID NO: 355450 - DNA, 1673 bp, Homo Sapiens
  misc_feature (41)..(41): n is a, c, g, or t
  misc_feature (159)..(159): n is a, c, g, or t
  misc_feature (164)..(165): n is a, c, g, or t
  misc_feature (204)..(204): n is a, c, g, or t
  misc_feature (401)..(401): n is a, c, g, or t
  misc_feature (537)..(537): n is a, c, g, or t
  misc_feature (545)..(545): n is a, c, g, or t
  misc_feature (577)..(577): n is a, c, g, or t
  misc_feature (685)..(685): n is a, c, g, or t
  misc_feature (745)..(745): n is a, c, g, or t
  misc_feature (906)..(966): n is a, c, g, or t
  misc_feature (1030)..(1038): n is a, c, g, or t
  misc_feature (1560)..(1576): n is a, c, g, or t
  misc_feature (1603)..(1603): n is a, c, g, or t
  misc_feature (1612)..(1612): n is a, c, g, or t
  misc_feature (1635)..(1635): n is a, c, g, or t
  misc_feature (1641)..(1641): n is a, c, g, or t
tcggatagatgaaaaggccgacgttgggggcgaggaagctnagttagggtgctacggtgattgtctctctagttgtccgcgcgggtttgctcgtcgtcgtatgtggcaccgtctcactgcggcggggcggcgcgggtagctggtacatgttgtgttgancaggnnctccacgcacgacggcgggcggccggacagtaagggcgngtgagcgcgggcgcatagtccggcagggtgtagttggcggcgggggcgtcatggtgtgggggtgagttgttgcatcgcacaagtcatagtcggcgtcggtgcgggctgttcgtagcgcgggcgacgtgggtaaaagccgcgacttggtgtggagcggggggacgcgagcagggagagaggagtaggggcagcgcgtngcgtgggggtgggttcattatggcgacccgccacctcgccatcgtcaggtttctcgtaccggaatgggaggaggggagatataggaggctcgtccgcatgccgtagcacgcgggcgagacaaaccacgaacttcancccaccancaatatatagttaatagatgaaataaacgcantcgcgaagtcgcgatttcggattgtattgtgtttcctcgctggtggcggctgttgtgagacgtgatgggagatcctccccacatctcacgtgagaatggtaggtgganaaatcatccttgacggcgatcagagaagtctacttgcacttgagtggatcggggttacanttgttttgtgttccacagctacgcgcagctctccgcagcgtagatctgagtacgctctcatggtacagagggtgttctttttcttcttgtgggtggcgctggggggacagcccgcgcgcacctccgaccgtcctacgcccgcgcgagccgcttcctctgcnnnnnnnnnnnnnnnnnnnnnnnnnnnnnnnnnnnnnnnnnnnnnnnnnnnnnnnnnnnnncgggccgcgggcgctccgcgacggagggggggttactaaacaaatgttctgttcgagggtggcnnnnnnnnncggccggcacaaagctcaacagtgagtggttgattttctaacgtgttccctacggcgccccctgccaccctcaccccccagacttagttcgccggttggttgtgcgcgggcgcgcgtcgggggcgctcctacgtcagtgtctcgcgtgggcgtgttcttttgtcgttcttgtacctaacatttcagaattttattaatcctttaaaaatcaccctatttcttttgagttaatatcctcatctcgattaccctcatacatggcttagtttgattctgttactaaattctgtgaatcattatttaatcaaatctactaaagattagaaaaaattctagcaagacttataatcatgaaatacagaattaaaagtttaaacctaccaaaagtcctatggcctattatttagctgtgaatgagacacgtcaggagtataaatctgcacttttgactgtaagtaaaatttgctaatgcaggaagcgaaataggtgaagggaatactgggggttgctaaaaggattacnnnnnnnnnnnnnnnnngcaaaatgcaggtgtacccctaaaagngtctcaccncggaaggcctctacccgtaatcnccttantttttcccaaagggcatttgggggttttgagg

SEQ ID NO: 355451 - DNA, 1137 bp, Homo Sapiens
  misc_feature (22)..(22): n is a, c, g, or t
  misc_feature (32)..(32): n is a, c, g, or t
  misc_feature (38)..(38): n is a, c, g, or t
  misc_feature (50)..(51): n is a, c, g, or t
  misc_feature (660)..(668): n is a, c, g, or t
atccttgccggagttcaaggcnccatccagcngatatnctagccaaactnnttaagcatgatggcaaggcactgctgaaagaggctttggccagtagaacaaattaccattgcacacaacaatatgatagaaagcactactgtccaaaccaaaccagacactacaatctgctatttatttgacaaagtcagtttccagagagaatctaggcaaccatatagttttgaaggactagatgaaacctcaagtctcacaccagtcagctgttaacatccaatcaaggaagtcatttggactttccatactataccttctcttggtagtaaaattgtatgcaattgttgccaatgactacatacaactgtatcctatttgtgctactttcctcactgtggccagcagagggctcacaagctttatttccacagctgctgatccagtgacaaattcatgaaggaaataaatcataggcatgctagcttatgcgtcatagaaaacgtttttacaaactactacgtccactgccctgaagaaactagtcttggttcccccttagtgtaatgtgttttgaaatggtatagaaagtaaaaataaattaataatacaatattatacacttatttgacaagacagggtttacaaaaattttggcaaatatgnnnnnnnnnttatcctagtctgttaaacacttttgctatctcaattgtttaaattaccagattagtgattgtgtcaatttacacatgaggaggtggtattttaagggctcaacaaagcggcatttgacacaaaggtaatttctttgaagggggataaagaataaagatattattatcttcattattacagttcgagaagtggttgtcctgataagaattcatcccacacaaatattaacaccagcagtaagcagcaaattgtggcgaggagaggctagagggaaaagttagaagaaaagcaaagaaaagacgaagagacaagagacatgattccaataagctttaaatcaataggcaaacacttctcatttatgatccatctggctacaggtggttatgtgagaagacacagtgtcgccaaagctgacctagtatttaggtccctagagggatggctgatctgctaagagaaataatt

SEQ ID NO: 355452 - DNA, 2186 bp, Homo Sapiens
  misc_feature (1519)..(1519): n is a, c, g, or t
  misc_feature (1591)..(1591): n is a, c, g, or t
  misc_feature (1812)..(1812): n is a, c, g, or t
ttctgctttggggaatacgcaaggttccttagctgtttccattattaatttaggaggccttgaggatcttcacagacctagataatccggcctctaagtaaatgtggagttggccaacacctgtggagattaaccggagtaatgtatttgaaggaattgagtataagatctgccactgttcgaaaaatgggtacccactaagtcacaattgggctacaaagacttgaaatatggtgatggtttgaattgagatgtgtttaatacacactgaatttcaaggcctaatatgaaaaaaagtaaaataactcattaataatttttatattgatcctatgttgaaatgatagtgtttttgagctattgggttaaataaaatatatttaaatcaataccatgggtttctttttacttttaaaaaaatgtggttactagaaacatttaaattacagatgttgctctcattatagtatttacagtggacagtgcatctctagatgcctataccctaatctgtgttagtaagaattatcaaagcaacccacagaatagcatctaaccataacttttagaacttggggattatagagctagacttatttatatcagcttcaggatcccctgctttgtttagtggatcattaaaaatagttttaagaaaattaagtatcaggctgtgttctctgcaaaccaaaccattgctagacactgggatttcctgtgtgccccaatgtaagtgctttttttctatccatcctaggacttccctcattacgtgtaaattaattccatcaaaatgctgaaaaagagatctggaactggcaaatgtcctgagctctgccctctgtggaggagtggggaggaaaagaggattacatgaagggagtcacaaagtggcttttagtcacatcacaagaccgtgtaatggcagccctagagcactgccaccgcaaaggagctggtctttgcattataaaccttattttcagggtaattacaagtcttaaaaattgtttaaaaacatacttagtttacatgatgttacagtggggtaaataatatgtattattaaaatagtctaaataaatatttacacaatagaccagagtgggtcaaagagaaccattctgctttgacaagttaactcttctcacttttgagtactttttcatttttaaaaatatttctgttaagaaaaaaataatacgatttaactatattcaaatacatgaagtatcagaccaaagaaaggaaaccgagccagaggccaaactcagtctcatctcattctacttggcctgggcaccaaaattatttcaaaagagtttcctgcatatgtcagacttccccggtttcagcataagcctggctgctttggcaacccagattggtcagttttttgtagttataggcccttacagttccatgtgatggtggatccccactgccttcctggcctatcattcttgttttaaaccccctgccctcgtgaactggaagaacagaggaccctcctcagttntcagaagagaagttatatggataaactgtagacacagtttacaatgtgcctggaaaagaggaaatcctaaantcttacatagtcactctaaatctgaaagatcgttttaacactggggccagagtaagttattgtggttccttagaatagggtgggctctgatgaatcttagctttgtgttaacattttgatttttaaactgagattttcagcttttagaaacaggctgaattcatagaagcctaagctgattctgggaatgcgagctttaaaaagaaacataggcagctttngtttataaaatacaccagccaacaaagacatagaacaatgtgcagcaaaacctgccaacaatttgcgctttttagttacctaatcaattacacaacattaagagaatactgaaattctctcaaagtagaaatgtttctactgtggtggttataactatacaagccaattcttcaaatctctagttgaattatggggattcttatgtacatgttgtaaaacactggtcaaaatgttttacagtcaagaattatctatataaagtaattctcatagtcagtgggttatctgatttgcttatgggttgactgaaagaaagctgagtagttccatgttaacaaaccccacagaacatctagctacggcagaatggcaa

SEQ ID NO: 355453 - DNA, 1156 bp, Homo Sapiens
tgcttagatggtgtttgtgggatcacctgcagatttaaagcctactctgccacagactcgagtaagaaaatgttctcttgatgacacagtgctcctactctatccacattaagtagcacttttgtggtagaactgattcttaaggcaggcctgaaacactatgactaatagaaacacagcctttccaatcctctggaacatattctgtctgggtttttaatgtctgtggaaaaaaactaaacaagtctctgtctcagttaagagaaatctattggtctgaaggtttctgaacctctttctggttctcagcagaagtaactgaagtagatcaggaaggggctgcctcaggaaaattcctagatcctaggaattcagtgagaccctgggaaggaccagcatgctaatcagtgtcagtgaatccacagtctttacttcctgcctcataaagggccaggtctccccagtaccaagtcctttcctcatgaagttgtgttgcctcaggctgtttagggaccattgcctgtcttggtcacatgagtctgtctccttactttagtccctgggcaatccttgcttaatgcttttgttgactcaacgagggcccgaggccttaggttttctattaaggtctctgccccaggcatggtgctctatatcttggccaaataaattactttccttgaatatccaggaatcttttagtctaaagcaatgaggagttatcacctcatcctcaaactccaacaagatctatgccttagtgttgtttttgttgtctgctttgatgtaaaagcaagagtatttggagcaagaagctgcaatgcgccaaatacacaataggccttttctttatcattcatacgacatttctggtttaggtgtatgtagttgggccatgttacttgtccagaggaagagactaaagatataagaataattttttagtcctaaatgctgttttgtttactttctgtcaagatatttacccgtgtcaaattcaaactacagtactgtgtaattatgtataaagtttttttatttatttgaagttagactagatatacgtttttaaatttaacatctggctggacagtgttctattaactcattgaatgtgtttcctttgtcttgtgttaataaatattgatgcctgaaa

SEQ ID NO: 355454 - DNA, 367 bp, Homo Sapiens
  misc_feature (341)..(341): n is a, c, g, or t
atctatactcattccttcaaatacattactctgttaatctcaaagtgtggccaactcccatttacttagaggctgattatctagttttgtagttcctcaggcctctaatttattttttgctttctgctttattgatcttttgcatgtcccccaaagccagaatctgctcatggaggaaggaaggctaagaactgtccttgaggaacttcatcagtaactctggtaaagcatcctgtggaggggagaggagagcccagtcatttgcttagatggtgtttgtggggatcacctgcagatttaaagcctacttctgccacagactcgagtaaggaaaatgttcntcttggatggacacagtggctcctac

SEQ ID NO: 355455 - DNA, 472 bp, Homo Sapiens
  misc_feature (47)..(102): n is a, c, g, or t
tgaaattcagtgtgtattaaacacatctcaattcaaaccatcaccannnnnnnnnnnnnnnnnnnnnnnnnnnnnnnnnnnnnnnnnnnnnnnnnnnnnnnnatctatactcattccttcaaatacattactctgttaatctcaaagtgtggccaactcccatttacttagaggctgattatctagttttgtagttcctcaggcctctaatttattttttgctttctgctttattgatcttttgcatgtcccccaaagccagaatctgctcatggaggaaggaaggctaagaactgtccttgaggaacttcatcagtaactctgggtaaagcatcctgtgggaggggagaggggagcccagtcatttggcttaggatgggtgtttgtggggatcacctggcaggattttaaaggcctactctggccacaggactcggagttaaggaaaatgttctctttggatggacacagt

SEQ ID NO: 355456 - DNA, 413 bp, Homo Sapiens
  misc_feature (25)..(25): n is a, c, g, or t
  misc_feature (59)..(59): n is a, c, g, or t
  misc_feature (90)..(90): n is a, c, g, or t
  misc_feature (96)..(96): n is a, c, g, or t
ttgtccggccttggatgtaaaaagncaagagtaatttggagccaagaagccggcaatgncacccaaataccacaataggccctttccttnatccantccataccgaacatttcctggtttaggtgtatgtagttgggcccatgttaccttgtcccagaggaagagacctaaagatataagaataattttttagtccctaaatgcctgttttgtttactttcctgtccaagatatttacccgtgtcaaattcaaactacagtactgtgtaattatgtataaagtttttttatttatttgaagttagactagatatacgtttttaaatttaacatctggctggacagtgttctattaactcattgaatgtgtttcctttgtcttgtgttaataaatattgatgcctgaaaaaaaa

SEQ ID NO: 355457 - DNA, 1128 bp, Homo Sapiens
  misc_feature (964)..(964): n is a, c, g, or t
  misc_feature (983)..(983): n is a, c, g, or t
  misc_feature (1004)..(1004): n is a, c, g, or t
  misc_feature (1024)..(1024): n is a, c, g, or t
  misc_feature (1041)..(1042): n is a, c, g, or t
  misc_feature (1050)..(1050): n is a, c, g, or t
  misc_feature (1063)..(1063): n is a, c, g, or t
  misc_feature (1073)..(1073): n is a, c, g, or t
  misc_feature (1076)..(1077): n is a, c, g, or t
  misc_feature (1081)..(1081): n is a, c, g, or t
  misc_feature (1083)..(1083): n is a, c, g, or t
  misc_feature (1086)..(1086): n is a, c, g, or t
  misc_feature (1093)..(1094): n is a, c, g, or t
  misc_feature (1108)..(1108): n is a, c, g, or t
  misc_feature (1126)..(1126): n is a, c, g, or t
  misc_feature (1128)..(1128): n is a, c, g, or t
cccagttagcgtacctaactctcctgtgggttttgttaattcttattagactactagagaaaaaccaactggcagtttgctaagcatatctactggtgttgtttctgcgccctcttttggctaattgatgtaattatactggctctaaagatttactgccccataagtaaatagtatagccacattctgaacatatcaaaagtacaaacttaggaggagtgtatgtacaaaaatgtaaaattttatgaaaatgaacatgtttttatgatgttatttctagttcataagaatgtgatgactgctttgcttcatttatgtacgttcccattaatattcttgctgtcaatcaatcacaaatttatatcagattaggataaactaagccattttatgtattttattttaaaccttattttggcagagtaattccttagaattggaaaagctgttactttgaaattaccaatttattacaaaacatagaaatgtattgtagctacaaagacaaccaagcattttctgtgttttaatgaatatctaaaaaactacatttagtttattttactcagttttgaaatgatttttttactggctctattgccttaaaataactaagagattaatgattctttgtataatttcccttatctttgttctttttttaacatttcgcagagttatatctatagttttagtaacaatttcttatgtattctggataactgaaaacaactaaaggtgttgggcattagaaaataattgtgagcagtaagattactgatgtaatatgtatgttggactgaagtatttctttaaaaacattctatttgattttaagcaaaatgtatgttaaagcatgtttttacatcagtaaagtcatttgtcgaccttctggaaaatgaaaggtttttacctagatactgtaagttacacctccttaacaatcatatttgtcattgttgtnctctgcaaacaaaaatgtntcatgggcatcatgtaggctnaagattgtaggcaaaaatgnactgagatcaggacccnncaagcagnaggcaggcagggncagagcaggnggnncttngnggnccatgcnnctgtttaaaaatancaagttgctgatgttcantn

SEQ ID NO: 355458 - DNA, 1544 bp, Homo Sapiens
  misc_feature (769)..(821): n is a, c, g, or t
gcaccttttattgttttcagttatccagaatacataagaaattgttactaaaactatagatataactctgcgaaatgtaaaacaaagaacaaagaaaaggaaaattatacaaagaatcattaatctcttaggtattttaaggcaatagagccagctaaaaaaatcatttcaaaactgagtaaaataaacgaaatgtagttttttagatattcattaaaacacagaagatgcttggttgtctttgtagctacaatacatttctatgttttgtaataaattggtaatttcaaagtaacagcttttccaattctaaggaattactctgccaaaataaggttctaaaataaaatacataaaatggcttagtttatcctaatctgatataaatttgtgattgattgacagcaagaatataatgggaacgtacataaatgaagcaaagcagtcatcacattcttatgaactagaaataacatcataaaaacatgttcattttcataaaattttacatttttgtacatacactcctcctaagtttgtacttttgatatgttcagaatgtggctatactatttacttatggggcagtaaatctttagagccagtataattacatcaattagccaaaagagggcgcagaaacaacaccagtagatatgcttagcaaactgccagttggtttttctctagtagtctaataagaattaacataacccacaggagagttaggtacgctaactggggaatactgaaagttacagtgttaagnnnnnnnnnnnnnnnnnnnnnnnnnnnnnnnnnnnnnnnnnnnnnnnnnnnnncatttctgcattcaaataaaataagtgtatgcttttctagtatattagtttgtagtccaataatttaggggaactgagtacagagggatcaggaccaggaaaggtaaagaggaagagggaaaagaatatgccctagatgaggtaaatctaggaaaaataagagcacaaatcatcagagtgggaaagagaccctgcccagtacccactgctactacatgaagtataaattagccacaaagttctttaggtgatcttcacttggctctgctgttttctcaaggtctttatttgaaaggaatgtatacaatacaaggcattcaactgatatctacctaccttatctatatattacttccttatgaacagttctgtcaccaggccaaatgtggccaaattagcttgcacaaatccaacccttgtgcctgacatgaacattctaattttgtgtttcactaagctttataaatatatttcttctatttaatttactacgtctcttttcagtaccaataaatatgttcgtctgctgtatttctgttcgtatttctgagtttgtaagtaataaagtattctaattagaacatgaaaaacatgatattaacatctctgagaagaacttactctattatttcagaatatgctacaagatatttacatttctgaaagcactaaccacagtatagccactggctgacatggtaaccttctgtttaattatttccc

SEQ ID NO: 355459 - DNA, 516 bp, Homo Sapiens
ggttcaacaacccaccacaaaaccttagtaaaaggatgagccaaaaatgaaaaagactcgactctacagtaagtcagtcagggatttcctttttaatggtttaagacatccaaatggcaagccaggaatagataccattaaagggtctcataggactaaccttaccagagccagaaatctagctctctggaagagatgcaagattctagaaaagtaaagggaagtgtcggcacatctaaatttagtgaacacaaaattaatttttatctagtctgtgacggagggaataaagtttttcatgtatcaaccacctcccccagtcaggtttctccctttttgagattatgaagaagctgagacatacttcttaaggaggtcgtgttttagaaggaaaaggcagaggctatccatcattatgctggctagatgcgcttctgaagaagccggattctgatgttcttaaccaaaatggtgaggtcatggaagtcccatttgcttggagattttgaaaaaaaa

SEQ ID NO: 355460 - DNA, 912 bp, Homo Sapiens
ccgccgtcccctctaccatcagtccagtcctggcccgccctcctgcagccatgtcccggcccctgtcagaccaagagaaaagaaagcaaatcagtgtgcgtggcctggccggcgtggagaacgtgactgagctgaaaaagaacttcaaccggcacctgcatttcacactcgtaaaggaccgcaatgtggccaccccacgagactactacttttgctctggcccataccgtgcgcgaccacctcgtggggcgctggatccgcacgcagcagcactactatgagaaggaccccaagaggatctactacctgtctttagagttctatatgggactggacgctacgagaacaccatggtgaacctggccttagagaatgcctgtgacgaggccacctaccagctgggcctggacatggaggagctggaggaaattgaggaggatgcggggctgggcaactgggggcctgggccggcctggcagacctgcttacttgactccatggcaacactgggcctggacgcctatggctacgggattcagctatgacgtatgggactttaaaaccagaagatctccgagggcctggcagatggacgcgaggccgatgactggcttcgcgtacggcaacccctgggaggaaggcccgtgccggagttacacgctaaccatggtgcacgttcttaacggccatgtggaagcaacatcgagccattggtgcccaaggtgggagtggaccaccacacacggctgggacctgggcccagagggaccttaacgaagaacgcgccacgagccctggggcaggccggcagaagagggggtgggtcaaagcacgccatggccgccgaccgggacctagccagaaggccacccaagtggatctgtacaagctcacaaggacgagcgaagtgga

SEQ ID NO: 355461 - DNA, 931 bp, Homo Sapiens
  misc_feature (56)..(75): n is a, c, g, or t
  misc_feature (98)..(178): n is a, c, g, or t
  misc_feature (245)..(338): n is a, c, g, or t
gaaatgcaagagagggagggaggcagcctcctgaccataaaagctgatttcttgannnnnnnnnnnnnnnnnnnngaaatggagtcttgctctgtctnnnnnnnnnnnnnnnnnnnnnnnnnnnnnnnnnnnnnnnnnnnnnnnnnnnnnnnnnnnnnnnnnnnnnnnnnnnnnnnnngctgagtagctaggattactggcacccgccacaaggcccagctaattttggtatttttagtagagannnnnnnnnnnnnnnnnnnnnnnnnnnnnnnnnnnnnnnnnnnnnnnnnnnnnnnnnnnnnnnnnnnnnnnnnnnnnnnnnnnnnnnnnnnnnnatgagccatcgtgcttggccttcttgattcttgaatacggggtttggaggtgaaagcatttcatgaaacacttaagttcatacacaagagcatcatgaatattctaaaagaggtatctgtgcttttttggtgaccacaaaatattacttcttatgaaatgtttacactaggtgaggaaaagttcattaattacctttaaaccgttccttattttttttaagacttcaaatcggtatttcggctttggcctccagtatcctttctggttgctctggtttgaattaagttcctattatgctgcagcacatatcaaccttccctaagtaaccatttcctggaatgtgaagcatcggtgccattagcagaccatatgcagaaatgtcgtgtacttgcatttcttttttgtgcactctataaggctggttgtgactcagatcagcttaactttttatattatgttatttcactaactgctacagtcaaaatgatcaaatctttgtacaatagaaaattatttaaattttatttttctactgacatttctaattctagtgtaaatgtctatcaataaagaaattactttcaattccgag

SEQ ID NO: 355462 - DNA, 2167 bp, Homo Sapiens
  misc_feature (111)..(111): n is a, c, g, or t
  misc_feature (237)..(237): n is a, c, g, or t
gggatggttgacgtggccctcacgtgagctggagccgacgcgtgcagacgtccttctaatcctagtcttcgtttggtccggttgcactcttcctatagcccagagggcgangagggcctgtggctgggggaaggaggacgaggttctgcctggatcccagcagtaggacgctgtgccatttgggaacaaaggaatagtctgcctggaatccctgcagatcttggggccggaggcagntccaacccttggagcaggaagaaacgcaaagttgtcaagaaccaagtcgagctgcctcagagccggcccgcagtagctgcagactccgcccgcgacgtgtgcgcgcttctctgggccagagcgagcctgttttgtgctcgggttaagagatttgtcccagctataccatgggccgcactcgggaagctggctgcgtggccgctggtgtggttatcggggctggtgcctgctactgtgtatacagactggcttggggaagaaacgagaacgagaaaatctgggacgaagacgaggagtctacggacacctcacagattggggttgagactgtgaaaggagctaaaactaacgctggggcagggtctggggccaaacttcagggtgattcagaggtcaagcctgaggtgagtttgggactcgaggattgtccgggtgtaaaagagaaggcccattcaggatcccacagcggaggtggcctagaggccaaggccaaggcccttttcaacacgctgaaggaacaggcaagtgcaaaggcaggcaaaggggctagggtgggtaccatctctgggaacaggacccttgcaccgagtttaccctgcccaggaggcaggggtggaggctgccaccccaccaggagtggatctagggccgggggcagggcaagtggaaaatccaagggaaaggcccgaagtaagagcaccagggctccagctacaacatggcctgtccggagaggcaagttcaactttccttataaaattgatgatattctgagtgctcccgacctccaaaaggtcctcaacatcctggagcgaacaaatgatccttttattcaagaagtagccttggtcactctgggtaacaatgcagcatattcatttaaccagaatgccatacgtgaattgggtggtgtcccaattattgcaaaactgataaaaacaaaagaccccataattagggaaaagacttacaatgcccttaataacttgagtgtgaacgcagaaaatcagggcaagattaagacgtacatcagtcaagtgtgtgatgacaccatggtctgtcgcttggactcagctgtgcagatggctgggctaagactgttaaccaacatgactgtgactaatcattaccaacatttgctttcctattcttttccagacttttttgctttgttattcctgggaaatcacttcaccaagatacagattatgaaactaattataaactttactgaaaatccagccatgacaagagagctggtcagttgtaaagtaccatcagaattgatttccctctttaataaagaatgggatagagagattcttcttaatatccttaccctatttgagaatataaatgacaacataaaaaatgaagggctcgcatcatccaggaaagaattcagcagaagttcactttttttcttattcaaagagtctggagtttgtgttaagaaaatcaaagcactagcaaatcacaatgatctggtggtgaaagtaaaagtcctgaaagtattaaccaaactctaatttggagtctgtcccaaacaatattgagatatttgcagttggtacgatgtgatttgtaaattctttgtttttcattgtgcgtatatggtaaagagatcttttcagctgctattttggaataatgactatcatatatcataacagtgactgatgttggttgtaatggttgggtttaggatgaaccattttaaggatgccaaatgaaatattagtatttgtacacagaaagaatttattgatttgatcttattacctagattgagattttttaatctttcctctacctaaactgacaatgaattggttatacatcatgcataagctacacttttatattagtttatatttgttattctaagacttgtgtttcatcaataaagttgtgttttaagcagcagaaa

SEQ ID NO: 355463 - DNA, 1079 bp, Homo Sapiens; identical to SEQ ID NO: 99129

SEQ ID NO: 355464 - DNA, 501 bp, Homo Sapiens
  misc_feature (19)..(19): n is a, c, g, or t
ctattattttctctactgnggaacccaatgtggaactggcactgatatttttattactgcctttatatgaatctataggtatctaaatgttaaggcatgtatgatctttgatcatttcttttttcaaattaaagttgtataaaagtttcaatatcttgccttaaattagttgcctattctttctaggattcaaatattgtgacatttaaaaaagaaaacattcacttttgaaacttagacttcagatcaaaaaggactgaacccccactatcataatccatacattcatttccatgttgtttgactagcagtgcatatatgaatgaatatggtaattaatcttacctataagaaccaaatactttaattatattaagatagtgaataaagatgtataatatttttattaataccttgaatatattcagtggattgaatgtgacttcataactgtactacgattgtattaaaatatttctggaataaaagaactctgctacc

SEQ ID NO: 355465 - DNA, 906 bp, Homo Sapiens
  misc_feature (40)..(40): n is a, c, g, or t
  misc_feature (630)..(653): n is a, c, g, or t
ggcagtaataaaaatatcagtgcaagtcctacattgggtncctcagtagagaaaataataggttctttgagtgaaccattatcttcaaatcccaaaacactggcaagaagaaataattcttctgatgcagggacaacatgtagcataattatttttagtcaataaaggtgagtataaaatattgtgattatacataaaaattagtgtcttggccagtttgttaaactttttttagatttactttaatgtcagcttttaaaaaatgcttaaaaatccaactgatttaaaatttattgatagtagtagtgcaaagaggctccactctactttttggtacgggctgaagattagcatttcataaagaaataaactatatgtaaaatgtatgtgtgtttgaatgagtaaagaaggcacaaaatgagttaaattaagagaaaacattaccacttgttctgaactcttaactgtacagtattataatatacacttagatatgaatccagatttcttataatggaagtggacaggacattttttagcctctattatttgtgcctaaaagacactgtcataatagactgcaaaaaggcagtacatgttgagtctaattaacgacctctaccaagacannnnnnnnnnnnnnnnnnnnnnnnaaattacagtggctaagtgataactggtggaatggaattcggtctcaaaagcttaagtgaaaattactagtacatttgcatttgcaaaggtacttacatactttaaggaaatgttaatgatctgtggaaaaagcaaatggtggtgctttgatctgcattttaattaacttattaaatagacaacacattttaacatttaaaaaagacattcatataccatactcatgggtttaactacatatggaccattagt

SEQ ID NO: 355466 - DNA, 713 bp, Homo Sapiens
ttttgatatctttcattcctgtgtagcctaagtaaggtgactcaagatgatacaccgagagaaaaatgcaaaatatatttggttctcatttctgttgctgtcgtttcctttttaaagacgatttatcaactgctgccatttggaacttcctataagaaactaaaaatgatctatttcagtgttcctttcgcctttcctctgctttctgaataaatggtttcagtaacccatgctgttctctccctattctacgtctttctccctatgttgaaaaaagattcccacagtttctgatgtgtgtgtttatagtcttcaatgtatgttaacatgttaggaactgagtatcttaagagatgtcttagaatgctttagttttcataatttgtcctttatgtatttttcattgtatttgctgttttgacatggaagtaatttaaaaagttggtgcaggaaaggactctttactgttgcacattttggttttctgatatgtaataaattcatggcttggcagctgacatgatgtttcccagagagaaggagatgtatttctgcagggtccagaccaaaagagccatttacagcatgttctcccatgttccattatcagcctgatgaaacctgccctgccaaggcataaacttttgtactagctgtctccatattatgttcaataaattctgtgctctgaatatattaaaaaggatcaaagg

SEQ ID NO: 355467 - DNA, 763 bp, Homo Sapiens
  misc_feature (32)..(33): n is a, c, g, or t
  misc_feature (35)..(37): n is a, c, g, or t
  misc_feature (72)..(72): n is a, c, g, or t
  misc_feature (521)..(529): n is a, c, g, or t
gttgtcttcatgaatataattacttgagattnncnnntcttaatggaattagtttattagaaaatgtctgcnttaaatccgtagaaaaggaagaaaagtgtagcaacaaaaatgtagccattatctaacttgccataaatatttgcagttatgataccttggaatgttgccacgatatggattgctttgattaaaagatgtcagttgaataaaacagtactgtgggagaatcgctttctgctgctagataaatgctgatgtttatctttaaaccaggaaacattgatcctgtaacaatgcccgattacaattgctttattacaccccagggctgatggagatgtaatcacttggctaatggatgtgggtgcaggacagatgctcgcttgctggcctgctttcctgcttgcattctgatgagctgcaggagtgcgcctggccttctgcaggtggagctgctgtcagagcttcgtttcactgatacccaaagccatgtctgactgaaataaaacaggttcccnnnnnnnnnccctttggaaaatgccaactaagggagactaatcagatatcttaacacaatttcatccaggcttagtgctaacaagattgcggggctttttagggtttaagaagatgagaaatgagtgtgcacgtttcacacgttgacttgccggtttttccatgtcatacaaaaaagtcctggctgtttctccgaactggctgcctgcattcccgtctttcttttgtttttaagaaatagact

SEQ ID NO: 355468 - DNA, 930 bp, Homo Sapiens
  misc_feature (223)..(223): n is a, c, g, or t
aggggggtgtccaaaaaaaagaagccttgataagagtagaccattaagtgctgatcaggggctgctaaagtaactatcagttcagcatggagacttaggggcaccgaagtgctggtactagagccattcatagtgttctctcaaggctgctcaaaaagtgtcgatagcattacctatgcaattgcggcactaataaatacataggaatcgaacagcggaatanaatgctccctggccacacagccataacatcctatggccctgaaaatagttctgccaagctgcgtgcagtggacacttcacggctggcacaggagagatcacaaggccttgctcaatttcatcaaaagtgttaaagcgactcagcagattgtgaagcacaagtggaagctgataattggtgtttcttacaaatcaacggcttgtctccacacatcaaggtaaaggcgtcctctacaccaaagaaaatgtaaattgggatagaaggtcattatgtttttaaataaacttggttaaatttgtagaaagggcaatggtaaatactgagctcacatgtcagatggagagaaaacttgagaaaagggaagaagataatgagctggaacctttaccatttagactttctctggctagctttctgagaatgatcatcaaactcttatgaggaccctttccaatgtattgactgcacttccccagggattgtggcaaatggtaaatatatattttctccttgctacttgcaataaccctgctcataaagtgttactattattcacttgcaggtgagaaaatcaatgtaaaagaggagaaataacccacacaaccacatacaactaggaaatgatagatggatctgaaaaaaaggataagcactcttaacaagttcaacacccaagtactattgcaagtacaagctgtatttcatgg

SEQ ID NO: 355469 - DNA, 385 bp, Homo Sapiens
atgactaaccagtatggagctggcttgaaatcctcttgtttatggcagtacatatcggttatgattcaaaaaatatagcccatttccaaaaacctgcaacaaagagatactttctcaggtgtcagtttcttggtcgggaatgaaaatagtgccaacctgtgataccttcactctaattttactttctgaggaagttttctgtaatagttatttggtgataattattaatactggtgagaaaatcaatgtaaaagaggagaaataacccacacaaccacatacaactaggaaatgatagatggatctgaaaaaaaggatatgcactcttaacaagttcaacacccaagtactattgcaagtaccagctgtatttcatggaaaaaaa

SEQ ID NO: 355470 - DNA, 850 bp, Homo Sapiens
gtgtcgcgaacggctccaagttctatatggcatcaagataccagacatgacctcagaatggtcatatggggcagaggaggacctttccattcagtgactgccaggttcaccaacctgctgaaggataggttatgagtgagggcaatgcataagaaggccttcattacgtgtgtgtagtccagtttggatacctgttctcgtgatagtgtatagtagtataagggaataatatggtacttcgtgcaccgttactgggcaaagttgagtgtacctgtcaataattttaaggatgttccttgtaatagcagattaatcttgttgtgttttaaagatatagaagttctgagttagacctgtttagctcagaatagtgggctaaactaccataaaattctctgtatatcttaaatggtaatgggtcaaaaactccagaaaatcatcagttgataacacacctacagataagtgcatgggtaggaggggatagccaagtgcccatgataatttgacctcagtaaattaaactgggcaatacacatatttgctattctgatactgcattagacttataaaattccatctaataagcattcataaaactggacctctctgtatatatctagcttagacagggatagggaaaagaataactgaagaaactagcttacaatagctaggtttcgtcaggcttattctatccagccagaaaccaccaccagagagaagctgagccattcagctgtctgtctcctctccctctgtttgaatagtcatgcctaggccttgctgcagaccaaagcctgtttgttaggagcaggaagagactttgaaaataaaaggggggtggggg

SEQ ID NO: 355471 - DNA, 462 bp, Homo Sapiens
aacgtggcagtaatctcgcggtactaaggtagcgaggcctgggtggcgaatgcggcacgagggagacgcctaaaccgcggcactgcccggtttgagcgtagccaaacctgcccaccggctttgtagccccgattctctgtgtttgctcccgtctccgacgagagaggcggcgacggtggcgtctgcgacgggagacagcgcgtcggagcgagagagcgctgcgcctgccggcgccccaacagcggaggcgccgccgccatcggtcgtcaccagaccggagccgcaggccctcccgagcccggccatccgtgccccgctcccagatctctatccttttgggaccatgcgcggaggaggctttggggaccgggaccgggatcgtgaccgtggaggatttggacgcaagaggtggtggtggccttcctcccgaagaaatttggtaatcctggggagcgtttgcgt

SEQ ID NO: 355472 - DNA, 1723 bp, Homo Sapiens
  misc_feature (1270)..(1270): n is a, c, g, or t
tgtatcccggggaggggcagggaatggggagaatcacgctttgtatttttttctttcaaatatttatctaaccacatgtatatacaactttctaaacttgaagtctgaatttgaaatgacgaatctttaaaccaaaagatacatataccattgacagagacacctatctatacaaacctagcccacgggaggctacatctgtagcaataaggatgggtgcctttccagaacggaactcattaagtacccaatctctttctggttgactcttgtctccatggatacacatagctggccaaccatctctgcgcatccttcgagtcagatcatcacagcgtctctttgtctccacaaatattattgttttgttttccttttcagccattatttcttccattagttggatcaacttgtggtctttttcactttccatgcagacatccactatctggaggatgttgtggttggcactcaactccagattgcctacgttgatctgggtgtaatcacgaaggaaatcctctgcaagctgtcttacttcttttggccaggttgcactccacatcagtgtctgcctatcaggcctgatttggtcaacaattttacggatctggggttcaaaccccatatcaagcattctgtcagcttcgtccaatacaaggtaagtacatcggcgaagatttgtctttcctgactccaggaaatctatcagacgtccaggagtggctatgcagatctcaacacctctttccaagtctcgaatctggggacctttaggagcacctccataaatacaagtactcttcaatctagaacatttgccatagtcatcggccacctgctgtacttgctgggcaagctctctggtaggagccagaactagacagattgggccatctcccctttccaagtatggctggtggttaatatgaacaattgcaggcaggagatacgccaacgtcttcccagagccagtctgagcaatgcccaccatatcccggccactaagagccaacggaaatccctggcactgaattggagttggttctgtaaagtgctgatccatcaacacatccattacatattgtgggaagttagcatgatggaaggcaaacacgggtttaggacaaacatctccccccctcactgtaatctccttctttcggcgtagctcatcaacctcatatggtgtcagccttgctacttccggatgttccacataaaaatttttctcaaacttggggagctcactcaaatcccactttttttnacgcaaacgctccccaggattaccaaatttcttcgggggaaggccaccaccacctcttgctccaaatcctccacggtcacgatcccggtcccggtccccaaagcctcctccgcgcatggtcccaaaaggatagagatctgggagcggggcacggatggccgggctcgggagggcctgcggctccggtctggtgacgaccgatggcggcggcgcctccgctgttggggcggcggcaggcgcagcgctctctcgctccgacgcgctgtctcccgtcgcagacgccaccgtcgccgcctctctcgtcggagacgggagcaaaacacagagaatcggggctacaaagccggtgggcaggtttggctacgctcaaaccgggcagtgccgcggtttaggcgtctccttccttcccagcgactgcacaaaatggcggccgccgctgagtcggctccaact

SEQ ID NO: 355473 - DNA, 1126 bp, Homo Sapiens
gtgctagtcatcatcgccgtctgacagaagaaagcaaagcggttgctcggtgcctgagccgcacgctgggccctgcccactgccggcttctccgtcccaacaatgacttaccatgtgcaagcacagtgcactgcggccctggaaaccccgaccgctgagacgttctgtgtcttgacagacaaaggcagatggcaggagttgctgatatttattcaaacgtcatccatacaataaagaactctgcttttaaaattccatttacatcagcagttaaaaaaaagtgacagtggatgaaacatgaagctgtaaagtgcctttatggggagggtcacacaagggcgcgcagctgtgcgacgagacggaggcaccgcgcctgcacagtacatcagggacatcgcgggacacagcacgcgttccaaataacttacacatcagaggaaaagctgccgagtctctgcatgcttcctatttgattccgcaccctggaggtctggccagtgacggctacaagccgctgggagggtagcgtgaggggaatgcagccacgcctgcctccactgtgctggggctgggaaccgtgaggctgtgaggcggccctcccagcagcacggggacagcgaatatgtcctttccagcaagacacatatgtacacacatggtcagaggtgcacacatacaaaaacatctgcagactagacaccgaaagggcttcaaaagttttgaacagaatatgtttctgaaacacaagaagttggtaaaacagaagagtttttttccagttctgctgtgacttgaataaaatactctccccactttcacttctgtactcaaggtggtcaccaggtggcaggtggacctgggtgggaggcagggggcgcgtggggagtggagtggaggtgcggcctccgaggaggctgcagtgcagtgaggcaggggcaggctctctgagctatggtcggcagcactggtccacgccacaccctgcaggaaactgcaactttgtattttctttaaaagcataaaaatatctattcagtgagcccttaaaaatccagtcctgcattttttggtgaaagacgtactgttaatttagttaatccttgaaatgaccgggaataagaatccg

SEQ ID NO: 355474 - DNA, 867 bp, Homo Sapiens
  misc_feature (62)..(62): n is a, c, g, or t
  misc_feature (93)..(94): n is a, c, g, or t
  misc_feature (849)..(849): n is a, c, g, or t
aggctatggtcccttggatttgctggcagaagaggtactgcatatgcgagagcatttaccgnacatataaataaacacttctgaagtctatannaaaactaaaagttaccagtgttctgaagatttcctcaacttctcttttgatacaaatgtcaaaaatctaaaatgacaattcatgttcagaagagatataaaatataagaaacctgtgaaaagccatcatctcaaggtcaagagttatctgaatcactgacatcgagcaaaggaaatttacaccataaaaagtatgaacagtttttaaattcacctttaagactgtcagtagttcaaaacctctatcatttctttaaaccaacgaacacttccaaatgtgtagagacagtaagatctgccatgtataaatccatgagtactatttcagaggcttcattccttacctgctgtgttcctttaaatattggatatttagtgcctaggaagtctatactggagaacagtttagacaggacagtataagaatgtccccttttagcacaataataaagttgattgactaacattttctacacagctcctgaactttcacaattcacaaatactaaatcatcaaccaagaatccaatctctccagtaattaaatgccagcattataaaacatcaaaactagcacagtagtcccaatgagttcagtaaagaatctgcccaattcttctctcctgcctctgtgaggcaaagccctgccccagataatcagggcagggataataccccttccttctcagttttgtgcctgcttatggaagcttgtaagtggaaaacacacacagtacggatgtggaatgtgtggcntcgtgccaattctgcagc

SEQ ID NO: 355475 - DNA, 193 bp, Homo Sapiens
aatttagcaatccatttattgaacactatacatttcaaatgctaattaaaataataaaatattaaaattaatttaaagccttacagtacaacagtatatgtaaataattcaatggaaaaaaatgttcctgaaatatgattatcaagtctattgatgtttaatttacagaaaacatttaaacattaaatagtat

SEQ ID NO: 355476 - DNA, 730 bp, Homo Sapiens
  misc_feature (150)..(251): n is a, c, g, or t
aaaactctcagaaaagctggcataaagtttgctttgagatgtctgtgagcacatccttcctctaccatccctggttagaatggcgttctcactcacctatccacgctgcagatgagggtgaagaagtaaaaccatttaaaacatgcatcnnnnnnnnnnnnnnnnnnnnnnnnnnnnnnnnnnnnnnnnnnnnnnnnnnnnnnnnnnnnnnnnnnnnnnnnnnnnnnnnnnnnnnnnnnnnnnnnnnnnnncatgtgtaaccaacacacaaaaccctacacaaccaaacggcactggtctctttcagagccttccctcaccaagccctaccctgtccccagagatgaggccatgacatgacagtactttagagagttttagcaacgctttgttttttgagcccatgtgctcatatgagcttgttcaaaccccagagtaggggcctgaatgactggacctttacacatcagcgctggcccagaaggttacagattggcactgggagtctcccaggaaggaaatgctgagcactttttagttaatgaaggtccgaagtctcagctggtgaattgtcaaaatggatgatgtactcaaatgtaaatgttttgtgttaaagaattatcatctacttcttgtttcttgtgaatttcttttgccctttttcattcctgtcttcttagagggtctttttgactgctgcaagtggggtcagttgctcctctcctcagat

SEQ ID NO: 355477 - DNA, 2021 bp, Homo Sapiens
  misc_feature (1391)..(1435): n is a, c, g, or t
  misc_feature (1928)..(1928): n is a, c, g, or t
gggacccgaggttccaaaggtgaatatcaaatcaagatggagaattttgacaagactgtccctgaatttccaactcctctggtttctaaaagcccaaacaggactgacctggatatccacatcaatggacaaagcattgacaattttcagatctctgaaacaggactgacagaataagacttatccattttttaatgtattaaatacacccagccagttatgcagctactttttctttactgtatctcatgttttcttttttcaatgctaattatagctctctacatcacggtaatcatgcctatgcctacataagaatggctgagctaacaatacacattctggaaacataacactctacattacaaagtttgttacctgctgaaatcaatgtaactcaacttgacagacacttatacagaaatgttgctggtgaatttataagaatgtggtatgatactagtaatgaaggcaaaatggacagtgaagtttaacacaactgaactctaagaaaatcaaccattaatctctcattttcatctgcaaattgaagcaacagtttagtttcaaacctagctccctgggtggaatgacgacttcactatacttagtgaatatcctttaagagctgggatttttttcaagacaacaaagatcattcatttggttctttatactatgaaacttgagtaagtattacctccttaatttttaacaactaagaacaaaaattaacgagaaaaacaacaaagtacagatttatacataaacctaaaagcatttgaacatgacacccgaacacatacatatatgttcacttatttgtggcagaaggtgatcagataagctccagcccaaatggaacctgtggggtggtattttgcattgcaaggagacgcaaaattttattttaaaactgtcctccataataatcaaacggtgattcatctaaatgacttctagcaacctaagtaaaaacattcccctcctatgtatgattcatttgatcatataaaacatcatgatggctctaattcataaatacaaaaatatatttaagtctttatagatataaagctttacttagatataacttgagtgagtagggaaaaaaatctacagtagataaagcaaaaggataattaggcaacaaagcattttcaaactcaaattccctgttttccaacttcaaataggttttttctataaacacaaaatcagtgtttattcaccagtaggaggttggactagatgaactctattatttctttctaaatctaatagtctataaaaattatgtttcctctgttttttattttatctatgctaaaatgagccctttcccttatgtccagtttaagatgatcatttgcatgattttcatttcaatnnnnnnnnnnnnnnnnnnnnnnnnnnnnnnnnnnnnnnnnnnnnngtcaccctatcaggtttcaaacagatttgtggctgttcttttctgaaatttcccttattcaggtttctgtgggaaaaatgaaagattaaccttccccactggtgatgacctaggcaggaatcatctcttgaaataaatactagctgagtaaaggcaagcaggtgtgaagagcagggctcagcagcaagtcacatttttctactatttgaccaaaaggaaaagaaaataaagaagaactctggagtggtctaagactgataatagcagaagaatatcaagaacacagaaacttaattattgtgaacttttgctgtttgaaaatcttagacattcattcttaagtagaaatcagaccaacagattttcccaacccaagactattgtaacacataaagacagcaagaattcttatttctataataaattaacaagattcacctaacctttgaaaataaagtagtattgaagacttacatggtatgttttttcctanaggcactacatcacttacacagttcaccctctcgcttgttaagtgaagctgccccaagtgacataagtgaatgagtaaaaactgagatctagg

SEQ ID NO: 355478 - DNA, 530 bp, Homo Sapiens
  misc_feature (116)..(258): n is a, c, g, or t
agcgggccttttctttctggcatggatcaagagaaaagaaaatacaagaaaacagacagaagatcctatctgcgacaattaagagcactctaagaggaaaacacatcccaccacannnnnnnnnnnnnnnnnnnnnnnnnnnnnnnnnnnnnnnnnnnnnnnnnnnnnnnnnnnnnnnnnnnnnnnnnnnnnnnnnnnnnnnnnnnnnnnnnnnnnnnnnnnnnnnnnnnnnnnnnnnnnnnnnnnnnnnnnnnnnnntctgacagctttggagattatgacattggaataaaggaaaaacgtacaggactcatgaagagctaaaatattcacaaatatcaagcaaaagtcaatgaaatttattttgagctatttacatcatttaataattgagcaaggtatactcctatgaacaaaatttggagcatgtttgtctctctctgcctggcgtcttcagaatttggaaactagttatggtttataatcagctatagaattttaacacgtgctctcaaatgcaagtttctgac

SEQ ID NO: 355479 - DNA, 792 bp, Homo Sapiens
  misc_feature (80)..(271): n is a, c, g, or t
agcggacgtagcaggaataatactgccttttctttctggcatggatcaagagaaaagaaaatacaagaaaacagacagannnnnnnnnnnnnnnnnnnnnnnnnnnnnnnnnnnnnnnnnnnnnnnnnnnnnnnnnnnnnnnnnnnnnnnnnnnnnnnnnnnnnnnnnnnnnnnnnnnnnnnnnnnnnnnnnnnnnnnnnnnnnnnnnnnnnnnnnnnnnnnnnnnnnnnnnnnnnnnnnnnnnnnnnnnnnnnnnnnnnnnnnnnnnnnngacgggggcttctgacagctttggagattgtgacattggaataaaggaaaaacgtacaggactcatgaagcgctgaaatgttcacaaatatcaagcaaaagtcaatgaaatttattttgagctatttacatcatttaataattgagcaaggtatactcctatgaacaaaatttggagcatgtttgtctctctctgcctggcgtcttcagaatttggaaactagttatggtttataatcagctatagaattttaacacgtgctctcaaatgcaagtttctgataactttggagattgtgacattggaataaaggaagagctggaatgttcatgaatatcaagcaaaagtcatggaacatttattttgagctatttacagcatttaataattgagcaggtatactcctatgaacaaaatttggagcatgttgtctctctctgtctgcctggcatctacagaatttggaactagttgtgctgtactgcatgagaatgcctgcatttagtatgcgaactggaatg

SEQ ID NO: 355480 - DNA, 416 bp, Homo Sapiens
  misc_feature (130)..(130): n is a, c, g, or t
  misc_feature (356)..(356): n is a, c, g, or t
  misc_feature (384)..(384): n is a, c, g, or t
tctcaaaatacaaagtgcattgaagtatacagagaaatgcctgaatatggcaagcaaataatgtagattaacattctattattgtatccgttttacaaaaaataaaattttgatatatgccggagaacgnatttagaatgcaataagttgtctaggtttttctgtttcagtgtctctcccaatggcacgaagggttattgggcattgtccccacccccgcctttttaacatgtgcactatctgggattcctgtaaatgggccttgcaaacagaagtgggtgtgtattttcaaggcacctttcccccattgtatccgaatccctcttgtgtggatatctgtggacaaatagccttcnttcttgtgtttttctgttggggactaanttgtcttcacgtaaagctataggaccttacta

SEQ ID NO: 355481 - DNA, 981 bp, Homo Sapiens
  misc_feature (18)..(18): n is a, c, g, or t
  misc_feature (320)..(320): n is a, c, g, or t
agacgcgctggtgacagnctgagatggctgggcatactgcgagggcaatggaggaggagggggagtgccctggatgggttcatagcgtttctcgccaaatgatctatccacaccatcagcttcaggaggctttccctttgaagaataactagaaaaatttgattgattctgagaatgagctggcttggcaggctcgaagagatggctggcagcaatgtgtgcagcaggcttattctcaaaacttcttcggtcaaagtatgacagctgttttcgataacattcttcatcttcttcagggtcataatgattggaccgaacanatatcttcaggtggcttcagttgaggttcttgagggtctgggatcctgtacagagttttgtcatgttcactgaattgattctgagaagtgggtttgggaccaatgatgggagcacctgaaggtttagatgctacttctggaggcttaaaactgccagtgtcatttacatccttcttggtctctaaggatgcagatcttttgttttcaaacatcttaactctggtgagtacagaccgtggcttcattgctggatcttcctcctcttcggtttgagttgggggtggaggcagtggtttggtgtttgaaggcagagcttctggcttatgctgagatgaaggtatcagcggagggacagctgcagcaccatggagaggctcaaaatgacctgctctagaggtaaatccttggggtggtacttgctcgtaactgcgtgaatattgctcaaaatactgcttggactctgcaggcttgggccctgctgaagggtggggctgggcttccggtctgagtctaccatgtgtgtcatacccaggagctggctgctcttcgtgccgcagggcggatgctctaggtgcctgttcgtaacgtgttctgctgtcgtaagacagaggggctggctcttcaaaacgtggaaagtaccctcgttctgaggactcttcgg

SEQ ID NO: 355482 - DNA, 502 bp, Homo Sapiens
ctatgacagagagcaactaaactgtccttgcaaacagagaaatgtcctcccgaactcaacataatatcctaacagaattgtaggtaagtgatttccagtaaaatactgaaattggggaaatgaagtagtgtttagctgtgggtactttccagaggaatgggaaatccccaatgttgtgactgctatcactcaagagtagcttaggactgccacgtaagatagggaccccctggccctatcccataaagggaagggctcctaagaagcactggttctccaccatccggagctacacttcccaacacagactttcacccttaattttcattcaacaattagtgggaagactgtatttagcacagtgagaatatgattaaaaataaatacataaataggaataaaagtagaaaaggaataccacctccagtgcagttaaacttgccatagcactggatgaagagttaaaatctatttcatttttcaagacatatttttatttttg

SEQ ID NO: 355483 - DNA, 966 bp, Homo Sapiens
tgattgctatgggaagtgctgcagctttaaggaatctcatggcaaataggcctgcgaagtacaaggatcccaatattatgtctcctggctcaagcttgccatctcttcatgttaggaaacaaaaagccctagaagcagaattagatgctcagcacttatcagaaacttttgacaatatagacaacttaagtcccaaggcatctcatcgtagtaagcagagacacaagcaaagtctctatggtgattatgtttttgacaccaatcgacatgatgataataggtcagacaattttaatactggcaacatgactgtcctttcaccatatttgaatactacagtgttacccagctcctcttcatcaagaggaagcttagatagttctcgttctgaaaaagatagaagtttggagagagaacgcggaattggtctaggcaactaccatccagcaacagaaaatccaggaacttcttcaaagcgaggtttgcagatctccaccactgcagcccagattgccaaagtcatggaagaagtgtcagccattcatacctctcaggaagacagaagttctgggtctaccactgaattacattgtgtgacagatgagagaaatgcacttagaagaagctctgctgcccatacacattcaaacacttacaatttcactaagtcggaaaattcaaataggacatgttctatgccttatgccaaattagaatacaagagatcttcaaatgatagtttaaatagtgtcagtagtagtgatggttatggtaaaagaggtcaaatgaaaccctagattgaatcctattctgaagatgatgaaagtaagttttgcagttatggtcaatacacagccgaggtagcccattatatagatagggcggattatagggatgataatgatggagaactagagacaccaatgaattatagtgttaaagattgggatgagcagttgaattgtg

SEQ ID NO: 355484 - DNA, 298 bp, Homo Sapiens
  misc_feature (126)..(126): n is a, c, g, or t
  misc_feature (151)..(151): n is a, c, g, or t
  misc_feature (179)..(179): n is a, c, g, or t
ccaggcgaacgggtcctgcgcctcctgcagtcccagctctccaccgccgcgtgcgcctgcagacgctccgctcgctgccttctctcctggcaggcgctgccttttctccccgttaaagggcacttnggctgaaggatcgctttgagatctnaggaacccgcagcgcttttagggacctnaagacattatggagaaagactggaataatcataagaaaggaaaagactgttccaagcttttggaaaaagtgtatttatcagcagttagtgagagggaagaaaaatcagaagaagttcag

SEQ ID NO: 355485 - DNA, 1035 bp, Homo Sapiens
  misc_feature (837)..(837): n is a, c, g, or t
  misc_feature (840)..(841): n is a, c, g, or t
  misc_feature (844)..(845): n is a, c, g, or t
  misc_feature (862)..(862): n is a, c, g, or t
  misc_feature (903)..(903): n is a, c, g, or t
  misc_feature (915)..(915): n is a, c, g, or t
  misc_feature (917)..(917): n is a, c, g, or t
  misc_feature (920)..(920): n is a, c, g, or t
  misc_feature (931)..(931): n is a, c, g, or t
  misc_feature (934)..(934): n is a, c, g, or t
  misc_feature (941)..(941): n is a, c, g, or t
  misc_feature (946)..(946): n is a, c, g, or t
  misc_feature (950)..(950): n is a, c, g, or t
  misc_feature (958)..(958): n is a, c, g, or t
  misc_feature (966)..(966): n is a, c, g, or t
  misc_feature (973)..(973): n is a, c, g, or t
  misc_feature (975)..(975): n is a, c, g, or t
  misc_feature (979)..(979): n is a, c, g, or t
  misc_feature (982)..(983): n is a, c, g, or t
  misc_feature (988)..(988): n is a, c, g, or t
  misc_feature (991)..(992): n is a, c, g, or t
  misc_feature (999)..(999): n is a, c, g, or t
  misc_feature (1003)..(1004): n is a, c, g, or t
  misc_feature (1010)..(1010): n is a, c, g, or t
  misc_feature (1020)..(1020): n is a, c, g, or t
ctgcatctgcgccaggcgaacggggtcctgcgcctcctgcagtcccagctctccaccgccgcgtgcgcctgcagacgctccgctcgctgccttctctcctggcaggcgctgccttttctccccgttaaaagggcacttgggctgaaggatcgctttgagatctgaggaacccgcagcgctttgagggacctgaagctgtttttcttcgttttcctttgggttcagtttgaacgggaggtttttgatccctttttttcagaatggattatttgctcatgattttctctctgctgtttgtggcttgccaaggagctccagaaacagcagtcttaggcgctgagctcagcgcggtgggtgagaacggcggggagaaacccactcccagtccaccctggcggctccgccggtccaagcgctgctcctgctcgtccctgatggataaagagtgtgtctacttctgccacctggacatcatttgggtcaacactcccgagcacgttgttccgtatggacttggaagccctaggtccaagagagccttggagaatttacttcccacaaaggcaacagaccgtgagaatagatgccaatgtgctagccaaaaagacaagaagtgctggaatttttgccaagcaggaaaagaactcagggctgaagacattatggagaaagactggaataatcataagaaaggaaaagactgttccaagcttgggaaaaagtgtatttatcagcagttagtgagaggaagaaaaatcagaagaagttcagaggaacacctaagaaaaaccaggtcggagaccatgagaaacagcgtcaaatcatcttttcatgatnccnngtnnaaggtaagcctccaganagcgttatgtgtaccacaaacgagcacatttgtgacagacnttcggggctgtntnaancatagctccanggngagcctntggcngatnttcacccncacctggntgggatnanacangannatctntgnngttctgntttnnaaggcnacgtctcgtnaaaaatccaaaaggt

SEQ ID NO: 355486 - DNA, 482 bp, Homo Sapiens
  misc_feature (91)..(91): n is a, c, g, or t
  misc_feature (292)..(406): n is a, c, g, or t
  misc_feature (409)..(409): n is a, c, g, or t
  misc_feature (456)..(456): n is a, c, g, or t
ttatcaaatgtaccataaggaaagtgaaaatgctggccacagttgaaaagataatcacaatacacacatatgtcaaaaggcttgtaagcanaatataaagaaatcctataaatacaagaataagactgacaaccaaatagacaaatcaacaaatcacttgagtaagcactatatgaagaatatacaaatgtacaaggcttcagatacatgctctgtttgctcaacttcattagtcattacagcagtataaattaaaccctcaatgagacaactctattgccataccagaatnnnnnnnnnnnnnnnnnnnnnnnnnnnnnnnnnnnnnnnnnnnnnnnnnnnnnnnnnnnnnnnnnnnnnnnnnnnnnnnnnnnnnnnnnnnnnnnnnnnnnnnnnnnnnnnnnnnaanaattagaatggtgaatttaaaaaataatttaaaaataatttaaatcngacaacaccaaacattggcatcatcc

SEQ ID NO: 355487 - DNA, 441 bp, Homo Sapiens
  misc_feature (50)..(50): n is a, c, g, or t
gggaaacatggtttcttggaacatttgtaaagcattcactttatcccttnatttacattgtttgtgtaccattgtgacccatatgttaaatgttgttatgaaaaactgtgttaccagttttcccaggaggttagaactccagctttttatgttaggatgctaaactagatattctaggtattgtgttgtttcttatgcattaacgttcacagagaaggagggttttatccaaatggaagggctggattaagcacaatgcagtgttgaagcagcatccgcctactgttggactgaaatgagcattcctttcttctcttagaggagaaaatgtggggcctatatatgactagtggttgttgatgtttggcttttgtgcgccctcagtatatgaaatacccttcctcaagaaaaagcatacgttggctgggtgtggtggctcat

SEQ ID NO: 355488 - DNA, 517 bp, Homo Sapiens
  misc_feature (26)..(26): n is a, c, g, or t
  misc_feature (37)..(37): n is a, c, g, or t
  misc_feature (46)..(46): n is a, c, g, or t
  misc_feature (52)..(52): n is a, c, g, or t
  misc_feature (80)..(80): n is a, c, g, or t
  misc_feature (157)..(157): n is a, c, g, or t
  misc_feature (332)..(390): n is a, c, g, or t
  misc_feature (399)..(399): n is a, c, g, or t
aattaatactaccaggttttaagaanaaatggtacangaagttagnacattnccatccccagctgaccagaatttacagncaaggtctggcaccgttgaataaggggtcctacctgcttaccccggaaagagctgggttttcgttgggcataaatgnccatggttaggtagggacagcacaagcagtgcctttcccaggccagcacctgccctgagcccacggatcattggcagttagtcctagagaactagatgtctctgttggcaagtaaaatctatcttcttttttaaaaattgaaagatcttaaaattttatttttaagataagaacnnnnnnnnnnnnnnnnnnnnnnnnnnnnnnnnnnnnnnnnnnnnnnnnnnnnnnnnnnnagagttaanattttacctgtttgctttttctctttctatacacaaaactttcttttcacccgaaccatttgaagtaaataacctgatggccatcaccaaacaaacttctgtgccaggattgtgtttc

SEQ ID NO: 355489 - DNA, 970 bp, Homo Sapiens
ttttaaaaccaccaccctccctgcactatcaccccattccccagaccttcttgcccccgccctcctggtctgtggacttccctctgctctgagcccagggagggggaagaagccagggggtagggtggccctgggaacctggctctgggtccccacttcctctcccagtgccgggctgggtggggtgtcaggtttatttatgtacctcttgcacactcatcaacctatgcaagtcccccaccccggccctccatgtttctgtgcctttgctcatcccctcaatctcccagggcttctccagtccccctcccactagctgcaggaagtgggatggatgggccacctcgtttggaatcagcagggtgtccctctcatgggaccctcccctctccccagcctgtcctgtcttgttcactctccatcagggtgagctgactgtgcctggcactgggaggtggtgagggacaccgtctcacacacacagggaggcaagagctgccccccaccccacctgacagcagagtgtgcaggacgcaggcggccccactctgatgggcaggaccctgaccctctcccgctccagccccctccccaggccctcctccatgatttcaccctccctacccacttctgtccccggccccactggcagaatcagctttgagtaactgtacagtttttctcgctgttggagaagacttatttgttggagtttcacttgtttaatggtctgggcttattttggacaaaaacagaccatcccataacccccaaaccgaaaacaaatgcgcgacaccacgactgaaacggcaacgtattacgcaaaaactgtgagcgataataacgcatagacccggccccgcattaatcccccgattcatcgcccgcgggggggccgcccctccaatgactcccccggagaggggacgccgcttctgtctggccccaaatccgggttgcgccgccaaaa

SEQ ID NO: 355490 - DNA, 924 bp, Homo Sapiens
gctcggtacccggtgtttatcgatgccacagcttttgtttcaggaaagccctgagcagaaacataagctgtggccatgactactgaagtaggctctgtgtctgaagtgaagaaggactctagccagttaggaacagatgcaaccaaggaaaaacctaaagaagtagcagaaaatcagcagaatcagtcttccgatccagaggaggaaaaaggttcccagccacctcctgcagctgaaagccaaagtagtctacgccgccagaagagagagaaggaaacatcggagagcaggggtatttctcggttcataccgccatggcttaagaagcaaaagtcatatacttagtagtggccaaagatggaggagatataaaagagcctacccaagctgttgttgaagaacaggtcttagataaagaggaaccccttccagaagaacagagacaggctaagggtgatgctgaagaaatggctcagaagaaacaagagattaaagttgaagtcaaggaagaaaaaccctcagtgagcaaggaagaaaaaccctcagtgagcaaagtggagatgcagcctactgaattagtaagtaaggagagagaagagaaggtaaaagaaacacaggaagacaaattagaaggaggagcagcaaaaagggagaccaaggaagtgcagaccaatgagctgaaagcagagaaggcatctcaaaaagtcaccaagaagaccaaaactgtccagtgtaaagtgaccctcttagatggcaccgaatacagctgtgacctggagaaacatgccaagggacaagtgttatttgacaaagtgtgtgaacacctcaatctcttggagaaagactactttggacttttgtttcaggaaagccctgagcagaaaaactggttagatcctggctaagaaataaagagacaactga

SEQ ID NO: 355491 - DNA, 1742 bp, Homo Sapiens
gccggggcagccggggcagcccggtcaccccgcccccaggcccacactaagggtgtccgcggcctgccctccaggcggaggagcccggactgcggaaggatggagctggccgccggaagcttctcggaggagcagttctgggaggcctgcgccgagctccagcagcccgctctggccggggccgactggcagctcctagtggagacctcgggcatcagcatctaccggctgctggacaagaagactggactttatgagtataaagtctttggtgttctggaggactgctcaccaactctactggcagacatctatatggactcagattacagaaaacaatgggaccagtatgttaaagaactctatgaacaagaatgcaacggagagactgtggtctactgggaagtgaagtacccttttcccatgtccaacagagactatgtctaccttcggcagcggcgagacctggacatggaagggaggaagatccatgtgatcctggcccggagcacctccatgcctcagcttggcgagaggtctggggtgatccgggtgaagcaatacaagcagagcctggcgattgagagtgacggcaagaaggggagcaaagttttcatgtattacttcgataacccgggtggccaaattccgtcctggctcattaactgggccgccaagaatggagttcctaacttcttgaaagacatggcaagagcctgtcagaactacctcaagaaaacctaagaaagagaactgggaacattgcatccatgggttgatgtctctggaagtgcaaccacccaatgtctctggaagtgccacctggaagtgccacctggaagtgtctctgggaagagcacccaccactgtttcacccttcccctgctgtttctgccttcagaggcctacacactaccacatccttttctaagcatgtttgcccggacatccagactcactcgtcctgctttcccttctcgcttccccccatcctgggctgggctgccttcttctacagttcaatatggggcagactagggaaacctttgcttgcttactattaggaggggaagtcttcagtagggaacacgatcattccattgtgcaattttacggggatgggtgggcggagggacacaacaaaatttaagaatgactatttgggcgggctggctcttttgcagcttgtgatttcttccaacttggggagggctgctggaaatgagattacggtcagagctgactttcatgcccccttcttggcattgacagggcctatgaccatgtacaataaactatttacgaagacgaatatgctagtgttaaacagttgcatgcctatgattcattaagtgaacccataagcaaacaaataaataataaaacttagaacaaatctaacgaacaccgtttggtcacatgtcagtagtgaactcaatacttatcataataaatacaaacaagtatctgttattactatagtatcagacataaaatgcacccggactagttttgcgttgctgtgataataagacgggggaacactcacaactctagaacatacaaaaacatattaatttatcccgcaagtatacgttctgcgctcaaactgtattccccagtaacaaaagataagagagggagccgtttctataaattaaacatacaaaacaaaacacctgtgaaaaaaatgaaaactgggcgtactataatgcgaggcgaaaaacattttatcgaaattg

SEQ ID NO: 355492 - DNA, 631 bp, Homo Sapiens
  misc_feature (94)..(94): n is a, c, g, or t
  misc_feature (107)..(107): n is a, c, g, or t
  misc_feature (109)..(109): n is a, c, g, or t
  misc_feature (273)..(273): n is a, c, g, or t
ggggaagtgaaaactcaatttttcaaccatcctttttcagaaaatcccaaggaaaccaggggttgttggtgggttagcctgaaaatctagagtnccgtggatcagtncnattgtcgtagggtcagttactgagggaatcaggaatctatggcctgcagcttatgcaaatgacagctttggggacataggttagaaggcatgcatacttcttatagggtatgactcatctgctctcccagcagggaattaataatgagacaactactacctttnatatgtctgtatcattcaatgactatattttctgtaacatagcctagagctaggcctaatttcctcaattacataaagttatatctttaaatttaaaaattccattgcacttaaaatatatataccatgaggacttcccaagggaaaagaaaaaagtttttcatggaaatcttttctatgtcttaagtgccaatgatcacaaaaacagatatctgcattcccaagtaggttttctgccttgatgtcagtgccctgccagtgtttggacaatgaaaactcttctcctcaacctagaaatttgaaaaagtttttcccagtagtgagtacttttatgtcccaggatatgctgaaccaatca

SEQ ID NO: 355493 - DNA, 544 bp, Homo Sapiens
  misc_feature (15)..(15): n is a, c, g, or t
aaagcaaagcgtganccccaaatccacacctgggaggaacgttcccctttgcaaggcatgggactggctggccctgtgtctcacgggggctctgagttttgaggtcacactagcctcctgaggcctggctgagagggctgggttgggggtcaggaggccccctgtagccacgaagctcctctggggcattgttaaaggttcaccctcttttttgtgggtattctggaagatctcaagaaactgagcttggaagaagagaggctgagagggtctcccgccgcctgcgttctctgcagctatggccccacagcctccagtgaccatggaggggaaggtgccacccgccttggctgctgaaagggtgatgctcttatgcctgagtcttggctcctgtggtcctgcagagaccctgtgggggccgcccggtcgtcacctgcactcatcttgggttttccttccttttccaccctaagctgaaggtatttttttcctgttttcttcactctaacttggggaagaaggaagatcctttatggaaaaaaaa

SEQ ID NO: 355494 - DNA, 307 bp, Homo Sapiens
  misc_feature (90)..(103): n is a, c, g, or t
gcaatagcccattaggtctcatcccgagttccaagtcttggctgccaaaaagtccctaatagatggattttccaggctgacccagctgtnnnnnnnnnnnnnntcctctggcttctgtgtcctctgaagcgtttgctgccctcaccctctctgaactgaccattgtcctgctgtctcagagggctgcgcttccccacctccagataaagacagtattgataatggcccgagggaagggaatctccttgctgcaggcctcttgccggcacagcctccagcaggcacttggcaagactgcccggctgtg

SEQ ID NO: 355495 - DNA, 640 bp, Homo Sapiens
  misc_feature (628)..(628): n is a, c, g, or t
tttgcctgacaaaactggacatctggatgtccctccagtctacttatatactcacagagagaataagtttaaatattaaagagaaaacacaaagatacttggaataaatgtgcatttaaaaccctgactaaaatatcaacataatgatcataattacaatggtaataaaaataattagtacaataatattatctttatgagcagcatggaaatttcattcctgatctggaagaataaaaggaaagaaaatgtcaggtgaaagagtaagtagcctccaacttaagcagacagaataattttctttaaaatgaaaagaacattttaagctgtctttccccctaaaagatcagatctagaaagggctggaaatgaactgtgcccaggaatctgggggtgctctccagtaaggcgaactgaggctcatttgcagccaagacttggaactcgggatgagacctaatgggctattgctgccatctggctgccaaaaagtccctaatagatggaatttccaggctgacccagctgtggggccggggggggtcctctggcttctgtgtcctctgaagcgtttgctgccctaaccctctctgaactgaccattgtcctgctgtctcagaggggctgngcttcccaacct

SEQ ID NO: 355496 - DNA, 435 bp, Homo Sapiens
  misc_feature (88)..(155): n is a, c, g, or t
  misc_feature (366)..(366): n is a, c, g, or t
  misc_feature (391)..(391): n is a, c, g, or t
catgtggtgttaatgctagagtacagaaaggtcaaaggggaaaaaaagactaaatcctaaaagcgcaaatatgtatatgtgttatccnnnnnnnnnnnnnnnnnnnnnnnnnnnnnnnnnnnnnnnnnnnnnnnnnnnnnnnnnnnnnnnnnnnnaaaatagagtccaccccttaataccatgtactgaaataaatataagacaggtgagagatatacagatttagtttatgacaggtaaaaattttagactgggcagaatattaaaaatagagagtttttctaactcacactaaccctctctaagtcttcaatgatattacactaaagtcatatagattcagtttgccactattttattgagganttttgtatccaatgttcctcaaggntattggtctaaaattctcttttttggttgtgtcttctgcccggg

SEQ ID NO: 355497 - DNA, 945 bp, Homo Sapiens
gcatttgccaaacctccagtgaaccacatatttctatgcacttcattgcatgctaattttatgtaaaaaagccaacaatgaactctagttaatgatatgcaatttaaaatgcatcaaataataatatgaaatgatgaatggatatgtgacaaagcaagcataggtaatgctaattagcatctaggtagtgagtacactataaaattattttaactttttaatgtatttgataattttcataacaagatgttgggtaaaaatacagggtgcaatgtttaccaaatagttttgctgagaatttcattactgattttatgacagtaagatcatcaaattcttctaagtgtccattgagaagtaagtttctcttaaaggcttctgagactattcgtaagtgtgatgtgagcaatcagttctcaaatctactctggtttataactgtcaaagtggtatttcgatcctttcacctttacaaaatacaatacatatattttgatgatatattctgagcaaatctgttggccataaagataacataagagttaagatgagaaaacatccctaagagaaaaatcaaaccataccaaattttatttaccctaacttccaagactaaaaaagaatctggaactgtaatagaaaagaagtgaggcttggtcataaataagtgagtggtctactgtgttctgagtggaaaggcacccagtcatctctcatctctcccccaagacagaagcatttggacaccctaaagacatggtattcagcttgtgaagacttctaaggtgcctcctggagattcactgggaactggctggagttcaatagcccttttgtcagaaagttttctacatgcctaacttaaaatccctaataacactgctcctgataagtagcagttgataactactttcagttaagaattcctataaaattacatatagg

SEQ ID NO: 355498 - DNA, 886 bp, Homo Sapiens
  misc_feature (33)..(33): n is a, c, g, or t
  misc_feature (50)..(50): n is a, c, g, or t
cctaagcccatatcttgatttaaaacgtatccntccacacatagagcaanaagttattcctactcgattattgaaagcatttcccaaaattaccccattttaccaatacctaccttacatggttcttgtgaagagtaaagataacaatgtaaaacaaagcacacagcatcctctctggcaacatagtaaacatacaggatatgttagtagaattcaatataaaatactcatcttcatggtggctgacttattgatggtgttcaatagctattagttgaatgagttaatgaatcagaaaatgtaggacaggattcagtggctgtagacacaacataggacggacagctattaaaggagccaagtgcttatttctgaagttcagaattgcatggaggcaagggacaactcatacagctgtcatttaaacaaacacagataacaagttggcaaagatgtggagaaattggaacccttgtgcaccattggtaagtatgtaaacagatgcaaccactgtggaaagcagcacagaagtttctcaaaaaattaaaaataattctatgtttaattagaattaccatatgaatgacccagtcattcccacttctgggtatttattcaaaaaaactgaaatcaggatcttaaagagatattttcactccctcgttcgttgtagcattactcataatagccaagatgtggaaataatctaaacgtctgtcagtagatgaaagggtttttaaaaatgcagcatatacatataaggaaatattattcagcctgaaaaaagaaggaaatcctgccataagcaacaacatggctaaacttgggggtcgttatgctcaatgaaataagccagtcacagaaggacaaatactgcgcgtttcca

SEQ ID NO: 355499 - DNA, 1890 bp, Homo Sapiens
  misc_feature (1398)..(1448): n is a, c, g, or t
ggtccggaattctcgggatagcaaatgccttgaattctactaattttgatgagaagccagtcatcattgccagctgtctacgcaaggagtatgcagggaagaggaaaggctgtttttccaagaggaagaataagatagccacgagaaatgtctccttctgtgttagaaaaggtgaagttttaggattattaggacacaatggagctggtaaaagcacatccattaaggtgataactggagacacaaaaccaactgctggacaagtaggtgctactgaaagggtagcggtggaggggatgccctggagttcctggggtactgccctcaggagaacgcgctgtggcccaacctgacagtgaggcagcacctggaggtgtacgccgccgtgaaagggctgaggaaaggggatgctgaggttgccatcacacggttagtggatgcgctcaagctgcaggaccagctgaagtctccggtgaagaccttgtcagagggaataaagagaaagctgtgctttgtcctgagcatactggggaacccgtcagtggtgcttctggatgagccgtcgaccgggatggaccccgaggggcagcagcaaatgtggcaggccatccgggccacctttagaaacacggaaaggggtgccctcctaaccacccactacatggcagaggctgaggccgtgtgtgaccgagtggccatcatggtatctgggaggttgagatgtatcggttccatccaacacctgaaaagcaaatttggcaaagattacctgctggagatgaaggtgaagaacctggcacaagtggagcccctccatgcagagatcctgaggcttttcccccaggctgctcggcaggaaaggtactcctctctgatggtttataagttgccagtggaagatgtgcaacctttagcccaagctttcttcaaattagagaaggttaaacagagctttgacctagaggagtacagcctctcacagtctaccctggagcaggttttcctggagctctccaaggagcaggagctgggtgattttgaggaggattttgatccctcagtgaagtggaagctcctcccccaggaagagccttaaaaccccaaattctgtgttcctgtttaaacccgtggttttttttaaatacatttatttttatagcagcaatgttctatttttagaaactatattataagtacagaaatggttctccgtgtggtgggaggaggaggttcgggtgctgggtaagtgccatgtcagtgtggacagaggcatttgactaagccaacctcctctcacagcctctgtatctctgcaggccatactggttccattgttctgtataatactgaataaataaatttacttttacatgatcgtataagtttctagataagatnnnnnnnnnnnnnnnnnnnnnnnnnnnnnnnnnnnnnnnnnnnnnnnnnnnctaacctagactgagaaattcatgtttacttttctaggtgtatgatactttgtaaagttgatactttcctaagaatttaacatgtcatatttttgaaatagatttaagtgtgcttcttattgctaaaaatactaaatgtcatgggtcatagtatctgatatcaatatcgttgataacatatccacaggtaacaccatgatgtaggcataaatggaaaacaaaaaccctactatttcaaatatattgtacttttttatttctgtaagccaactgtgtgccattttcactggacttttaaatctagactttagtgatgtctacattgtaaatgatcttttgtggatatttgtcacttggtttcagaaagttcacaaatgtagcaacagctcacatgactgagtaggtagaaaatgtgaaataaatctcatatatatagttttga

SEQ ID NO: 355500 - DNA, 1043 bp, Homo Sapiens
  misc_feature (506)..(508): n is a, c, g, or t
  misc_feature (511)..(511): n is a, c, g, or t
  misc_feature (513)..(514): n is a, c, g, or t
  misc_feature (517)..(517): n is a, c, g, or t
  misc_feature (522)..(522): n is a, c, g, or t
  misc_feature (524)..(525): n is a, c, g, or t
  misc_feature (874)..(874): n is a, c, g, or t
  misc_feature (896)..(897): n is a, c, g, or t
  misc_feature (943)..(944): n is a, c, g, or t
  misc_feature (963)..(963): n is a, c, g, or t
  misc_feature (967)..(967): n is a, c, g, or t
  misc_feature (974)..(974): n is a, c, g, or t
  misc_feature (977)..(977): n is a, c, g, or t
  misc_feature (992)..(993): n is a, c, g, or t
  misc_feature (995)..(995): n is a, c, g, or t
  misc_feature (1002)..(1002): n is a, c, g, or t
  misc_feature (1004)..(1004): n is a, c, g, or t
  misc_feature (1006)..(1006): n is a, c, g, or t
  misc_feature (1012)..(1012): n is a, c, g, or t
  misc_feature (1015)..(1015): n is a, c, g, or t
  misc_feature (1018)..(1019): n is a, c, g, or t
  misc_feature (1021)..(1021): n is a, c, g, or t
  misc_feature (1023)..(1023): n is a, c, g, or t
  misc_feature (1026)..(1026): n is a, c, g, or t
  misc_feature (1030)..(1030): n is a, c, g, or t
  misc_feature (1032)..(1032): n is a, c, g, or t
atatgtggcaacggctttggcgacagttccgcccgcatcaagcaccagcggacacaccggggggagcagcccccccgaccagtggtgccccgacggcagccatctcgggcagccacggcagcgacccagggaccgaagcccaggacaagccatatatctgcactgattgcggcaagaggtttgtgctcagctgcagcctcctgagtcaccagcgtagtcacttggggcccaagccctttggctgtgatgtgtgtggaaaggagtttgcccggggatccgacctggtgaagcacctgcgggtacacacgggtgagaagccctacctctgcccagagtgcggcaaaggtttcgcggacagctccgcccgagtcaaacacctccgcacccacagtggcgagaggccccatgcctgcccggaatgcgaccgtaccttcagcctcagctccacccttcttcgccaccgcctcactcacatggagccccaggacttcagcttcccaggctannnccngnncgntctgngnnccagcccacccccacctcctctgggcaccagccccccgctgacacctcgaagtccctcacactcgggtgagccttttggcctgcctggcttggagccagagcctgggggcccacaggctggggagccacccccaccactggcgggcgacaagccccacaagtgccctgagtgtggcaagggcttccgccgaagctctgacctggtgaaacaccatcgtgtgcacacagggggagaaaccctacctctgtcctgaatgcggcaagggttttgctgacagctcagcccgagtcaagcacctccgcacccaccgtggtgaacgggcccggccaccaccaccatccactctgntgcgggcacataacccaccttnnccagtacccatggcccctcgaccccgagttcgggcccagccttctnnacccagccagccccacgtntgtngcttctntgngaaagagttccccgnnantcagatntngncaaaanagngtnnananagngggnanaagcaaaaagt

SEQ ID NO: 355501 - DNA, 546 bp, Homo Sapiens
taaggcatgaggatattactaagaggttgcccacattccttatatggtttctccacactatgacttcttagatgtcgaataagatatgtggaccgagtaaaggctttcccacattcctgacattcaaagggccgttcaccagtgtgagtactcatgtgtactgtaaggcctgatgagatactgaaggctgcccacacttttgacatttatatggcctctcccctgtatgtattcttttatgttgactaaggtgcgaggagtatctaaaggctttcccacattcctcacattcaaaaggcctttctgcactgtgacttctcaaatgtcgaataagaaatgaggatcgaatgaaggctttcccacactgttgacagtcatagggttttacaccaggatgagtctgcatgtgacttttaaaggaagaggaattaataaaggcttttccacattccttacattgataaggcttctcaccagtgtgagttctcatatgtacagtaagatgtgaagagttagcaaaagctttcccacattccttacattacc

SEQ ID NO: 355502 - DNA, 409 bp, Homo Sapiens
gtcgaaaaagcttcagcagaggatatcacttaattaggcatcagaggacccactcagaaaagacctcctagcgaggtccccatgtgaggagatctgctttcagccctcacctaagggaggtgaggaagaggaaaagccctcttgtcagcctgggaagaccttttcgagggagtctccctgacctgctcagatctgacattacctcttcctgcaactaaacacgagactgggcagaacctctcagccttcctctacgccttgaggggatgtttcatccaaagtacaacctgaattgaggcttctccttcactggagtgcacctgcctctacctcatgggtataaagtaggagaactaagagacttaagaggtcgtggttcctatatcgtccaaaaaataggctgttacat

SEQ ID NO: 355503 - DNA, 1553 bp, Homo Sapiens
  misc_feature (43)..(53): n is a, c, g, or t
  misc_feature (211)..(221): n is a, c, g, or t
  misc_feature (350)..(432): n is a, c, g, or t
  misc_feature (454)..(489): n is a, c, g, or t
  misc_feature (640)..(690): n is a, c, g, or t
  misc_feature (717)..(750): n is a, c, g, or t
tagaggtcagacggatggggtgaggggcgggcgaaaaaatccnnnnnnnnnnnaataaaggtcggtggagacttaagggggggcggggcgggtgataggggcgcgcgacagaaacgaacaagggggggcacaaagggataaataaccattcttatgagggcggggggcgtgatacgctggcgtggtcggcaacaaatagagagagtgaatnnnnnnnnnnnaaatataatcgtgaggggggaatgggcgaaaaaatcagaagcaggcgggggcgcgcgtgatccaaaccacaaaattatagatgatgcgacgcagcggggaccgggcataatgtctgacaggaaatattnnnnnnnnnnnnnnnnnnnnnnnnnnnnnnnnnnnnnnnnnnnnnnnnnnnnnnnnnnnnnnnnnnnnnnnnnnnnnnnnnnntataaacaccgggtgtggatannnnnnnnnnnnnnnnnnnnnnnnnnnnnnnnnnnnaataagacatagaggcgggggtgtgtaaaaattttggtgattgaggagagcgtgacagtggcgcgtgtgggcgtccgcgcgcgccgaaacacgcggggagctaaaaatataataagaggggagtacataatggtggcgagatagaggcacnnnnnnnnnnnnnnnnnnnnnnnnnnnnnnnnnnnnnnnnnnnnnnnnnnnatgtaaccaaataaaagcgggacgaannnnnnnnnnnnnnnnnnnnnnnnnnnnnnnnnnaatacaaacatcgcgagaccagcgcattggcggagtgcggggcaaagggggaggcccacccaacagtcccgctgccaggccaggtggtcccagccacgcctgggccggcatccggtgcccgctggaggcggtcccggggggtaccaggcccgccgggtgcgggcgggagcagacgcttcgggggcgggcgtgtgggaccagcttgtgccacatgagattctcgatgaagccgaaggtcttgccgcaggcgtcgcagccgtatggcttctctgccatgtggacctccttgtgactcatgacgtgaaagagatccgggaagtgctcgccgcagtccgagcaggcgtagctcagcccatcggtgggccctgcaggcgtgcccgaggccccgggcccacaggcccccggtgtgccttgggtggaggggaggccggctgccccggccagggcgcagggcaactggagccggtgcacctggcggtggcgggtgaggctctgcgggtagccgaagaccttgccgcagagctcgcacttgtagggccgctcgcgcgtgtgcaccacgtgatgcttgctcaagtggaaggattcgcggaagcgcttcccacacacggggcactggtggggcttctcgcccgtgtggatgcgaccatggcgcatcagggtctcgcggcgcccgaagccgcgcccgcagatgccgcagcagaaatctttcctgggacgctgcctcgtgcggaattcgccacccaggcctcgctacttagggggtgttcgggaacgttggataaaacaaggggcagaggagggaa

SEQ ID NO: 355504 - DNA, 560 bp, Homo Sapiens
  misc_feature (505)..(505): n is a, c, g, or t
gccgctgccgccgccgctggggacaggttggagctgctctggggctcggcgctgggggacaccagccccgggggcgtggacgactcatagccggagctggcggccggggaggattcagagccctgcggggaggactcatggaccttcatgtgcttccgcagcgagctggggtgcgtgtaggacttgtcgcacatcttgcagagatagggcttatcggaggtgtggacgtgcatgtgcttcttcctgtcgctgctgttggcgaagcgccggtcgcagccctcaaactcacactggaacggcttctcccctgtgtgggtccttttgtggatcttgaggttctcggagcgcgcgaagactttgccacagcccgggaaggggcaggggaaagggttctcgcctgtgtgcacgcggatgtggttgaccagtttgtatttggccttgaagggcttgccctcgcgcggacactcctcccagagcaagacgtgggtgttctgctccgggccgncgacctgctccaccgagaccggggtgaccaatttgtgccatgtggtgaaaagttt

SEQ ID NO: 355505 - DNA, 1366 bp, Homo Sapiens
agcgggctgaggatgagtccatcccttcttcccaggaggagggaaaaggggtacaaatggggctcccactggcacaggaaccaggagcagtttgttgcctgcctgccttcccttctctccttgtgaattgcctgggtgccccaccgtgggcacaagaatggaagtcgtggcccagagcttccctcgcgaaaaatgagcaaggcgggtgccgggagggggcctttacaggaggctcaaagtcagaaaatgagatacaagacatccttggtgatgaggaaacgattacggctttaccgaaacactcttaaagagtcaagtagcagctctggacaccatggcccccagctcaccgccgcctccagcccctcggtgttcccgggcctccacgaggagcctccccaggcctcccccagccgtcctttgaatggactcctgcgtctggggctccctggagacatgtacgcgcggccggagcccttcccgccaggcctgcggcccgcagcgacgccctggcagctgccgcagccctgcatggctacgggggcatgaacctgacggtgaacctcgctgcgccccacggtcctggcgctttcttccgctacatgcgccagcccatcaaacaggagctcatctgcaagtggctggcggccgacggcaccgcgaccccgagcctctgctccaaaactttcagcaccatgcacgagctggtcacgcacgtcaccgtggagcacgtcggcggcccggaacagaccaaccacatctgcttctgggaggagtgtccgcgccagggaaagcccttcaaagccaaatacaaactggtaaaccacatccgcgtgcacacgggcgagaagccctttccctgccccttccctggctgtggcaaggtcttcgcgcgctccgagaatttaaaaatacacaaaagaactcacacaggggagaagcccttcaaatgcgagttcgagggctgtgaccggcgcttcgctaacagcagcgaccgcaagaagcacatgcacgtgcacacgagcgacaagccctatctttgcaagatgtgcgacaagtcctacacgcatcccagttcgctgcgcaaacacatgaaggtccacgaatcctcctcgcagggctcgcagccttcgccggccgccagctctggctacgaatcctccacgcctcccaccatcgtgtctccctccacagacaacccgaccacaagctccttatcgccctcctcctccgcagtccaccacacagccggccacagtgcgctctcttccaattttaacgaatggtacgtttaaaatcagaaacaaaacatcgaacaaaaccctatttaagagactgagcacacgcgacggggatactctagagt

SEQ ID NO: 355506 - DNA, 1166 bp, Homo Sapiens
  misc_feature (1059)..(1093): n is a, c, g, or t
  misc_feature (1129)..(1129): n is a, c, g, or t
gtagtgtgtcctgtgcgctggttatagtaatcttgttaacagctgatatatcgttttccgattacaataatggtcgttcaatactcatacctgcccctttctgcggttcactacacacgtttccaaatcggggtcaactaccataatattgctatatggtaacccgcaggcatcatatactctttagcgcccatagatctagagaaacccccttcatccgattcatactcgtggagtggattgtcctctgtagcctgtgacccatgcaacaccgcaggtctattgggaatcagcttggctacaccttactttctatgcctgtcgtgcacttacccaggccacgcgggacagtggctctcaagcctgttcctcttcagcctgccacatgccccttggcaggccagcagacccagtttgtgacagtagtcccagcccggtctgtcgacctttactgcacagctgccagcgccacagcccctggcctcatccgcaggccacagcacagccagtgggcaaggcgaaaaaaagccttatgagtgcactctctgcaacaagactttcaccgccaaacagaactacgtcaagcacatgttcgtacacacaggtgagaagccccaccaatgcagcatctgttggcgctccttctccttaaaggattaccttatcaagcacatggtgacacacacaggagtgagggcataccagtgtagtatctgcaacaagcgcttcacccagaagagctccctcaacgtgcacatgcgcctccaccggggagagaagtcctacgagtgctacatctgcaaaaagaagttctctcacaagaccctcctggagcgacacgtggccctgcacagtgccagcaatgggaccccccctgcaggcacacccccaggtgcccgcgctggccccccaggcgtggtggcctgcacggaggggaccacgttaccgtctgcgtccgtctgcccagcaaacgttgaccaaatcgagcagttcaacgaccacatgaggatgcatgtgtctgacggataagtagtatctttctctccttcttatgaacannnnnnnnnnnnnnnnnnnnnnnnnnnnnnnnnnngctatggactagaattaggaaatgcttggttcaatntacttcctggttggtttgttcgttcatttgtctcatg

SEQ ID NO: 355507 - DNA, 1631 bp, Homo Sapiens
gcggccgcactcggggcacgcgaagggcttctcgcccgtgtggatgcgctggtgcaccaccaggtcggagcgctgcccgaaacccttgccgcaagtggcgcacgcatgtggccgctcgccctgatggctgcgccgatggcgcagcagcgtggaactctcgctgaagcagcgtccacagtcgccacatgcgtacggcttctcgcccgtgtgtgtgcgctggtggcgcaccagcgtggcgctctccaggaagcccttgccgcactccgggcacttgaagggtttctcccccgagtgcgtctgcaggtgtcgcgtcagcgtagagctcttgccaaagcacttgccgcacacgccacactggtgggcgtctgagacacggggtcgcgtggggctccgggacacgtggatgcgcgcgtgactccgcagcccggcgccgcttcggaaggctcgcgggcactgcgcgcagcggtggggtggggcagcagggtcagaggttgtccccaaggggtgcgcccgcgcctggtggaagagcagcgcgctctgccggaaggtgcgggcgcacagcgggcagcggcggggccgctctggcagatgctggcggcgccggtgtagcagcagcgccgggaggtgcgggaagcgccggccgcaagtgcggcaggggcaagtgcggcatcgctgccggtgtgcgcccaagtgtaggtcaagacggccgctgtggcggaagctttgtccgcactcactgcagatgtagagggtctggccagcatgcgtgcgcctgtgcgctcggaggtcagcagcccgtgcacagcgctcaccgcattctaggcaacggaagcggccgtcaccgccgtgagctcgttcatgtcgcagcagcactgagctgtagcagaagctcttgccacattcgctgcacgagtaaggcttccccgctgccactgccccagatgtggcaaacatggtgaggacgggttcacagggaagcgtgccactcacactctggggtccacctcctgacgctgcagctaagttttacttctcttaaggcctggaaagggcactgtaacagagaggaaagggggaggccgcaaaaactggtctgatttcagggttcttctctaaggggcagacattgtggctgttccagggtgagctgtggccaggttcaccctgcaccgtgagcctgcaagtctgggctctggagcttctgctgccccaccacgctgggcaggagtagccgcatgggatgtcctcctcttgtgcctctggagtaagatgtgcatttccttccattacggatgcggagtaggacactcgctagggtacaggtttggcgcttgagtcccaaggcacgctcttcaagtctctcttctgtacctcaccccatgctggagctcatcccacaggcaaaagggtcacgcttgaagtggaaaccggtcgccgactgcctcctcagacaccgcgcggttcccactcagccggctgccgacccccgcctcccggactgcgggactggggcgggggagcgaggaaggggctaacggcgcgcgcggcctccgagtggggggagcggggaggcgcccgagcgtccggcccctcgggatggggaggtcacgctcctgtccctctcgcccgcg

SEQ ID NO: 355508 - DNA, 447 bp, Homo Sapiens
gaggggaaggcctgggaggagcaggccgcgcggacgtgtccggccaatcgctcgccccgcagtatccccgcgtcactcgcagcccgggcggcgctcccgaccgccgcagacaccagtcgcccgaggcagatgggagaagactagccacagctgaggactgctgccccgagccacccttgccctcccctgcccttcagtcccctcaccggtcgccgactgcctcctcagacaccgcgcggttcccactcagccggctgccgacccccgcctcccggactgcgggactggggcgggggagcgaggaaggggctaacggcgcgcgcggcctccgagtggggggagcggggaggcgcccgagcgtccggcccctcgggatggggaggtcacgctcctgtccctctcgcccgcgtcggctagtggtcagtctggcgcgggcagtgtcaccgg

SEQ ID NO: 355509 - DNA, 1233 bp, Homo Sapiens
tttcccatctaggctggtaccggtccggaattttcgggatgcttcccggctccagctggggccggagaggctgagtggttggtacgctgctcgctggcctcccagtcttcccagcaaccggtgacactgcccgcgccagactgaccactagccgacgcgggcgagagggacaggagcgtgacctccccatcccgaggggccggacgctcgggcgcctccccgctccccccactcggaggccgcgcgcgccgttagccccttcctcgctcccccgccccagtcccgcagtccgggaggcgggggtcggcagccggctgagtgggaaccgcgcggtgtctgaggaggcagtcggcgaccggtttccacttcaagcgtgacccttttgcctgtgggatgagctccagcatggggtgaggtacagaagagagacttgaagagcgtgccttgggactcaagcgccaaacctgtaccctagcgagtgtcctactccgcatccgtaatggaaggaaatgcacatcttactccagaggcacaagaggaggacatcccatgcggctactcctgcccagcgtggtggggcagcagaagctccagagcccagacttgcaggctcacggtgcagggtgaacctggccacagctcaccctggaacagccacaatgtctgccccttagagaagaaccctgaaatcagaccagtttttgcggcctccccctttcctctctgttacagtgccctttccaggccttaagagaagtaaaacttagctgcagcgtcaggaggtggaccccagagtgtgagtggcacgcttccctgtgaacccgtcctcaccatgtttgccacatctggggcagtggcagcggggaagccttactcgtgcagcgaatgtggcaagagcttctgctacagctcagtgctgctgcgacatgaacgagctcacgggggtgacggccgcttccgttgcctagaatgcggtgagcgctgtgcacgggctgctgacctccgagcgcacaagcgcacgcatgctgggccagaccctctacatctgcagtggagtgcgggacaaagcttccgccacagcgggccgtcttgaacctacactttgggccgcacacccggaagcgatgcccgcacttggcccctgccggcacatgccggcggggggttttccggaacctcccggggcttgctgctacaccgggggccggccaaaattttgccaaacggccgccc

SEQ ID NO: 355510 - DNA, 918 bp, Homo Sapiens
gtaccatccccgagattccctttccccagcagcccaaaccatgggcatcccggaaaaaggaaggggtctcatgacccacttggaaagctcaggagagaaccaaacaagtcgcctgggagcacaaacaggaatggactcaaaagggagcctcgccatttagccctggaacccatcaacactgctctgagggaaaggaaccccaagcctgttcgctggccttagatggggatccttgtctggggaatgcattaggaaatgaccaaggcaggatggggcagtgagaagtcgcctgcgtttagactataccacgccttcctccgaaacccagctttcctgagtcactgacatgaacccagccagacttgggctggaagaacaaagcgggtaatgtgatgaagcacacaacaggtccagcagcaacagcctaggcaaagggctcagaccctgaagttactgaaggggctggggcctggccaagggaaggtatttgagaaaccccaaaatattgttccttggcttttgacagcaccttgataaacacactaccccatgccagtatacagccccaaagttgagaaagcaactcaggacccagtaaaggggtaaaaacgggagcatagataattcacaaaaaacattattaaaagttggtggcattatccaagaacacttttcccattttcaggaaaggctggggagaatgcaaggagcatccattctataataattgtcaggatatccaagttgtttgtgaaggtttgaatatgatgaatctgatcaagaaaaacatattgtttatgaacattctgcagcatttcctcactgtctcagccacaggaatctgagaatctggagtagcagagaaattcagggggcagactgctgaatccttgacggcggctcagtgtctggcccgct

SEQ ID NO: 355511 - DNA, 485 bp, Homo Sapiens
actggtgagaagccctatgagtgtaatcagtgtggcaaagccttcagggacagctcctgtctgaccaagcaccagagaattcacactaaggagaccccatatcagtgtccagaatgtgggaagtccttcaagcagaactctcacctggcagtacatcagagactccatagcagggagggtcccagccggtgtcctcagtgtggaaaaatgttccaaaagagctcatcccttgttcgacatcaaagagcacacctgggagagcaacccatggaaacataatggttgggggccacatgagtcttccagttcactctcactcctgtgtttaggaggcgtgtcttagatctgactcctctctggtcagtagaaaagaatcctttaagctatccagtgaattgatgaatgtgagacattgctgagccacactgttaagtctgctcattggggaactccagagacaacttaggatgaggctagtggggctg

SEQ ID NO: 355512 - DNA, 507 bp, Homo Sapiens
gaggcaggcctggggagcggggacccgtcgccgccagggtgtggctgacgcggaacacttctccttgtgggccttgagcatgttggagaagcggaagcataggccacacacgtcgcacgggtacggcttctcgcccgtgtgcgtgcgccggtgccgcttcatgttgggccggctggtgaagctcttgccacagatctcgcagatgtacggcttctctcctgtgtgggtcttcatgtgctcatcgaagtactgcttcatgttgaagtccttgccgcaccattggcacatgaactgcttgtggccaatgtggatgctcatgtgtgaccgcagctggtacttgtactggaagcgctcattgcagttctcacatctgaacggcttctcccctgagtgctgcagtgagtgcaccttgagggacatgctgcgcttgaaggactttccgcagtctcgcaggtgaaggcatgtcttggtgtgggcaccatgtgcttacgcacgtgacacacgtga

SEQ ID NO: 355513 - DNA, 1112 bp, Homo Sapiens
  misc_feature (950)..(950): n is a, c, g, or t
  misc_feature (953)..(955): n is a, c, g, or t
  misc_feature (961)..(961): n is a, c, g, or t
  misc_feature (963)..(965): n is a, c, g, or t
  misc_feature (967)..(967): n is a, c, g, or t
  misc_feature (995)..(995): n is a, c, g, or t
attctcgggatccacctgcagggagtgtgggaagaccttttataggaattctcagcttatttttcaccaaagaactcacaccggagagacatactttcagtgcaccatctgcaaaaaagcctttctgcggagttcagactttgtgaagcatcagagaactcacacgggagagaagccctgtaaatgtgattactgtgggaaaggcttcagtgacttctcaggattgcgcaaccacgagaaaatccacacaggagagaaaccctataaatgtcctatctgtgagaaaagtttcattcagagatcaaactttaatagacatcagagggttcacactggagagaaaccttataaatgttcgcactgtgggaaaagtttcagctggagctcgagccttgacaaacatcaaagatcccacttaggaaagaagccctttcaatagccagtaaccaaactctctttccccatttctatctcccagcccagtcacaaaaatactcagctccatcaagaggaattgtgtctaagaggatacccctgttaatctccttttttcttggattggagaggagagaatctggacatggctttggacttggaggatatcttggattggattgcacaatggcttaaattcttgattctgcctcaggagaaagaatagtcttcatgtttccactcatccttcctttggacccatcggggaaaaagtctaaattggagatccagttttagaagtgctttctgggaagcatttaatgggattagctgtagtcactgcttatgggaagaacctcagatcagccccttaaaatgagttctagagcaggtcttctgttccagaaggggagaagcatagagggcctgtgagctcacgtgtgttctttgtcataggggtgaaaaactaacttcaagtgtcccttgtttgaaataaacttagcagaggtcaaaanaannnaaaaanannnanggggcggggccgctctagaatatccctncgagggggcccaagctttacgcgtaccccagctttccttgtacaaagggggccccttataggggagccgcaattttaaacttagggccctgggcccggcgtttttaaacacccccgg

SEQ ID NO: 355514 - DNA, 539 bp, Homo Sapiens
aggtgtctgtgcaggtggtcggagcggacgaaggtcttgcagcagctgtcgcactggtaggggcgcaggcccgtgtgcacgcgcatgtggttcttcaggtcgtagttgtgggcaaaggcggcgccgcactgctggcacaggtacggcttctcgcccgtgtgcttccgcatgtgcaccttcagcttgtcctgcctggtgaagcggaccttgcagatgttgcactcgtagggcttctcgcccgtgtgggtgcggatgtgtcgcggcagcttgccggcgccctggatgaccttcctcgcagatggggcacttctggaaggccttggctcggatcttcttctccaccttctgcgaccaggccgggtagacgtcgccgtcgtgggcgccgctgaagtacttcaggtagtagtccatgacgcccttgtcgtcggcccgcgaatcctcgtcgcttgtcccccccgcgcgccacgcccggcccaccgatgacatcatctgctgcagagcgttgtggccggcaggccgtccacgtcgggggccgtccc

SEQ ID NO: 355515 - DNA, 1043 bp, Homo Sapiens
  misc_feature (758)..(758): n is a, c, g, or t
gctggaccggtccggaattcccgggatgtccggtttcacttctccgaaccctgaggcagtgtgtgaagctgggacgccagccatgttccagaccgcttggcgccaggggatgaggccagaactgagaaggaaggattaactccaaaggatcatgtgtccaaagaaacagagtccttcagactgatggtggggggcctgccagggaatgtttcccagcaccttgactttgggagcagcctagagcagccacaaggtcattggataattaagacaaagtcaaagaggagacatttcacagatacctcagccaggcaccatgaggcctatgaggtcaagaatggagagaagtttgagaaattaggaaaaaatattagcgtcagcacacaactcactacaaatcagacaaatcctagtggtcagatatcttatgaatgtggacaatgtggcagatatttcattcaaatggcagacttccaccgacatgagaaatgtcacactggtgaaaagtcttttgaatgcaaagaatgtggaaaatacttcagatataactcattacttattcggcatcagataattcacactggaaagaaaccatttaaatgtaaagaatgtggaaaaggtttaagttcagacacagccttgattcagcatcagagaatccacactggagaaaagccctatgaatgtaaggagtgcggcaaggccattcagtagcagctctgtcttcctccagcaccagaggttccacactggggagnaagctctatgaatgtaacgaatgttggaaaactttcagttgcagatcaagtttcactcaccatcagcgaatgcacactggggaagaaaccttatgaatggaaagagtgtggaaaaacgattaagctccaacacagccttgactcagcatcagcggaattccccctgggggagaagcccttttgaaaggtaagggaatgtggggaaggcaattccaatcggaaaataacccctgattcaggaaccagcggagtttcacaccgggccgagaaacccttatggagggg

SEQ ID NO: 355516 - DNA, 650 bp, Homo Sapiens
ggccctatgtgtgtcaagactgtgggaaaggatttgttcagagctcttccctcacacaggcatcagagagttcattctggagagagaccatttgaatgtcaggagtgtgggaggaccttcaatgatcgctcagccatctcccagcacctgaggactcacactggcgctaagccctacaagtgtcaggactgtggaaaagccttccgccagagctcccacctcatcagacatcagaggactcacaccggggagcgcccatatgcatgcaacaaatgtggaaaggccttcacccagagctcacaccttattgggcaccagagaacccacaataggacaaagcgaaagaagaaacagcctacctcatagctctcaagccagttgaagaaaccttgccttttcagcttgaccctgcaatataacatgcacaggcctgcttgtgaatcaggactgaatgtgaaagggaagtattgagtgaggacattcccaaaaccaaaggacaactgaggagactgcccagcacataatgaataaataagaaaatgagtgaggagttattaacatcatttggaaaaaagatttcccattcacttgatattgtttgttcactcatttagtcattaaaagtgagattaataaaatctgaaaatgtt

SEQ ID NO: 355517 - DNA, 627 bp, Homo Sapiens
ctgctcaatggggtgataccccaggaccagtccattgtccgaacctctcttgctgtgctggggaagggttgtctggctgcctccttcaactgcatcttcctgtatactggggaactgtatcccacaatgatccggcagacaggcatgggaatgggcagcaccatggcccgagtgggcagcatcgtgagcccactggtgagcatgactgccgagctctacccctccatgcctctcttcatctacggtgctgttcctgtggccgccagcgctgtcactgtcctcctgccagagaccctgggccagccactgccagacacggtgcaggacctggagagcaggaaagggaaacagacgcgacagcaacaagagcaccagaagtatatggtcccactgcaggcctcagcacaagagaagaatggactctgaggactgagaaggggccttacagaaccctaaagggagggaaggtcctacaggtctccggccacccacacaaggaggaggaagaggaaatggtgacccaagtgtgggggttgtggttcaggaaagcatcttcccaggggtccacctccctttataaaccccaccagaaccacatcattaaaaggtttgactgcgcaaaaaaaa

SEQ ID NO: 355518 - DNA, 1680 bp, Homo Sapiens
  misc_feature (1046)..(1056): n is a, c, g, or t
  misc_feature (1227)..(1227): n is a, c, g, or t
  misc_feature (1241)..(1241): n is a, c, g, or t
  misc_feature (1285)..(1285): n is a, c, g, or t
  misc_feature (1519)..(1519): n is a, c, g, or t
agcggctttaggtctgagaatgacttgtctttgtcaaggtatactattgttagaaacgcattaccaaatgcatctcttctgtcggatcagcgtattcctagattaggaattcaaattaatgaaaattcacatatgaaaggaaaatccattgctatttctggagaggacctcagtcctgggcttttccctggcattgctacctgggtgggtgctcaccactcaggtgctggtgttggaaggcaggaggaggaagctgaaatcctgccgattaaggctaattaacagggtttaggtgcctaattatcatgactcagcccgggacttatggttagccgtgcaggccaggtgagtctcttatggacttcctctcagactgctctttctcattttgtcctgatgagatattgacagtcatgtccacccgcttcctcatccatttcccgtcttgggccctggaagtacgggggcctctgtaggctgcctagggagccctggctttgctcttcgtgttgggctcactccatgatcaggagccggtgggactggtccttcctgattcttactgtctgtggttccccatcccctacggggagcctgcctttggcccttgacctgaatccagaaaacacctttgcagccccactgcatattgagagctgaacctcttcaaacttcctctttactatacaattgaaaacaaacccttcccttccacccacaccatcatccctaccctctcccggatctgactctgactctcctctaaccagtaaaccatcccacctcacatccctcctcgccatcctccgcaccacaacttcaacaaaccgacacaccgcgcacatattcctacattctttctcccttccactctctttcaatcagcagtcacattcatcaactcacaccgcccgtactccctcccatacccacaggctaccctgacccccgtgccaaatctcctcacgtaatctctcatatcataataacttgcgctcctccacccatcctcctctatatcactccactatcctctatactcactnnnnnnnnnnnaccctctctatacctcccccccactccctctatcacatacagacaccatgcccaatcctcctattcacacatccgaacatctaacaatcaatagaccatatccatccgaccaccccacaccatatgcatcccgaagtaccatccaagacctcccgtcgcactgcaccgtanactatcgccccacnccactgcatctccccgaacacatactagatgacggaacaaaacngtgctatacctatttaaaatctatagcttatgcgaatcaataacacattgaacaacaaatacattcgcgagtcaatcttctacactcaccttatccttcccctacacacgccccatgccatccactgcatccgcccccaaaccttcaactacatacatagtcctatatcgctcctgtacttgcggaccaaaactgcatctacctctttattaatgtcataacataatacaccanatcccctgcacaagagaccgccaaacatgtattactatccacgacagactaacccgagcccgcgaaacccagtaaatgaatgactaggtctgttaatactcatctaacacatccagacgatggaatagttagcgcctgacattcactcatctcgcactacg

SEQ ID NO: 355519 - DNA, 779 bp, Homo Sapiens
  misc_feature (722)..(722): n is a, c, g, or t
gctcgtggtgacctcctcccgtgacacgactttccgcctctgggatttcagggacccctccatccactcggtgaatgttatccaggcacacactggactctgtgacttctgaccgtgttcaccgtgggagacaacgtggtatcaggcagcgatgaccgcacaggtgaaagtctgggacttgaaaaatatgagatccccctattgcaactattcgcacggactgctgccagttaacaggatcaatgctatgtgatacggccattagatcatagccctcccccatgacaaccgacaagtgagactgtttgatatgtcaggagtgcgcctggtgcggcattcccgcggagcagccgacagggctcacaggagaatggtatgctgctcggcaatggagtgaagatccaccccgatgtgcaatcatgttcacctgtgggtttgaccggcaagccattggttggaacatcaacatccctgcaattgctacaagaaaaataaggacaccggcagcccttagtttcactgtgatgccagcacacgacctttgatgggtgcaggcttattcatgcgtacttaatcagccattgtattgtgagagtttgagccctggaaagggtgctttcgtactatgttcttttcacatagtgcccagcttgcatgaaatgtacagagaaatgtgtggtcgtatttatccacgtgttgtcttgtatatgtatggataattngggtcccctgggcagtagaggcaaagctcacctcccatgtagcacatgaaaatgctt

SEQ ID NO: 355520 - DNA, 1354 bp, Homo Sapiens
  misc_feature (426)..(426): n is a, c, g, or t
tccatcatggtccgtgctgttaacgaaccaccaccagcccctgcctccacaaggaagctattactggtccaccaggcagtcttcagccagtgccctgccctgcagacctcctccccctataagcaggctggccccagccccaaaacccgggccaggcaggactcccaaggggaggaggttgagcccctgccagcctcaccagaagccccagcccactctcctaaggccaaggctgcagatcctcctgatggcttctgttcctcagccagcaccctggaggggctcagcgtctctgatgagacctgcctaagcacctctgagcccagtgcccgtgtaccagattccgtgggtgtgtccccagatgacctggatgacactgggcagccagtccttgagcgaggccagctcaatgggaagcgggacacncctgtggctggcgctgagggagacagtgtatgacccatcattgcccgcttcccatcacagcagcttgtcctggaagggccgaggggggccaggcgatggcagccctgtggtgctgcccaatagccagccagacctgcccagatgtttggctgcgcaggcccagcactcacacgtcaggctatagcagctgagggggacccggggaggctggacagggcgcggaaccctgtcatggatgacaaggcaagggcagcaataggctggagcccgaaggtatttctccagatccacagggagaggtctcaccctccagctgtggatgttaaaccctgccagatgtcccagccttgatctgtctgctcctactcctcacatctggaggattccagcaggaggggtttcggaggggacctgcttgcaacctgctgagggcttgtctgctcccacagcaccatctaagacccctcctctagaaggggggaaggccagatgtgtagcttcgggtatcagaggaggctgacctggcccccatcccaagttacaagaacttcagtgagactaagggacccccatcctagggatcttgtcagggttccttactgaccagaggagcccgcagcaatctccacagcctcctgggtctcacccctttcatgggctcttcatcaggacacttccctctcttttgggagcttctctgggcagaattgggctgggacctctctccccaactgccctgctctcctcatactcaccggtttgaccagaaattctccaaatccagccatagatggctgctgggtgtgcagcaggagaaggaggatggtcagccttggagcatctctcaattacgggacagtccctctttggaagcaggctcctgtgctttcctgtgttaataaacagtaataatcctttccatctctgc

SEQ ID NO: 355521 - DNA, 475 bp, Homo Sapiens
  misc_feature (14)..(14): n is a, c, g, or t
tactaatgggggantactgtggggtaagggggcgcctgcttgcctgatacaggatggggtcaagggacagtgggcaggtcctcactcaggagtggggggtgtaggctggccagcccccagggcttgtccaccagtcttctccccgcaaggccctcagagcagcgcctgtgggtgtcagtattacctgagcctaggccaaagctagcccaaggctggggaaggggaggagactccaggtcagaatgtgaggtctcagtctgtgatttaaggtgttgcatgtggactcttaactgtacgtgtagtttctagtggagaaatcaaggctctgatcattttgtttttagtatgaaaatgtgatttcctttctgtttgtaactcatcatagaaacattgtggtgggaggagaggggatagtctacagctaatgagggaaacaccaaagatcacatcattaaaatgatgacatgcccctaga

SEQ ID NO: 355522 - DNA, 1210 bp, Homo Sapiens
ttctggcggcgcagggtcccggggctggttgtggcgcgatggtgcgcgccgcctggggagctgcggccgggggtttgaaccggccaacttctccagccggccggggcgagcgccagcgcggcgtccggggcgagtgacacgcagagctgaagccatggttcatcaggtgctctaccgggcgctggtctccaccaagtggctggcggagtccatcaggactggcaagctggggcccggcctgcgggtgctggacgcgtcctggtactcaccaggcacccgagaggcccgcaaggagtacctcgagcgccacgtacccggcgcctctttctttgacatagaagagtgccgggacacggcgtcgccctacgagatgatgctgcccagcgaggctggcttcgccgagtatgtgggccgcctgggcatcagcaaccacacgcacgtggtggtgtatgatggtgaacacctgggcagcttctatgctccccgggtctggtggatgttccgtgtgtttggccaccgcaccgtatcagtgctcaatggtggcttccggaactggctgaaggagggccacccggtgacatccgagccctcacgcccagaaccggccgtcttcaaagccacactggaccgctccctgctcaagacctacgagcaggtgctggagaaccttgaatctaagaggttccagctggtggattcaaggtctcaagggcggttcctgggcaccgagccggagccggatgcagtaggactggactcgggccatatccgtggtgccgtcaacatgcctttcatggacttcctgactgaggatggcttcgagaagggcccagaagagctccgtgctctgttccagaccaagaaggtggatctctcgcagcctctcattgccacgtgccgcaagggagtcaccgcctgccacgtggccttggctgcctacctctgcggcaagcctgatgtggccgtgtacgatggctcctggtccgagtggtttcgccgggcccccccagagagccgtgtgtcccagggaaagtctgagaaggcctgagccgtgacctcttctgcttactgtaactgcggccggtttagtgaccccatgacttacagccggttcttacctcttaggtgaaggagatgacatgtttttagaattgctgtgcaaggctcaccctctctctgtcaacactggaataaactttgccttttctga

SEQ ID NO: 355523 - DNA, 665 bp, Homo Sapiens
gggcccgcagagcctgtgagccaggctgaggctaccagcactggagagcccccaccagggtcagggggcctggccttgccctgggaccccccacagcctggagatggtgcttattggctgccatggctctggcacagtccagtggacccaggaagaaggcacaggggtctgagtaccagccctagaactcagcgttgccaggtgtgctgccatctgctgttcggcccaacctcagagtgaaggcagggtggcagcctccccacggactccatgcggcccgctggctcagggcagggagcctggaagcaaaggaggacctggctcctgactctcagagaggataggctggatccctggggcaggcctctcctcggcctgctcctctgacctcccggtctccctctgcaggctgggggcagaggcctgaggacaaggaagagctttgccatcccctgcatgtgcccctgcctctacctgtccccaaatttttatgcgtgatgaaaacaaagccagaggagaggagacgtgtaaaaatggtttctgaaatgtatttttattaaagctataaatctaagtgacttgcattctaggatactaaaaatcattagcttaaatcactgtgaggccattaactacatttgggaactcttggaaaactggagagc

SEQ ID NO: 355524 - DNA, 569 bp, Homo Sapiens
  misc_feature (14)..(14): n is a, c, g, or t
  misc_feature (47)..(47): n is a, c, g, or t
  misc_feature (58)..(58): n is a, c, g, or t
  misc_feature (82)..(82): n is a, c, g, or t
  misc_feature (90)..(90): n is a, c, g, or t
  misc_feature (102)..(102): n is a, c, g, or t
  misc_feature (108)..(108): n is a, c, g, or t
  misc_feature (137)..(137): n is a, c, g, or t
cttgcttcccttcnttcttttttaagaaaagggctaagaatggcccngaaaaaacttntaaaccaagcttaaagctacaaanattgaaanaacccccaaccnaggttnaaggggcccctggcttttgcccctggaanccccaaaaaaccctgaaaaatggtgccttaattggcctgcccaatggctctggcaacaagtccaaatggaacccccaggaaagaaggcaacaggggtcctaaagtacccaacccctaaaaactcaagcgttgccccaggtgtgctgcccatctgctgttcggccccaacctcagagtgaaggcagggtggcagcctccccacggactcccatgcggcccgctggctcagggcagggagccctggaagcaaaggaggacctggctcctgactctcagagaggataggctggatccctggggagcctctcctcggcctgctcctcatgttcccggtctccctctgcaggctggggcagaggcctgaggacaaggaagagctttgccatcccctgcatgtgcccctgcctctacctgtccccaaatttttatatt

SEQ ID NO: 355525 - DNA, 841 bp, Homo Sapiens
  misc_feature (465)..(465): n is a, c, g, or t
  misc_feature (474)..(474): n is a, c, g, or t
  misc_feature (803)..(803): n is a, c, g, or t
cccggtggctcccccccggacggtgcgcggcccggcccgtctcgcgaactcgcggtggtcgcgcggccccgcgctgctccgaccccgggcccctccgccgccgccatggctcggccgctagtgcccagctcgcagaaggcgctgctgctggagctcaaggggctgcaggaagagccggtcgagggattccgcgtgacactggtggacgagggcgatctatacaactgggaggtggccatcttcgggccccccaacacctactacgagggcggctacttcaaggcgcgcctcaagttccccatcgactacccatactctccaccagcctttcggttcctgaccaagatgtggcaccctaacatctacgagacgggggacgtgtgtatctccatcctccacccggcgggggacgacccccagagcggggagctgccctcagagaggtggaaccccacgcagaacgtnaggtaagcnggcccaaccccctgtgtccacccagaacatcaggtaggccgggctccgtcccgtatccacccagaccatcaggtaggccgggctcccccgcagctgtggcgccaaggcctgattcgggacctgccagctggcggtcctgggcctcgctgtacctgcacggtaggtgctttcacggggcctgcggcactgtgtgtcggtgcagactcccaccaggaccccaggccggccccaccgtctggaaccacctagaggtggcccgccctcctcagtcctggggccttctccttacccagacgtctctgggttggtcaactcgtgccacgtgtgcngcctgggcctcgtccccaggtacaagcactgggccgtg

SEQ ID NO: 355526 - DNA, 819 bp, Homo Sapiens
ctgcgcggcggcctggtcttaacgcagtaatcggccaagcgttggtgggcacctgtcatggccgtcacggttgcgcgtccacccttggttccccaggacactgcttccggatgatggtctgtgtacttcgcgatcccttccccttgctctctttcccacttcctgtacatcacggaggcgtccacgtttgcgggcgagaaggtgttgggctcgttcaggagggagatcacactcaggagaatggtcctgacgttctgcgtggggttccacctctctgagggcagctccccgctctgggggtcgtccaccggcgggtggaggatggagatacacacgtcccccgtctcgtagatgttagggtgccacatcttggtcaggaaccgaaaggctggtggagagtatgggtagtcgatggggaacttgaggcgcgccttgaagtagccgccctcgtagtaggtgttggggggcccgaagatggccacctcccagttgtatagatcgccctcgtccaccagtgtcacgcggaatccctcgaccggctcttcctgcagccccttgagctccagcagcagcgccttctgcgagctgggcactagcggccgagccatggcggcggcggaggggcccggggtcggagcagcgcggggccgcgcgaccaccgcgagttcgcgagacgggccgggcaccgcgcaccgtccgggggggagccaccggggccgcacagcactgcctcctcctctgcgcacaacagcacgcacgccccctcgtgccgaattcgccaccacaggcctcgctacctaataccgcgggattactgca

SEQ ID NO: 355527 - DNA, 1634 bp, Homo Sapiens
  misc_feature (1449)..(1585): n is a, c, g, or t
ccagagctgctggagcgctcggggtcccgggcggcggcgtgcggcgcagaggaggagtgcagtgcggcgtgcccggtgtgctcccccccggacggtgcgctggccggtccgtctcgcgaactcgctggtgtgtctgctgctggcccctgctgctgctcctgacccctgggcccctccgccgcctgcattggctcggcctgctatgttgcccagctcgcagaagggcgctgctttgcttggatgctcaatgggggcttgcatggaaggagccgggtcgagggggattccggcgttgacactggtggacgagggcgatctatacaactgtgaggtggccatcttcgggccccccaacacctactacgagggcggctacttcaaggcgcgcctcaagttccccatcgactacccatactctccaccagcctttcggttcctgaccaagatgtggcaccctaacatctacgagacgggggacgtgtgtatctccatcctccacccgccggtggacgacccccagagcggggagctgccctcagagaggtggaaccccacgcagaacgtcaggaccattctcctgagtgtgatctccctcctgaacgagcccaacaccttctcgcccgcaaacgtggacgcctccgtgatgtacaggaagtggaaagagagcaaggggaaggatcgggagtacacagacatcatccgcaggtcctggggaccaaggtggacgcggagcgtgacggcgtgaaggtgcccaccacgctggccgagtactgcgtgaagaccaaggcgccggcgcccgacgagggctcagacctcttctacgacgactactacgaggacggcgaggtggaggaggaggccgacagctgcttcggggacgatgaggatgactctggcacggaggagtcctgacaccaccagaataaacttgccgagtttacctcactagggccggacccgtggctccttagacgacagactacctcacggaggttttgtgctggtccccgtctcctctggttgtttcgttttggctttttctccctccccatgtctgttctgggttttcacgtgcttcagaaaagaggggctgccccaccgccactcacgtcactcggggctcggtggacgggcccagggtgggagcggccggcccacctgtcccctcgggaggggagctgagcccgacttctaccggggtcccccagcttccggactggccgcaccccggaggagccacgggggcgctgctgggaacgtgggcggggggccgtttcctgacactaccagcctgggaggcccaggtgtagcggtccgaggggcccggtcctgcctgtcagctccaggtcctggagccacgtccagcacagagtggacggattcaccgtggccgactcttttccctgctttggtttgtttgaaatctaaataaaactactttatgagagnnnnnnnnnnnnnnnnnnnnnnnnnnnnnnnnnnnnnnnnnnnnnnnnnnnnnnnnnnnnnnnnnnnnnnnnnnnnnnnnnnnnnnnnnnnnnnnnnnnnnnnnnnnnnnnnnnnnnnnnnnnnnnnnnnnnnnnnngaactgtggggcccccccgccccccaaaaattttttaaaaccttttttt

SEQ ID NO: 355528 - DNA, 476 bp, Homo Sapiens
  misc_feature (426)..(426): n is a, c, g, or t
  misc_feature (457)..(457): n is a, c, g, or t
gcgatctatacaactgggaggtggccatcttcgggccccccaacacctactacgagggcggctacttcaaggcgcgcctcaagttccccatcgactacccatactctccaccagcctttcggttcctgaccaagatgtggcaccctaacatctacgagacgggggacgtgtgtatctccatcctccacccgccggtggaacggacccccagagcggggagctgccctcagagaggtgggaaccccacggcagaacgtcagggaccattcttcctgagtgtgatcttccctcctggaacggaggcccaacacctttcttcggcccgcaaacgtgggacgccttccgtggatgttacagggaagttgggaaagagaggcaagggggaaggattcggggagttacaacaggacattcattccgcagttncttggggggaccaaggttgggacgcggtttnaaacgggccttgaaggttt

SEQ ID NO: 355529 - DNA, 338 bp, Homo Sapiens
  misc_feature (258)..(258): n is a, c, g, or t
tccactccaagggtttctgacccaagaggtggggaccaaaaccatgcattcctaagaagtccccaggtcatgctgctgttgctggactgaggaccacactttgagaacctgtgctctaagtgaatacttggaagtcgtttcaggacatggggcatagaaactgaggagtagctgagaggaaaatgaagagaagctgagaagaagctgaggatcctcacaggagcagacagagaaatgtgaagggtggggttttatgtntgggaaagggacccgaagcccaggctgaagagttttaactttgggcccagaaactcaaccatcaatggaaacagggcagt

SEQ ID NO: 355530 - DNA, 463 bp, Homo Sapiens
ctggagagctctgtgcagtggccagccataggaacctgagtcagtgggactctctgtggatagactgattcttgtttagaaacaacagcaaaaaagaagaaggcaggaaagaaactccccggctcggaggaatgtctctgtgatccccattcttgatggagggagtgaaaaggggcctgggcttcgccccgctgctctcctgacagaaacagtaagtgacaccaggacagaaggcaggagccctgagaactcacggcgctctgcatggtctccagccgcccacccgtctccagccacccctggagcggccgtggggaggcggcagagggggctgtcggagggcccactattgccacacgtcttcctttggacacccagaaaaccctggcaccgtgaaaccaccagctagagaagaatgaaatgctactctcctacatatcttatagcaataccagttctctct

SEQ ID NO: 355531 - DNA, 494 bp, Homo Sapiens
gctcaaaaggaaactaccagtcgtgggaaggaacaagaggctccagttggagtgctcagaatactcctcgaggaaattacaatgaaagtcgtggaggccagagcaattttaacagaggccctcttccaccattacgaccccttagttctacaggttaccgccaaagtcctcgggaccgtgcttctagaggtcgtgggggacttggaccttccctgggctagtgcaaatagcggcagtggaggctcaagaggaaagtttgttagtggaggcagtggtagaggtcgtcatgtacgctcctttacacgataaaaatccttttgggaacatcttaactgtatatgaacatttcacgaggacaataaaaataagacattgaaggaccaatttagacttagcagttatctggagacatctgagagaatatttttatctgaagaaagcagaatttgtttgatacctaacaagatttcaataaaaatccaaactttgtatgt

SEQ ID NO: 355532 - DNA, 287 bp, Homo Sapiens
  misc_feature (30)..(30): n is a, c, g, or t
  misc_feature (70)..(70): n is a, c, g, or t
  misc_feature (202)..(202): n is a, c, g, or t
atttacatgtggtaacactgtatgctgggnttcctttttatctagtgcacagtctgagttttcatatgcncagtgttacctatatcatttacggtgcttttatcatggtcagatttgtcacctatagcagagtttgtaagtagttattaaatctctctggaatctattgccattttctgatgagcctttgtagctaactcanttttaccctgttctgctgtcaagttgcccaaaaattattaagacctcaagtttttctcttgaaacttcgctgtttctcttttatc

SEQ ID NO: 355533 - DNA, 1949 bp, Homo Sapiens
  misc_feature (23)..(23): n is a, c, g, or t
  misc_feature (77)..(77): n is a, c, g, or t
  misc_feature (93)..(93): n is a, c, g, or t
  misc_feature (102)..(102): n is a, c, g, or t
  misc_feature (164)..(164): n is a, c, g, or t
  misc_feature (192)..(192): n is a, c, g, or t
  misc_feature (664)..(676): n is a, c, g, or t
aaagcaaaacaaaatttccatgnaattctaatatcttttttccttctatctattggatatactcaagttcaaaagtncagtttttctgttgtncatcagtgntcactgttgttgctgttcatctctctatagaaacaatcccttgtaatcacaactgtaagggnaaatatccctaccacaaatgggtaggancctccttgataagtcattgtctccaaataaagttgattaaattcttattgtcagctaagcattcatacatgacaccaattgtattattagggtgaagacattaataagtattgatgtcaagccacattagctgtttctcaaatgttatcaaataaataaccaaatcagaatcagatttacattcatcccaatgattaaacactctcttatagattgggcaatttattctaatatgaactgaaacatctgtgagttacaatcacaagttcccaacaaaaaatggccccaaataagtaggcctttcagattcaaattcaaagttcagattcacatgggaatgggactaaggaacctgatcagattatattaaaatttctggttctactttaacctgtaacttccacataatatcagctagcaattgttcaactttcacccacagaaaagcatgaaagcatatgtctacatgatnnnnnnnnnnnnntttaaccattatctaattaatacaattgatacagatagaaatggtggaaaagtcagatgtcaaagaagtttcttaaagctaatttatccatattatccaaaaatgatttctcaaactaaacagataatggtcatattttcactttacctttagctatgcagatataaattgtatttctacacaacatataggttgaaaatgaaaaaaatctaaaccacaatccaggttccaggtttgtggtctagatggccctaaacctcttctggatatttttgctttccatctagatatttagaccacattgatatggtcataactttattatcattgctacatttgagtcactaacctaggaaaggaagcttatctaattaccaattttccaagctaaccaggactctcccctttcattattaaagagaaagtcattcagatttgaccccagagaaacaagtgcatgcacataccggacttttcagtatcctctttgggtaagaggatggaacaactattttggtttccatctcattcttgtaatgacagaaaagagaatacaaaaagtcaattgtaaatttatacaaaacgtatgcatatataaatacatatctatgggtgtatataaagtctaaatattatatccatctacatcttcaagattcagagtcttgtaccgttgacataatagtattctctctccaaattttctcatttttaaaaacaataagaatcaagcatgccaccttattaatactgaatagcaagtgcagaagttaagctgtagctataggggtttgaagcatttagtttgacgggacatcagagaataaaatccttaaaataaatttagctatttccagattgccttttgtttcataaaaatgaaaacctaaatgccctgttggtagcatcccaagctcctgagactgccaattgagccctataagaagcagtgctttaaacaaggtctgtacaaattgcttggatatgtgcttattgaaataattttgtgtggaaactggattactagaatttcatgtaattctctatctcataaaaaaatcacaagtaataccactggaagcttaggttttgagtatattaagctccagtatgaaatctgactcacaaactgcatcatctttacacagagcactatttaaaaatattaaactacagtcaattaatggagaaaggcacacacatttaaagttgcacaataaaagtgtattacagatgtgtgcccacgttgagaggtattgagatcattgggttt

SEQ ID NO: 355534 - DNA, 1349 bp, Homo Sapiens
cggtccggaattcccgggatggactcccctctccgcgcccgggacgccgcccgccggatcgcgccttgggatgtagcgcccgctcgccgcctcccggactctcgtcggaccctccgcccagcggccctgcgtcttcccaggtgaccacgccggcttcaggacatgcacggacacagccgcaacggccaggcccacgtgccccggcggaagcgccgcaaccgcttcgtcaagaagaacggccaatgcaacgtgtacttcgccaacctgagcaacaagtcgcagcgctacatggcggacatcttcaccacctgcgtggacacgcgctggcgctacatgctcatgatcttctccgcggccttccttgtctcctggctctttttcggcctcctcttctggtgtatcgccttcttccacggtgacctggaggccagcccaggggtgcctgcggcggggggcccggcggcgggtggtggcggagcagccccggtggcccccaagccctgcatcatgcacgtgaacggcttcctgggtgccttcctgttctcggtggagacgcagacgaccatcggctatgggttccggtgcgtgacagaggagtgcccgctggcagtcatcgctgtggtggtccagtccatcgtgggctgcgtcatcgactccttcatgattggcaccatcatggccaagatggcgcggcccaagaagcgggcgcagacgttgctgttcagccaccacgcggtcatttcggtgcgcgacggcaagctctgcctcatgtggcgcgtgggcaacctgcgcaagagccacattgtggaggcccacgtgcgggcccagctcatcaagccctacatgacccaggagggcgagtacctgcccctggaccagcgggacctcaacgtgggctatgacatcggcctggaccgcatcttcctggtgtcgcccatcatcattgtccacgagatcgacgaggacagcccgctttatggcatgggcaaggaggagctggagtcggaggactttgagatcgtggtcatcctggagggcatggtggaggccacggccatgaccacccaggcccgcagctcctacctggccagcgagatcctgtggggccaccgctttgagcctgtggtcttcgaggagaagagccactacaaggtggactactcgcgttttcacaagacctacgaggtggccggcacgccctgctgctcggcccgggagctgcaggagagtaagatcaccgtgctgcccgccccaccgccccctcccagtgccttctgctacgagaacgagctggcccttatgagccaggaggaagaggagatggaggaggaggcagctgcggcggccgc

SEQ ID NO: 355535 - DNA, 470 bp, Homo Sapiens
cgggggacgaaaggacacctccgcggccagggattggagagacagcgaagggactgtgggggtcagggtacatccctggcctagcaaacagaggaagcattatgtcaggcttgcgtttctgatggccaatccctcctccaccaatggcattcctggaggacacgggatccacaccccggcgccagtcagcagctgagccatcctccagctctgaaagctcagtctttctatcagtaccattactggactcctggccagaagcagttagggagctagcagagaaccgtcccggctgcacatcattggttggagaatgggtgtccagaggtgggaaatggaaccgggaagaggctgttggcactggtggtgcactctgaggaaccacaccacttgaccgaatgttgatgaatgggtagttgggcatcaccagcttgttgaagttaaatttatagtaatctttcccttttccc

SEQ ID NO: 355536 - DNA, 1196 bp, Homo Sapiens
  misc_feature (321)..(383): n is a, c, g, or t
ggggcatccattttctaggcttaaaagatatatttttgatatatttaatgatatcctctacactccagcattaatatgtctgtttaaaaattactaattctcaaatggctcaagaacattagaatttaagtaccttttagagtaattattttaagcaaatagcctggacgtaagagattctcatgccagcatgctttcatttgtcagttgttgtgactgagagataatgaatgacacctgaaatgcatatggtatttttgggagagttaaggtataatttgaaggttggcagaccagttgtgctgattactcttagagaannnnnnnnnnnnnnnnnnnnnnnnnnnnnnnnnnnnnnnnnnnnnnnnnnnnnnnnnnnnnnngaaggcacggcatttttctattttccccacaaattatttcaaaaaaaatctgtattttctgggatatgtcattggcaagaggaagaactggtgttttgaaagcagtatggattctttaaatgcctctcactcttacaagatagtaggctttgagataataaacttacccgtgtcaattaacatttaaactggcatatagaaaaaaaggaggatttttctgcattgtaaaataatcactatggtttatatgttgaatttgacatttgtgtgtaatttcatggtggcctagtgttgtggtgcttctggtaatggtaatagaagctcaactatttttttgtggatttcagtttttatcatcagaagtcctagacagtgacatttcttaatggtgggagtccagctcatgcatttctgattatacaaaacagtttgcagtaggttatttgtcatttcagttttttactgaaatttgagctaaacatttttacatgtaaatacttgtatttaccaaagatttaaatcagttgattaattaattaactcaaatactgtgaactatctttaaaacactagaaaaaagaaatgttagtatctcaattacaccaactgtgcaaatgaactttgataaaatagaaataatctacattggcctttgtgaaatctggggaagagctttaggattctagtagatggatactgaatactcaggcccacttaatttattaatgtatacattgtgtttttgtctttatgctatgtacagagaaatgtgataattttttataataaatattttttatgatgataaaagcc

SEQ ID NO: 355537 - DNA, 1144 bp, Homo Sapiens
  misc_feature (989)..(989): n is a, c, g, or t
ggaaggattaaaacttagtttacactatgtggttacaaatatatgtcaatgtacattttgaacatatttatgtgctatggaaggaaatgctggtgactaaaataaggtttactctgaaagaggaggaattttattcaaagcattcaaacattttattcaagtgtttcaaaattcaaagcattgtattcaaagttgcagtgaaggcatcaacttatgtaaaaactcagaaggaaggctcctctgataaaaacacagctcctttattatgctgcttttcttgttcactttacacactaagtaaacacttattgtcaggtgcctagtcttgagtgaattgttagatgtgcactgaactcgggatgttggggattggagagagagaattgccaaagtaacagcaaaaatatctcttactttgctttgtttataaataaattagtagattggaaaaactagtgttagggaaagaaatcacatgttcagagcctaattcagtaggaagggcttttctctaccctgaaatgaaggtaatccaaaggcatccattttctaggcttaaaagatatatttttgatatatttaatgatattctctacactccagcattaatatgtctgtttaaaaattactaattctcaaatggctcaagaacattagaatttaagtaccttttagagtaattattttaagcaaatagcctggacgtaagagattctcatgccagcatgctttcatttgtcagttgttgtgactgagagataatgaatgacacctgaaatgcatatggtatttttgggagagttaaggtataatttgaaggttggcagaccagttgtgctgattactcttagagaagaagaaatggaaaaatgaaagaaggcaggaaggaaagaaaggatataggaagagagggaagcagaaagcaggcatttttctattttccccacaaattatttcaaaaaaatctgtatttttcttgggatatgtcnattggcaaagaagaaggacctggttgtttttgaaaggcagtatggatccttttaaatggcttcttcactccttaacaggataagtagggctttttgagaataataaaactttaccccgctgttcaatttaaccttttaaaaactgggccatattg

SEQ ID NO: 355538 - DNA, 710 bp, Homo Sapiens
  misc_feature (679)..(679): n is a, c, g, or t
ttctttccttattcaactctcagttcttttgccagtattcccaaacgaggttgacacagctccagtccacacaagcataccaggttccttcccaggggcagtttagaggaagctccttctgggcaaggtcaggcggtcctccttccctctctccttcccctttgtcccagcctcaactgactctggctgtgggaggtgtggagggtccttaggcttccctccccaacctggcctccaccaacacccctaacaggaggcccgtggaaggctcagcctctcctccgcatccctcctccttcctgcctatcggagggagccagggtcccctaggctgaccctgaatcctcttcctcccttcatgggaggggggcaggaatccagaggaggatgaagccagcgggaccacatggcttggtggcttggacaaacaagctcagggaggaaatgaggaggcggcggctgcagaggaatgcaaccctgttgggcacagaccatgcaatctggggctggccctggggccagctgggtcctgtcctccacctgctcaaccgtgcttccaccaaccagaggaaacccatttactagtttttctaataaatcaataatgctccatgtttctctcagtttcttatttaacttagcctcctctccctttggaactgagcctaaaggagggctngcaccatggagacagagggacagccagattt

SEQ ID NO: 355539 - DNA, 1141 bp, Homo Sapiens
acaccctatacatagacacatcccacagaatattcacaaatctattggcccccaacaccagcagatagtcatattaaatgaaaaatatcacataccaacaggaaaaagttacacatagggaatatacaaaaaatatggtgctataatccttaatataaggagtatgttttgaattaatgttttgaggaaaagtgtttccatttatatgaaagtatctatttaatagtaataaaaccaaaaaggaagctgaattctaggactgttttacctgccaaataattgaagggatgagcaagaattccttgaaaagcctcattctatcctttttctttgtaactaaaaattagaatttaaaatgttggaaattattgccagacaagtttcttttcattggtttatagggaattttatggattttaactaggcaatggtccaatgtggtcaacagacatggtttttcagctgttgaatgaaaattaaaataaagatttattgttgattttcattagtttttctgttcagataagaaaaaagattatgaattccctttcagtttgcttcactcattatgaagatggatagtaataggatagtactgaacccaagcttcacatggggaagctcaagaaatgtacaaattctcttcttaaaaatttggtcctctgatataaaacatgcttaactggcaagatggctcacttggtcctcaagccaacatcaagaaatatttagctgtcttaacacaggtgggagacttttttttaatgaaatacataggaatccattaagtaacattagcatgtcatgtgttaaatagctccatttaaaaatgttacagatccaacagaagggaaatcaaaaacttatttttctcagtaactactttacatactagtgtaattaaaggtttaactggaagaaaaattcagcataaaagtataattaaagtaaaaagctggtattccacattcctgttcctatgaacacctgagctggcacaaaagctgagtagtttaatgcattggcatatatatgccttaaggactgtacttttctctaccaaatctttgtaaatcataaacaagcatgtaatgattatgaaacaaatacttatttaggtgttcaaatgtaatctgtttac

SEQ ID NO: 355540 - DNA, 562 bp, Homo Sapiens
  misc_feature (33)..(33): n is a, c, g, or t
aagctggtaaggaggaatggatgatgagctggnagtttgcccaggcagattcagggcattaaacttaggaaccacagcaacgctgaccctccggcgaggcatattctttcccagcgtgagggacatggaccgtgccgtgcgagggaccccatcagaggggccacagctgcggcttgaattctgatttgcaagctttttaaactccatgagctccgcatggtccttctcatacgtcctctttagattctccacatactgcatcatcacttccgttgctttcgacatgcgcttttcctggcggacggcgcctaccacctcagctcggctggagaggcgggcagccaggcggtgcaggacagcgatgtcctccagcaacttctggtaggtttcccggtgctcacagtggtgccagagtgaagctgaggacgtaatggaagctttgaagttttccagttctttctcagtgttctcctctgtcaggttgcgttccctttcagcctggctaattgtagattccagagtgtagctgtcatttctaaaggccaaggacagttgcacaaac

SEQ ID NO: 355541 - DNA, 820 bp, Homo Sapiens
accgacccgcgctccgcagctcctgagggctttcgagcccagatggtcatccgagacgaaaagtggccggcgaaggagagtatcgcactgtcacgctcccggagcaggggccttcatgaggtgtgccatggaaacagccttggcagactcccatctcgtcctggtgccatctccggagcggaaagtcggagcgtccccgctggtcgaccaaggcacgcactgagtagccatggctttggtcgaacatgttgggctccaagaagtctcttcctgtcactcttgctgagtgaagcccttcctgccctcaggctggaccatggcttccatgctgcccctcttttcaaggctgcttgtctacagttctacaggtttctaggcccttggtgacgtgaagagcagttcattacgaaatgacctccaagaacaaggctcagcattctctgaaatctcatgaagcagtgtaaccagctctcaagtatcttcctgtgaaactagcacacagggacgccctggtattacctgtgaacactgcatacctttcccagcgtgagggatcataggtaccagtgccgatgcgagggaccccatacttctgcagtcaggaagggagcagagaagagaacacagggattcctgcttgtctaaaaggtactgttttctcctgctagcaaccctcatcagccagagttcaaaccctgcacagtgcccatggagagatctcggtccaaggcaccaaactcttcctgctggaatgagaaagagccttcctactgtgtctctctttacctcagcttttgcacacctccaatattttgtccac

SEQ ID NO: 355542 - DNA, 511 bp, Homo Sapiens
  misc_feature (411)..(412): n is a, c, g, or t
  misc_feature (490)..(490): n is a, c, g, or t
cgtgaggccttgagcacaagtgcaagcgggacatcctgctcggccggctccggagctcggaggaccagacctggaagcggatccggccccggcccactaagaccagcttcgtgggctcctactacctgtgcaaaggaggagatcgacgtgtggaccgaggagcggaagggcaccctcaaccgcgacctgctcttcgacccgctggggggtgttaagcgcggcagcctcaccaatcgccaaactcctgaaggagcaccagggcatcttcaccttcctctgcgagatctgctttgacagtaaaccccggatcatcagcaaaggcaccaaggactctccgtctgtctgctccaacctggctgccaagcacagcttctacaacaacaagtgcctggtgcacatcgtcccgctcannctcctcaagtactccaagatccgccagttccaggagcacttccagttcgacgtgtgccgccatgaggtgcgctacggntgtctgcgggaggacagctgc

SEQ ID NO: 355543 - DNA, 603 bp, Homo Sapiens
acgcgtccggggcacatccccacgtgtgtcaggttcccactctttcgtggttcctaacgtgaagtgctgtgatgtttctgccctgcctaaggaacgtatcaagctctctcagtgtttcagtgttggagattgaggctgtgccacatcttctgccatcctaaggggacatgatggttctgtgattcccagagagctggcagattgtgacaatctccaggagaacctacagattggaagcagcccacacctgatgtggactcctgacccgggactcactcttcattcagaagactggtggcccacgtgccaggaccaccccacctctcttgctgccttttctcctgtcctgatggggttctgggagggagacctgtcgctgatgagatgaagaatgtggggatcgagcagccttcttctttgggacccctcgatatcccatggaatgctcgcacgttctcaaagactgagtcacaagcccctaccccttccttgctgtggttagtatcttgttctgtgattggttagcaatgttgactacccacgtagtgaatcttttgtctgcaatttagagaatgtgtaaacaaataaaaggctttaaaactc

SEQ ID NO: 355544 - DNA, 706 bp, Homo Sapiens
  misc_feature (64)..(141): n is a, c, g, or t
ctgtcttaggtcacaaaaaggtcctcagcctgtagtgggtcacattgttagaaatgctgttacnnnnnnnnnnnnnnnnnnnnnnnnnnnnnnnnnnnnnnnnnnnnnnnnnnnnnnnnnnnnnnnnnnnnnnnnnnnnnngtacactcaccagcagtttagccaggagagtacaccgaacaaaggagacagggtcatttataacctgacgcgttcaccttactgctgtatctggtttccactggccagaacaggacctcgctttctgtatttgtcctgattggctagcaacttagaactttttaaaagaggcaaaggtagaggagaacaaagggaggaggaagtaacttgtggaatgctgagaaaggtaaaaacacctccaaataaggaagaggaacaggctatgacctaatgcttgcttggaccagtataagcatgccagggcaaatatttaggctaaattgtgggagctaagaacataaagtacattgatttctttattacggctagcagatatttaagaatgttagcacaggtctttgaataaattttgcttctaagagaagttactatttattcctaattagatggggaggaaagtcctttgaagaggaacctctactttactttttactgatgtctcaagtacagcaggtaaaaatctcatcagaacaaacaacaaaggcttctatgaaacaggctgatt

SEQ ID NO: 355545 - DNA, 1283 bp, Homo Sapiens
ggctggaccggtccggaattcttccgatcaggaagaccaaggccagtgacccccataggcctgaggcttgtgcaggcagtgggcgtggggtaaggcttcctgatgccccctgtccctgcccagaacctgatggccctcattagtccttggctcttatcttggaagcacaggcgctgacagccgtcccagcccttctgtctgcgggcctgaaccaaacggtgccatggggaactgtctgcacagggcggagctctccccctcaactgagaactcaagtcagctggacttcgaagatgtatggaattcttcctatggtgtgaatgattccttcccagatggagactatgatgccaacctggaagcagctgccccctgccactcctgtaacctgctggatgactctgcactgcccttcttcatcctcaccagtgtcctgggtatcctagctagcagcactgtcctcttcatgcttttcagacctctcttccgctggcagctctgccctggctggcctgtcctggcacagctggctgtgggcagtgccctcttcagcattgtggtgcccgtcttggccccagggctaggtagcactcgcagctctgccctgtgtagcctgggctactgtgtctggtatggctcagcctttgcccaggctttgctgctagggtgccatgcctccctgggccacagactgggtgcaggccaggtcccaggcctcaccctggggctcactgtgggaatttggggagtggctgccctactgacactgcctgtcaccctggccagtggtgcttctggtggactctgcaccctgatatacagcacggagctgaaggctttgcaggccacacacactgtagcctgtcttgccatctttgtcttgttgccattgggtttgtttggagccaaggggctgaagaaggcattgggtatggggccaggcccctggatgaatatcctgtgggcctggtttattttctggtggcctcatggggtggttctaggactggatttcctggtgaggtccaagctgttgctgttgtcaacatgtctggcccagcaggctctggacctgctgctgaacctggcagaagccctggcaattttgcactgtgtggctacgcccctgctcctcgccctattctgccaccaggccacccgcaccctcttgccctctctgcccctccctgaaggatggtcttctcatctggacacccttggaagcaaatcctagttctcttcccacctgtcaacctgaattaaagtctacactgcctttgtga

SEQ ID NO: 355546 - DNA, 419 bp, Homo Sapiens
  misc_feature (33)..(33): n is a, c, g, or t
  misc_feature (43)..(43): n is a, c, g, or t
cctagagccatatccaccccttgaaactctgcnaaaacccttnccttcccattttaaaaatagcaaagaaacaattttgtcctttacctacatcttaaagaaattagaacttgggttggtgtaagtgacttacttccagggaatcatgcccctatttcctaccagcaggtcatacccaaatgtcacactatctattgttaaccatgaatgatattcagatctattacttttcgtgaaaagtggaacatgttacttccaaccatggcctgtcaccgtgagtgtgatcagctttctccaaaaccacatgggtcgcaggagctaaggggtggtacccaaatgttaggaacagtgttaggaaagggcaagggaaaagaagtgactggatgtcttatgagaaacccgtaaatggctaaaaaaaa

SEQ ID NO: 355547 - DNA, 1089 bp, Homo Sapiens
ggtccggaattcccgggatcaggcgtcggttgggacgcggagctgaggagcagggccgggcgccatggcaccgtggggcaagcggctggctggcgtgcgcggggtgctgcttgacatctcgggcgtgctgtacgacagcggcgcgggcggcggcacggccatcgccggctcggtggaggcggtggccagactgaagcgttcccggctgaaggtgaggttctgcaccaacgagtcgcagaagtcccgggcagagctggtggggcagcttcagaggctgggatttgacatctctgagcaggaggtgaccgccccggcaccagctgcctgccagatcctgaaggagcgaggcctgcgaccatacctgctcatccatgacggagtccgctcagaatttgatcagatcgacacatccaacccaaactgtgtggtaattgcagacgcaggagaaagcttttcttatcaaaacatgaataacgccttccaggtgctcatggagctggaaaaacctgtgctcatatcactgggaaaagggcgttactacaaggagacctctggcctgatgctggacgttggtccctacatgaaggcgcttgagtatgcctgtggcatcaaagccgaggtggtggggaagccttctcctgagtttttcaagtctgccctgcaagcgataggagtggaagcccaccaggccgtcatgattggggacgatatcgtgggcgacgtcggcggtgcccagcggtgtggaatgagagcgctgcaggtgcgcaccgggaagttcaggcccagtgacgagcaccatccggaagtgaaggctgatgggtacgtggacaacctcgcagaggcagtggacctgctgctgcagcacgccgacaagtgatggccctcctgggagagccccggcctccttccacccctggcttctccttcaacccctggctgacccttccaacccctggcctttcctcaaaaccggcccagggagaaggcccaaccttcttccaaacccttgcccttttcctctcaccccctgggcctcccctttcaacttggcccccaggggccccaggacctaaacccaaggggcccctg

SEQ ID NO: 355548 - DNA, 1556 bp, Homo Sapiens
  misc_feature (552)..(552): n is a, c, g, or t
  misc_feature (562)..(562): n is a, c, g, or t
  misc_feature (1199)..(1234): n is a, c, g, or t
agcggattcagctgacagagcatgagggggaggaatcactgatgacaggcactggcctgcccagctgggggcctttgtttattcatttggtgggcacttcctgggtgcctgctctgggtcaggcctgtgggggggaccactgagggcaggaaacctggcctgtccctccaggaagcgaagtcaacactggcacctgcagatgaagtggcagagcagcccccagctttgatggcatggggtggttggggggcacattctgcatgctcagaagagagagcaactcgccctgtggaaggagcatacagtgggagatggggacaggcccagtgacgagcaccatccggaagtgaaggctgatgggtacgtggacaacctcgcagaggcagtggacctgctgctgcagcacgccgacaagtgatggcctcctgggagagccccgcctcctccacccctgcctctcctccaccccttgcctcccctccacccttgcctctcctccacccgcccaggagagccccacctcctccacccctgcctctcctccacccctgnctcccctttncctgccccagtgcccagaccaaccaaggccctgacagccctgccttctgccctctgccctgcatgggcaggcatttgttccctacctgggtggcctgctcccctgcctgggccctgacttcagctccctgtagtgaagtccaggagggtgggacaggcctgtcaggcctctgggaatctcccaaatcccagaactcaccactcaccatgggcctttaaatgcagtaaactccacctaaccagattcaggggcactatgcccactgcctcctcttcagactctttgcatttcagtgaagagcctggaagaaacccaggggcctcctatgcacagatcttgcagcccagaaccaagtcagcctccctgcgactgcccaggcacactgcccaccaccccacccccgaaacaatgccagcccgctgctttttctatcctcccagtcacctttgcagacaaagaccaggggcagctcccgagggcactgtgaaggctcccatgccacacagtgagaactgtagcctctgcgtccaaggcacacagggtactttctggacccactgctggacagacttgaaggtgtcatgcccggtgtgtgcaggaggaaactaacagttcagtaaactctgccttgaccagnnnnnnnnnnnnnnnnnnnnnnnnnnnnnnnnnnnngtggacacctatgactataaagagatcttatcaagacaagggcgccaacactattaaagacgtaccccatgcataactataccaacacaaggagcgccccaatataatggacgaggatggccgctacaatcacagctgaccggcgcactcggagcgcaccattcctagacaaacagcgtcatcgaaccagtcgcgcacaccagccgatgtccaatacgtcgtgactttcaatcaacgcaaacaacgaaccaactaaacgaatcatccgagacgcgctaccacaagaagtgatcgaccacctgccccccacgtacgccacacc

SEQ ID NO: 355549 - DNA, 853 bp, Homo Sapiens
  misc_feature (254)..(309): n is a, c, g, or t
  misc_feature (321)..(402): n is a, c, g, or t
tgccccctggaatctggtttaggtggaagtttaactgcatttaaaaggccccatgggaagtggtgagttctggggatttgggagatccccagaggccggacaggcctgtcccaccctcctggacttcactacagggagctgaagtcagggcccaggcaggggagcaggccacccaggtagggaacaaatgcctgcccatgcagggcagagggcagaaggcagggctgtcagggccttggttggtctgggcactnnnnnnnnnnnnnnnnnnnnnnnnnnnnnnnnnnnnnnnnnnnnnnnnnnnnnnnnctctcctgggcnnnnnnnnnnnnnnnnnnnnnnnnnnnnnnnnnnnnnnnnnnnnnnnnnnnnnnnnnnnnnnnnnnnnnnnnnnnnnnnnnncatcacttgtcggcgtgctgcagcagcaggtccactgcctctgcgaggttgtccacgtacccatcagccttcacttccggatggggctcgtcactgggcctgaacttcccggtgcgcacctgcagcgctctcattccacaccgctgggcaccgccgacgtcgcccacgatatcgtccccaatcatgacggcctggtgggcttccactcctatcgcttgcagggcagacttgaaaaactcaggagaaggcttccccaccacctcggctttgatgccacaggcatactcaagcgccttcatgtagggaccaacgtccagcatcaggccagaggtctccttgtagtaacgcccttttcccagtgatatgagcacaggtttttccagctccatgagcacctggaaggcgttattcatgttttgataagaaaagctttctcctgcgtctgcaatta

SEQ ID NO: 355550 - DNA, 509 bp, Homo Sapiens
gtggtaccggtccggaattcccgggatcgggccacggctatcccgaccccaactacctgcagaacgtgctggctgagctggctgcccagggggtgaccgaggactgcctggagcagcagtgacctcgcaccccagcacgcccgcctctggtggccaccccgctgccccatggctggctgggtggccaggcaggaagtgcccagcccgagaggctgggaggtttgttgagggtgtggggtgtgccccacctgaagccggggctccccctgcctgcctctctctcctcctcccctctgggaattgggcagccctgggcagttgtactcatgggggcttaagatgcagctacctcagtgcgcagggcccgtctgtcctctgggggctgcttcgggcccgcggtgctcggggcctggtgtggggcgagtagagacttccccagcctggacgggcgtgggttctgggtcagcttcttttacctcaattttgtttgcaataaatgctctatagcc

SEQ ID NO: 355551 - DNA, 1151 bp, Homo Sapiens
caccacgctttccctttgtggggtctccttggggtattggcatgtgccccgcgcccctttgccttggggtagaagggccccgctggcggtgccttttttgccgcggcgtttccgggcgagactcgcccaggaacagtggtcttgtgggggtggcctcgggggcggccagttctccaagaacgggcccccattggccaggaaaagtgggcggggccccaattttccagaggtggggccaaaaaaagctttttggtttggaaattcaagttctggcttgggcctggctaaattcggagcccattgggggaggtttcccatggccccttcggggcccaggcagggaccactgtggattagaaaccccacacgtgtcactcgcaacattcctcccacatccacatccacgacggagccaaatctcatttgtcaccctcagtcaccaccccacaagatggagccgctggttacgacatggatgacaggtgtcatgcacagggagagaatttctccccggatacccctgaggaccaaggaccacccccaggctagggtgggaggattgagagcagtgcaagaaaccaaggaggatggagcatccaaaggaagagaaaggcaggctggggatggagggcaggaagggctgagcacccactcctccagccccagttctagggacagggaaggcctggattggaggcctggacccagcctggtgctctggccactgtgttctgagggcggctgctgggggacatggagagccctccagcccagtgacttccacctccagggtgatggccttagaggtggggcgtggccagcatcccccttttgccggctgcttctgagcctggggttacagttcggagcagagtaagcggaacaactggcctcacccagcgtggtgctgctgagaaataactgccatgtcttctgtgttgggcgggatggcttagcttagctggccctggctgtccatggtaggacactgttggttcccagggcctgtcctctgccacgtcccagcacctggtgcaaggtccaaaacatgaccgaggtgaacaaaacagaggtggacttgggctgatggggtggctcctgcagtccgctgccagaggctccccaggcaccgtcctgagcataccgattcg

SEQ ID NO: 355552 - DNA, 420 bp, Homo Sapiens
ggggagttctacgacctgcgctacctgtcggaggagggttaccccttccctactgctcctcctgtggatccatttgccaaaatcaaagtggacgactgtggaaaaactaagggatgctttagatatggcaaaccaggctgtaatgcagagacctgtgactatttcctcagctaccggatgataggggctgatgtagaatttgagctgagtgcagacacagatggttgggtagcagttggattctcttcagacaagaaaatgggtggtgatgatggtcatggcctgcgtccatgatgacaatggcagggtccgcatacagcacttctataatgtaggccagtgggcaaaggagattcagagaaaccctgccagagatgaagaaggagtttttgagaacatcgcgtcactgcagatttaaag

SEQ ID NO: 355553 - DNA, 693 bp, Homo Sapiens
  misc_feature (73)..(73): n is a, c, g, or t
  misc_feature (81)..(81): n is a, c, g, or t
  misc_feature (87)..(87): n is a, c, g, or t
  misc_feature (100)..(100): n is a, c, g, or t
  misc_feature (208)..(208): n is a, c, g, or t
aatttcggaacgagagctcttctgccaagagagggccatgcaattcatcccggagaacctgaggcctgaaggnaggtgagnagaagnacctctgtgaggnaaagcacacagtcaccttctcggcaactaagcagtccctgagaccatttaacatgcaacccgaagttatgggtcaatcccaaaagtcaccactccattcccaactagnacattaccaaagtgacctacccagagattgcttctcatccccagtcccaatgcacatccattcccaagaaatgctttgtcttcagcctctccagggaccatctcccttcctgtgggagcagagagcttagcctggagcacctttccttcaagccagcaacacagagcactaggttcaattccctgaaggtggccactttaagagagaaatctgaaaaccccatttgctttcttttctcccatattggcatggatttctgtcttctctaacaccttgtgaccttctctatatcatgctttaaagtgtaataatatgattttttaaaagaaatttattacttgttgcaaaggtctttttaaaccagtttagatttcaagaaaaaataaatggaaatcatcgaaaattcatttcacattaatggtctaaaaataaaccaaaggacattatgtgtgcatgtgtgtataagtgcacacagaaatatatat

SEQ ID NO: 355554 - DNA, 1015 bp, Homo Sapiens
  misc_feature (33)..(33): n is a, c, g, or t
  misc_feature (55)..(55): n is a, c, g, or t
  misc_feature (66)..(66): n is a, c, g, or t
  misc_feature (81)..(81): n is a, c, g, or t
  misc_feature (91)..(91): n is a, c, g, or t
  misc_feature (125)..(125): n is a, c, g, or t
  misc_feature (131)..(131): n is a, c, g, or t
  misc_feature (145)..(145): n is a, c, g, or t
  misc_feature (640)..(655): n is a, c, g, or t
aaaaatggcccaacccttcaaggaaaattgaanccccaaatccccctgtggttcncctggcccttnaaaaggaaaaagttnccccccccangcctaaaactcctcctgcttccccaacaggaaanggaaanatgggtccccctgnaaaaggcctggaaagaacaaaaccatttccttggggaaagggatgtgccattgggaactggggaatcaagaaagcaaatcctccggggtaaggtccactttggtaaatgtcctagttgggaatggagtggtgacttttgggattgaccataaccttcgggttgcatgttaaatggtctcagggactgcttagttgccgagaaggtgactgtgtgctttcctcacagaggtcttctctcacctccttcaggcctcaggttcctctgggatgaattgcatggccctctcttggcagaagaggctccatacaactggagaactatgtgaagatagcgctcgcatcttcaaacgtgcccctttcacctcccatgactcttccgggacagaggcctttttcccaacacattaatgacatcaaactgtgggggagtatgagatttctcttccattatattacttggaaatcaaagcccacatctgtgtgtgtaaagctgtnnnnnnnnnnnnnnnntactcctgtcgcctctcactcagatcagattgagacacctcaaagtgacttaggaaaagggacattcttgtttgaaaagctagtaaactactcttcaccaggtgtgttgccaggcttgtcttaattttttttctcttttgggtagctatgtgaggagccccagaaaattggggctgggatgaactctatacaaactgagaaaaatttgggctgctctagcggattttaacataactcagagcagcagctggtgagagcacagccacgctctgtaagttttatatttgccacgccggctgagtagagtgaattatcttggcattggtagtaaaatatccagcactcatgcttccctcgtgc

SEQ ID NO: 355555 - DNA, 1121 bp, Homo Sapiens
aagggtgttatgttcaggtttaaattgaaagaaaatgagaaaccagataaagcaagccaaccaaattaacttcactttgtgctcctctctgcttttttgagtctctcccgaaggtcaggaagccttggtataacaatcactttagtctttacagaacatacatctatgtgctttgtgaccaaagacattaaaggcagcctttgttactgttccccctccaaacccccttcagggttcttataagcttcagaaagctttccaagattgcttgccctgttctttgtatgaatccaagtaaacaactataccaaagcagctcttcctgggagaagataaaacaggcacagatacatcaccaggccaactgcgtacctactcaacttgatacctgatcacatggccctacatccttaaaagcagcaccagggacaaatggagctatcaagaggtaaaatccaaacactggacagttaaaacacatacaaaccagttaaaagaacattagtaatggggcactaaatagagttaaggctggacagctggttcaaccataccttggtattgaaataattctgcaagatgaggaacttacagaggaaccttgaaagaggcaccatgatatgacagggttcactttcactgcatgtctttaagatatcctactactcagccccaactgacccataaagcagctccgtggaactttaataaacaaatccctaataaaaataaataatttttagaatgttggagggtatgcctatttccttcagatctgatcaagacatgagaattataaaaccgatacaaactgttctgtgattatcacttgacagttctaacactgttatacagctcaattctatgctgcagcctttaagatacaaactggggttacatgagatcactcacttgttagagaagtatcagataaattttagaactgttccagttaaggaaaataattcttaatttcataatcctaaaactttttctaaaaatttttgcagggcaggtacttaactcatagctgttttagttgattaaaaaatctgatttaaaaataagtaaggctgggcgcacgtgctcacgcctataatcccagcactttgggagaatga

SEQ ID NO: 355556 - DNA, 636 bp, Homo Sapiens
  misc_feature (14)..(14): n is a, c, g, or t
  misc_feature (412)..(567): n is a, c, g, or t
  misc_feature (580)..(593): n is a, c, g, or t
aagtgattgttaancccccgggccttccctgaccctcgggagagaccccaaaaaagccagagaggagccacaaagtgaagttaatttggttggcttgctttatcctggtttcctcattttcctttcaatttaaacctgaacataacacccttctccgataccctatcccagcagacccctggttgggaagccctgtattaaattttgagaatgtacacagttttcttttgtacagtgctttacaactgctaaaagttaacttgtttaaagcaaaacaagaccttgaaaggtcaatcatattaaagctggtttgattattaatagttatcttttaggaagaagcttttttccctatgtaagatgtcatactgcagatttaaaatatagactatcaataaaatgcatgaagtgnnnnnnnnnnnnnnnnnnnnnnnnnnnnnnnnnnnnnnnnnnnnnnnnnnnnnnnnnnnnnnnnnnnnnnnnnnnnnnnnnnnnnnnnnnnnnnnnnnnnnnnnnnnnnnnnnnnnnnnnnnnnnnnnnnnnnnnnnnnnnnnnnnnnnnnnnnnnaaaaattgggcgnnnnnnnnnnnnnnaaaaatttttttaaacctttttttgggcggggcgcccccaaag

SEQ ID NO: 355557 - DNA, 629 bp, Homo Sapiens
gagcacaccctcagtatccgccgtctccagaggttcagtatggatctcaggcggtgcgtcctgtgccaaatagcaaggcactatatcaacccacggcgatggcgtttgatcttacggtaccacctagtggacaagatagtgcactgcatgagaccattgctacagccagaaaacagggagatcttgaggcatggcaatatccggtaatgttacaacaaatgccggccgggaaaggcagtcaagcaggagttaaacaatatggacctaactctccttatatgagaacattattaaattccattgctcatggaaatagacttatttcttatgattgggaaattctggctaaatcttccctttcaccctctcagtatctccagtttaaaacctggtggattgatggggtacaagaacaggtacgaaaaaatcaggctactaatcctgttgcttatatagatgaagaccaattgctaggaagaggtccaaactgggacactattaaccaacaatcagtaatgaaaatgaggctattgaacaactataagggctatttgcctcaggggcctgggaaaacattcaggacccagggaacctcatgcccttcttttagttcaatccagacagctcta

SEQ ID NO: 355558 - DNA, 513 bp, Homo Sapiens
  misc_feature (87)..(103): n is a, c, g, or t
  misc_feature (146)..(242): n is a, c, g, or t
  misc_feature (251)..(277): n is a, c, g, or t
tttgggaggctgaggcgggcggaacacctgaggtcaggtgttcgagacccagcccaggcccaacatggtgaaaccccgtctctactnnnnnnnnnnnnnnnnntgagccgggcatggtagccaggtgtctgttatcccagttaggnnnnnnnnnnnnnnnnnnnnnnnnnnnnnnnnnnnnnnnnnnnnnnnnnnnnnnnnnnnnnnnnnnnnnnnnnnnnnnnnnnnnnnnnnnnnnnnnnttagtctcnnnnnnnnnnnnnnnnnnnnnnnnnnntcagggatatagttcatatcccacttctttgtttacaccgatgtccctgaatatcagcctgtagctaatggacttgggatttctggtctaagtgggcctcctggggatggggtggtacactgagcttctgagcctcattgtagagtagaaaggtactggggcctgtgtggtaagccttgttgaaatgctctggtattcagtattgccttaataaacttcacccacaactgaaaaaa

SEQ ID NO: 355559 - DNA, 437 bp, Homo Sapiens
cctgtggatccttccctgggttttagtcccatgctacttccagaccctctaagctcattatttctggactgaaaagggatcccagcacctctaagcctaggaggcccctcccaccacagccagtcacacagaggtgggcatggggcttggtgtgcagaaagagccctgacatggactcgggtgggacacccagacctgcagagtgacccggataagtcacaacttctctgggccctccgtttcctccacatacaaatgctgggttctgctccacaggactctaaggttctcccttagttccaagatcctatgacttctctaattttctaatttcctaagtatcctaaattccctgctctcaaaacagctccctcccaccacctggtgtctcatacagcccttaaaactcagcataaaggccgggcacagtggctcat

SEQ ID NO: 355560 - DNA, 1155 bp, Homo Sapiens
  misc_feature (30)..(30): n is a, c, g, or t
tcagttcccccatcctcttcctcctctcgntgccagacttcatacggaagaaaggatctagacttcggacggctactcgggagcttattgcacaagatatattcaatttattccctcactgggcccccagagaagcaagaagtaggaagaagttgagacagggaagcaggagacactggtcagttgaagggaaacgctacatcttctctggttgaaggggcttgctaacagcaggcaaaatgacgaacccatcagaccgtgtcttgcctgccaactcgatggccgagagccgtgaaggggactttggctgcacagtaatggaactgaggaagctcatggagctgcgttcaagggatgcactgacccagattaatgtccacctactggaggtgtacagaatctctgcagtagactgaaaacctcccctgtggaaggtctgtctgggaaccctgcagatctggagaaacgtaggcaggtgtttggacacaacgtgatccccccccaaaaagcccaagactttcttagaattagtgtgggaagctcttcaagatgtcacgctcatcatcctggagattgcagccatcatctccctggtcctgtccttttatcgccctgctggtgaagaaaatgaactgtgtggtcaagtcgcaactaccccagaagatgaaaatgaggcacaagctggctggattgagggggcagccatccttttctcagtgatcatcgtggtgttagtgactgcctttaatgattggagcaaagagaagcaattccgggggctgcagtgccgcattgaacaggagcaaaagttctccatcatccgaaacggtcaactcatccagctccctgtggctgagattgtggttggtgatattgcccaagtcaaatacggtgatctgctgcctgcagatggaatcctgatccaagggaatgatctgaagattgatgagagctctctgacaggggaatctgaccatgtcaagaagtccctggacaaagaccccatgttgctctcagggacccatgtcatggaaggttctggccggatggtggtgacagctgttggtgtcaactctcagactggaatcatccttactctcttgggggtcaatgaggatgacgaaggggagaaaaagaagcaaagtgcaaacaaga

SEQ ID NO: 355561 - DNA, 345 bp, Homo Sapiens
gcgcgtgcgcgggccggtcccacagcacgtagtggaagcacccgacggggcagccgctgcggcttctggcagctccctcgacagcttctccaggggttcactcaagatcagttggaacccctggcgccacgggctgtcatcagtggacagtctgcccctagatgagttgcccagcacggtacagctactgcctgccccgaccccagcccctgattctaccgccgctcggcagggggacggccagggagaggtccagccgcgcggcaagcctggggaatcccgcagcgccctcagtgataccatcgagctttgaaagagcggcctgacgcagggccaggaccctgc

SEQ ID NO: 355562 - DNA, 383 bp, Homo Sapiens
  misc_feature (23)..(23): n is a, c, g, or t
  misc_feature (29)..(29): n is a, c, g, or t
  misc_feature (42)..(42): n is a, c, g, or t
  misc_feature (52)..(52): n is a, c, g, or t
tcgggatgaaccgaaacgccggnttaagncgcccgatgcggngctccttttnccggaagaatcccttttaaaatgacctcaagctgaccttcctgatgcagattccacatatggtatctgagactcacacagtgtggttggaagatagcacagtgacctcccaggcacagccctctgccagccctccactggctgccctaggatgctggccttcctccgatgggagtcgggcccagtctgctgtgagccaggagaagccagcaagctccctgcgaggcctggaggagcccttctcactcagcttggtgttcgatgccagtgcccccgcccattgtggggtgagggtgggactctcagcacagccctgtccaaataaatcctct

SEQ ID NO: 355563 - DNA, 467 bp, Homo Sapiens
  misc_feature (14)..(14): n is a, c, g, or t
  misc_feature (25)..(25): n is a, c, g, or t
  misc_feature (41)..(41): n is a, c, g, or t
  misc_feature (88)..(88): n is a, c, g, or t
  misc_feature (104)..(104): n is a, c, g, or t
  misc_feature (114)..(114): n is a, c, g, or t
aaaattctcctaanttggaaatggncaatcaaaacccaagntggccctctggttgtcaaaatgccctcaggaaggttcccccagcctntgaggcactggcaagntagggggcanatggggcatggagaacccagaggatctaggccctgttggggaggggaggggagctcaaggtttgggtggggactcagcccagatctacgtgagacatttttctgtgtcactgtgggaaagccttcccagaagtcctcactgcgtgttgctctgcgtgtgttcccatgtccatgcgtgtgttgagagcccatcaggagggcatgcatgactctttggcaacatgtattatcttggagccacgtgtttttattgctgactttaaatatttatcccacggcagacagagacatttggtgtctttttataattcgctcgtggtcattgaatagagcaataaacggagcattttgagc

SEQ ID NO: 355564 - DNA, 2016 bp, Homo Sapiens
  misc_feature (882)..(918): n is a, c, g, or t
  misc_feature (1084)..(1084): n is a, c, g, or t
  misc_feature (1360)..(1360): n is a, c, g, or t
  misc_feature (1362)..(1362): n is a, c, g, or t
  misc_feature (1369)..(1369): n is a, c, g, or t
  misc_feature (1374)..(1374): n is a, c, g, or t
attcactcccgggggcagcacggcccagccgagaggaccccctcggagatccagtttcaccaggtgaaatttggcgccccacgcaggaaggaaactgacccactgaatgagccgtgggaggaagagtggacactactgggaaaggaagagttgagtgggagcctgctgcagtcggtccaggaggccctggaggaaaggagtctgactattcggtcagcctcagaattccaggagctggactccccagacgataccatgggaaccatcaagcgggccccgttcctagggccactccccactgaccctccagcagaggagcctctgtccagtcccccaggaaccctgcccccacctccttcaggccccaacagctccccactgctgcccacggcctgggccaccatgaagcagcgggaggatcctgagaggtcatcctgccacgggctccccccaactcccaaggtgcatatgggcgcctgcttctccaaggtcttcaatggctgccccctgcggatccacgctggctgtcacctgggattcaccctgttactcgggaccagttcctggtggtaggggccgaggaaggcatctacacactcaacctgcatgaactgcatgaggatacgctggagaagctgatttcacatcgctgctcctggctctactgcgtgaacaacgtgctgctgtcactctcagggaaatccacgcacatctgggcccatgacctcccaggcctgtttgagcagcggaggctacagcaacaggttcccctctccatccccaccaaccgcctcacccagcgcatcatccccaggcgctttgctctgtccaccaagattcctgacaccaaaggctgcttgcagtgtcgtgtgggtaagaaannnnnnnnnnnnnnnnnnnnnnnnnnnnnnnnnnnnnagcgcaggcccagcccggtgcccactgcctgctcccctgccagtgcggaacgccctacacgggtgccaccttcctgctggccgccctgcccaccagcctgctcctgctgcagtggtatgagccgctgcagaagtttctgctgctgaagaacttctccagccctctngcccagcccagctgggatgctggagccgctggtgctggatgggaaggagctgccgcaagtgtgtcttggggccgaggggcctgagggccccggctgccgcgtcctgttccatgtcctgcccctggaggctggcctgacgcccgacatcctcatcccacctgaggggatcccaggctcggcccagcaggtgatccaggtggacagggacacaatcctagtcagctttgaacgctgtgtgaggattgtcaacatgcaggggcgagcccacggccaaantngcacctnagctnacctttgatttccccatcgagactgtggtgtgcctgcaggacagtgtgctggccttctggagccatgggatgcaaggccgaagcctggataccaatgaggtgacccaggagatcacagatgaaacaaggatcttccgagtgcttggggcccacagagacatcatcctggagagcattcccactgacaacccagaggcgcacagcaacctctacatcctcacgggccaccagagcacctactaagagcagcgggcctgtccaggggctccccgcccaaccccacgccttagctgcaggcccttttgggcaaaggggcccatcctagaccagaggagcccaggccctggccctgctggggctgaaggtcagaagtaatcctgagaaatgtttcaggcctggggagggaggggagcccccgacgcctctgcaataactggaccagggggagctgctgtcactcccccatccccgaggcagcccagtccctagtgcccaaggcagggaccctgggcctgggccatccattccattttgttccacatttcctttctactctttctgccaagagcctgcccctgcatttgtcctgggaaacacggtatttaagagagaactatattggtattaaagctggtttgtttt

SEQ ID NO: 355565 - DNA, 588 bp, Homo Sapiens
  misc_feature (543)..(543): n is a, c, g, or t
tcggtacccccccgactagcccgacagacagacagacagacgggaaaggtgagatggaaacacacagaagatgagagagacagacagtgggaggcagagctgaagactgtgaaagaaagggcaacagacagcgagggaggaagagacaggctggggggtgaggagagaccagtgacagagccgatgagggcagagacagaaagtcagaccactggggacacacaggtgggaaaacgaggctgagcagggtagggtgagggctcaggcacatgacggcctccttttgggaaaggcagggtctctgtgctaccttccagacacccacctaaaagaacttggcccaggaaggatgcccctaaccctccagggccctgggtaggacaggcttgcttggacagtccaaggcccaaggcccgaggccacccagcttcaaatctcccttgatttgagctgctcggcctccatccgacctccctgccccacctctgggcaccaccttcccctcaaggcctgcccactcaccggctcattcagtgggtcagnttccttcctgcgtggggcgccaaatttcacctggggaaactggat

SEQ ID NO: 355566 - DNA, 1300 bp, Homo Sapiens
  misc_feature (693)..(707): n is a, c, g, or t
  misc_feature (854)..(949): n is a, c, g, or t
cgggtccctcgtggagccttcattggggtagtagtgcgctgggaacctcgacaggcaccagtgccctgccaggcctggtgccctcctggaccgcctgcactgtgccagactcccaccgtgcttcctaaaggcaaccctggcccacacccgcatgcgcccggtgcagccatgccaagggaccagtcgggggcgctgctgcgtcctgccagtgtccaccacagctcagcctgcccttcagcccagcaaggtttaatcaaaatgcaatgctttgcaagtctttactgcttggaggtggctgagttgggggccctaggcaggggtaagctggcaggcagtgccatggcaggccagggtcccctcccatggggtctggcccccgttccagcatgtccagcccctgaagttggagtggggggcggtctgcctttgctgccactgccaggcctctgccctgcagctgaaacttggccatcacatcaacagaaaacccctcccagtgccagctgcccagcgtgggcaggccctggggacaatacaggtccacctgaggggctgcagggtgacacccagcagccgctgccccctcactgcccacccagcgagggcagcctacccgagcctgccccctgccaggtgtgtgccctgaggctggcggctggatgcgtggccaataaaaagcagacctagcccggnnnnnnnnnnnnnnngggcggccgttctaaagtatccctcgaaggggcccaagcttacgcttacccagttttcttgtccaaggtggtccctatagtgagtcgatattataacgctaggcactggcccgtcgtttaaccaacgtcgcgactgggacacacctnnnnnnnnnnnnnnnnnnnnnnnnnnnnnnnnnnnnnnnnnnnnnnnnnnnnnnnnnnnnnnnnnnnnnnnnnnnnnnnnnnnnnnnnnnnnnnnncttttcacacttttcacgcgcactactgtgtaaaccctagctcgacataattcgctgcgcgcggctggacacaggttgggcgttcctggagtactgattctatgaaacaacttttctttcccccgggaccaccgtgcaataacgcgcactcaccccacccacactgagtctaccccacacgccaccgatctactcacaacaccacaacacctcacatctcgatccactcaactcatcatacatcctcaacgctcctatcaaccagcagccgccgatcactatctgcgacccgcacaccgagcacccaccaccctcatccctcatcccacctaactaccactactctcctgc

SEQ ID NO: 355567 - DNA, 452 bp, Homo Sapiens
  misc_feature (46)..(46): n is a, c, g, or t
gggaccctggccctgccaatgcaatgcctgccaaacttaacccctncctaaggcccccaaactcagccaacctcccaaacaattaaagacttgcaaagcattgcattttgattaaaccttgctgggctaaagggcaggcaaagctgtggtggacactggcagggttgcctttaggaagcaggtgggaggctggcacgtgcaggcggtcccagcaggcaccaggcctggcagggcactggtgcctgtcgggttcccagccacaacaccccaagaaggctccaggagggccccggctgggtaaggcacggagttttggtttccgggcccagtcccagcctggcccccagaagagcctctcttggcagaatggcagcatgtcctgtggcctgggctctctcaactttgccttgggccctggctgaggccttactggatcacacacagtttcttcc

SEQ ID NO: 355568 - DNA, 720 bp, Homo Sapiens
gccactggtgtcaaaattctggagcaaagtatgtaagcaatgcttgtccagcaccaagtgctcatccaacttccagtgacaagtccccaaatgcttagggtcactcgtggtcaacaaaatgcattcaagaagctcgatagcttagaataaagggtctgtagaggctgatatcaagattaaggtaagctaaacaattccctttgttacactgagcatgatcattttatctaaggcagaagaaagaacccagacatctggtactccagaacataggtgcaaaaaattgtcttccatttcaaagttttttcaatacttccgagggaactaatgcaaccaccgttgagccttgctctccacctgatgcagcataaaattttctctcatttcttcaatataggaatgtcttgctgcagactatgtgtcttccgagttagcaagcaaatgcgtttaaaaggtcttagttgtgcaatgtccaaaactgaaatctgagaggcagtgttagaacttaagcaaggcagaatttttagagtctactcaaatgaaagcctaagtgaagcatataaaaattcagtcttttctattattttcaactggaattgatggcaacattccctggtaaggatgggtaactggtgttatctccaggtccaaaatatcccaactacttaaaggggacccaaaagaggagaaacacacacttgagttctgtggtctccagaa

SEQ ID NO: 355569 - DNA, 1527 bp, Homo Sapiens
  misc_feature (858)..(914): n is a, c, g, or t
  misc_feature (1143)..(1143): n is a, c, g, or t
  misc_feature (1156)..(1156): n is a, c, g, or t
  misc_feature (1160)..(1160): n is a, c, g, or t
  misc_feature (1272)..(1272): n is a, c, g, or t
  misc_feature (1402)..(1402): n is a, c, g, or t
gtgatagctgactctagaggatacacgaacccacagtaggggagaaactcattgcgtcactgaaatgtttagcttactttaatcttgatatcagcctctacagaccttttattctaagctatcgagcttcttgattgcatttggttgaccacgagtgaccctaaggcattgggggactgtccactgggagttggagtgagcacgtggtgctgcaacaggcattgttttacatactttgtctccagtattctgacaccaagtgtcaactgtggtactttcctttgccctaggatatgaattccataattgttgccttttgttgatggttgataccctttccattgatttaaacctaacacattatttctattccacatgcccagtagacatatattccaaagccactggaccacttgagtacataagtgccactgtttaatgcaatatgtatattcaggtctgtaaagctaacagtgtgacttggagtgcttcctgcagatgattctgacttgagtatttacatggaccatggtgatatccaaaagaaaaatgctttttatatttatagattatttcattgaactatatatgaaatgggtatcaataaatgtatttactccaaacgaagagtgcgcgcaaaccaccggtgcacatacccatcccaaaactctgccagaaacctaccaaaaaacaagaagcacgcggactcccgctcccacaccactcgaaagccttgccgagtgatcaggcgagaacaccgagcgcccgtcccgtcctctgcgaaccaccgcccccaaccgtgtgccctctccaaccacccctgttccgccggcccctcctgcattccgccttcgtcgnnnnnnnnnnnnnnnnnnnnnnnnnnnnnnnnnnnnnnnnnnnnnnnnnnnnnnnnntccgccgttaccttcatttggaagacctttccccgcacgcgccgatctcacgtcgttttattccgcgtcccgataccgctaaccggccgtcgcccgccccgtttgccgtaccaccccacctctccatttttccacctatgattgcgcgcgtattgcgggtcgccgcgctggtcgcccgccgattcgtggacagccgcgccgcgtgcgcgtttaaggcgcgcgcgccgtntcgttccgcgctntctntaccgcgtaggcccccctcgtactcctcgcgcggagactctagtgtgtccgttatgccgccgccgttctcttatacccacccgtgttgtccacgctgttcgccatcactcgnttggatcacgccctatattataccgggcgcggacgcgcgcctagatccgcgcattcgcgcctattattcatccgcgccgcgcgcagaatatataccgcgattattgtccactatttatgcactatgcggngcatgagatacgcgccagtacacacgctcagttatggcgccgcgcgatatctgttctcgcgccggcaccgctatttatttcccgcccactattttcgcgcccgtaccccgcgcccggtacttccc

SEQ ID NO: 355570 - DNA, 422 bp, Homo Sapiens
gacctgttaagagtattctgtaagtcaacccaatgatacacatcatgttcctgtccacatactggttttccccaaatcagctgataaattcagtgtaattccaatgagattgaaactttggaatttgacagttcctaaagtgcatttggcagagtgaatgtgtgagaacactaagaccactctgaacgatgataatgagttggggggtggactgctcgggggtgatcctgccagattcccagaggattctcacgccaccattacctcactcagtgtgacctggagggggtcagacagacgggagagtccagaaacagacccagggctacaggaatttagtatatggtaagagggatgttttaagtggggaaaaaggtggattatttaataaacagcacttttagacaactagctatcaaagc

SEQ ID NO: 355571 - DNA, 831 bp, Homo Sapiens
  misc_feature (52)..(88): n is a, c, g, or t
agacctgatcgactcactatagggcgacctggattaaccgcggtggcggcgnnnnnnnnnnnnnnnnnnnnnnnnnnnnnnnnnnnnnatcaggccaaatcggccgagctcgaattcgtcgagagcggatggggtactgcctggggcagtcagcttgcgctacagcggggccactgcagcctcagagacactgtcaggccatgggccactggcccagcctttgacactgcaagtcctagtggctggcaacccccaggacacacgcctccgatacagcttcttcgtgccccggccgaccccttcaacgccacgccccactccccaggactggctgcaccgaagagcacagattctggagatccttcggcggcgcccctgggcgggcaggaaataacctcactatcccggctgccctttctgggcaccggggcctcggacttagctgggagaaagagagagcttctgttgctgcctcatgctaagactcaagtgggaaggggctgtgggcgtgagacctgcccctcctctctgccctaatgcgcaggctggccctgccctggtttcctgccctgggaggcagtgatgggttagtggatggaaggggctgacagacagccctccatctaaactgccccctctgccctgcgggtcacaggagggagggggaaggcagggagggcctgggccccagttgtatttatttagtatttattcacttttatttagcaccagggaaggggacaaggactagggtcctggggaacctgaaccctgacccctcatagccctcaccctggggctaggaaatccagggtggtggtgataggtatc

SEQ ID NO: 355572 - DNA, 511 bp, Homo Sapiens
gggacccagtccctctctctttccctccccttcccagacttttgccccggctctgctggccaagtcgtgggtcctcctctgtcccttcattgcatggcacagctcactttggcccttctccacccgtcccaaccccattgctaacaacatggtacattccggccccaccactcagagccttccgaagccaacacttgtccccaccctggccctgcgtccttccctctccagctggttaagagggatttagaattccctttctctttttttagtgcatcgtccatgccaaagtgtgcggcccttcctgacatcaccacagtctgagcagcctcccgcgtcctgcagggtagtccgccccctcctccccaccatcctccctacctccttaactttgtactagactggcctgggcctgcccagctcagcgttatcagtctgtttcatattatttattattttaattttctattaaattattgaaataaagttaagttgagaaactgaaaaaaaa

SEQ ID NO: 355573 - DNA, 593 bp, Homo Sapiens
cctggtgtagagcacaagcctctcccaccctagagaaatgcctctgtaccacggctaccatgtggaaccttaacttgcagaaggcttgttaacaattgttttgagagagatggctggtcatgccacagctgctggggactccgcctactccagccctcttgggacacactgtgggatttgtggcccttccccagaggaattgtggagactgtcccatggaacaaaccctcaggcaccagcacagggctctgggtgactcagtaaaactaacgtttgtctctgacaagatcagctgtaggctcaccggccagagaagaccactgtgagcattttgccgtatatcctgccctgccatttgttcactttttaaactaaaataggaacatccgacacacaccgtttgcatcgtcttctcccttgatattttaagcattttcccatgtcatgagtttctcagaaacatgtttttaacaattgtactatttagtcattgtccatttactataatttatctgaccatttccctactgtaaaatacttaagacggtttttgatttttccactatttaaataatgctgtgatgaatatcttt

SEQ ID NO: 355574 - DNA, 396 bp, Homo Sapiens
aggaggcaggcattaagaaacatttaaggaccaatacacagtctaaggccaaatgaacttgtgaagcctactgattttggaaaaaatcttcattttggtgggtaacttgaattattaatataaaataaaattaaggcatacagagaaaaggcactactaaaaattaacaattggattgcttttcattaacatttaaccaatcttaaaattcaaataaatatgaacattacatttgtaaaacaaaggccaaacttagtaataaaacagtatgatctcaaggaactgtcctgatcttagtataaataacactgttgacagagttcaatttctatcaaatgttttgggtattttcacaatttagaccaaaataaagtatgttttctttaaaagagacac

SEQ ID NO: 355575 - DNA, 1109 bp, Homo Sapiens
agaaagccaggtgggttccaagggaaagttgggttgcccacggattaagcccccccggtgcttttttggctttaattaacgtggccaagggagaaaattccaaaattaaggtagttttcgaattctgttttgtggcagatggtggggcttctggagttccagccctcgggggccctgattcccaggggtccaagcccaccttcattttttgagtcagggttgggcagccacttgtgtcctgagaaggtgccagaagccctgaagcccaggcaaggggaacgggcagtgcctgtgcctcgggggtacctccagcatggcctggagcacatccagccatccccttccccccaaactccagcccttctcagaggggctctgggggtcattcaagggggacttctagcttctctctggaaccctttgtccagagcaaagccaggtttccaaggtccccacggcaaggctgttgggtgctggcagcaagaggtacacagcagttctcccagctcacagcagtgacctcagatctccagcagcaagggccgcactctcgtgcccacaagggccttgcagaaatgctccggtccctgggcctcccccggcaggaggggcggggctcctgcctgcagtgaggccacagcactaagcggcttcagtcacatgcttttcaggtgaatcactccaaattcagtgaggagggccacgacaaggaagttcaggtagaagaggagcaggcagaagccatagactctgctgagctggaagcactgcaatgggactgagaccagggagaagacgaggctgagccccagggcgcctgccaggacccacaccagcagtccgtctggctccagcttcacttctgtgtggcttcgggagatctggagcaggcagcccagccccacacccacgaggatgttgaagatgatgccgccaaagcaggcggagaacgccatccgtgggtagccctggcgagccagtgtgaaatccgagaaggcatctccaatgctgttcccccaggccagcagcgtgagccccagcacagtgttgctcagccggaagaccacacccagggaccgcaagatgttcaccacctctgtggcggccgc

SEQ ID NO: 355576 - DNA, 1362 bp, Homo Sapiens
tcatgtggtctggaggagctcctgggagttgggcctcaggtaaggagagccgtgctgggtttgggggtggcatggagtcagggtggacagggctcctgtgtcctgagtctacaatgctgtgcctacaggtggaggagttctctgtggagccacccctggatgaactgtctctggattaggcacagtttgtcttgggcccctgctgctgttccgtggactccgctggccccaggcctgaagttgaggaggaaaatggggaggaagttttcctgagtgcctatgatgacctaagtccccttctgggacctaaaaccccaatctggaagggttcagggagtctggagggagaggcagcaggatgtggaaggcaggctctgggacaggctggggaagagcaggcatgctgcgaaattggggaggacaagcaggctgagactggaggcaggctagacatcagggaagaggcagagggaagtccagagaccaaggtggaggctggaaaggccagtgaggatagaggggaggctgggggaagccaagagacaaaagtcagattgagagaagggagtagggaagagaccagagggctggagggtactatttagaagaggacaccctctctgaaggttcaggtgtagcgtccctggaggttgactgtgccaaagagggcaatcctcactcttctgagatggaagaggtagccccacagccacctcagccagaggagatggagcctgaggggcagcccagtccagacggctgtctatgcccctgttctcttggcctgggtggcgtgggcatgcgtctagcttccactctggttcaggtccaacaggtccgctctgtgcctgtggtgccccccaagccacagtttgccaagatgcccagtgcaatgtgtagcaagattcatgtggcacctgcaaatccatgcccgaggcctggccggcttgatgggactcctggagaaagggcttgggggtcccgagcttctcgatcctcttggaggaatgggggtagtctttcctttgatgctgctgtggccctagcccgggaccgccaaaggactgaggctcaaggagttcggcgaacccagacctgtactgagggtggggattactgcctcatccccagaacctccccttgtagcatgatctctgcccattctcctcggccccttagctgcctggagctcccatctgaaggtgcagaaaggtctggatcccggagtcgtcttagtctgccccccagagaaccccaggttcctgaccccctgttgtcctctcagcgcaggtcatatgcattttgaacacaagctaacccctggggaaaagtgaaaggactggtgattagggacccacagcc

SEQ ID NO: 355577 - DNA, 853 bp, Homo Sapiens
ggagacaaagcatgcctctgtgtataaaccactatggaactggtacacaacagttgaggaaaataattctattcttgaggcagtaataaagtcaacatacattttgagtccaacaaggcttctaaataataaatttaaagacttcccatttgaaactgtgaatagaccacagcttagaaagagcttaaaaaattttagttttaaatgtcctcatgtttaattcttggtaatattgacagggtggatcattcttaccatgatataaatttcgtcagtgattcatctagattctccaaataagagaaaattaaagttgttctgtccctgtttaggattatatctctacattcctacaccagcaacatagagaagttacattgagaacccaaataggtaaattttagaaggatatataatcaatttccccaattcacgtaatgcagattttaaaaaatacagacaagtgaaggatatagctttactaaggtctagttggactgttccagtaggatcttccagaaaaaattttccctcttttaactgcgttatcattccaagaacaatcgcatctccgattttggttgtactacccaataaggtttctattgttttaagctggaatttgcttccgctttcatcagggtgagaacctatcaccggaggagtaaataattcatgcctgtgggtcctctataaaaagaaagattcacatgaattcctgaaacagacatttaaatataagattcattaaaataatgccctgatgaaacactgtccttaaactaatgtcactattacttattctccacaaatttgaaaacccacataatttaacatacaaatatctagtaat

SEQ ID NO: 355578 - DNA, 3594 bp, Homo Sapiens
ggctggtacggtctgggatgtagggatcgacagctggggaataacctgtcccgcccatccctagcctcgagccgcgcaggctccgcgcctccgcccttggttccctcccagctcctccgagtggaagccgctacaaatggcttgaatgaaacgtgtgtgggtttagtgagtggtgaaccaccagggatcccgtctccccacaaaccagtatctctccgaggaggaggcgaaggagtgggaggaggcaacgagccgagagtcgagcttcgcgggcgcgcgcagcggctggagcgcgggggcgaggccgggccacctccccttcccggccgcgcactgcctggcccgcggcggttccaggcaccacccttcccgtccgggctgagcccgctgtggcagtgactagctcccgcggctagcggcactgtccaccgacgagcggcgccctcttctcccccttctccccacgatttccttctctgcggcggcacgccgtccagcagcctgcttcgccccgtcgtcaactttgagctggaggagaagcaactttggcagtggccgcggggttggaatcccgcttctcctcggcagcagtaggctcgcaagtcgctggggttaggtggggcaagagtttcgccggcgcatcagcgctgcttcggactgtttgcaacgtgtttccagcgagctgggagcggggttgtgactgcgagtcgtctgggggagggggacttgtttttcttttcctctagagacctcggcttgcaactggatcaaacgctgtcgaaaggatgtaaataggcagagcaactgttaccaagaaggccaccacccccacccaaaggcagtgaggagtgtggggcttcgtctgggctcccccgagtctcaacagtaatcaacagtcaggtgttgattgcaacttttcaaggtcagccaccgggagtagcctattccctctaggaaccttggagggcataccttgctgggactcaacttggctgagaaatgcacaagatgccaaaggaggaaggattatagggggcgtgtgtgtgacccccaagaccgatcttccgctatcaccctaatctccggttccccgctacccgggcgggggtgagtatgtgacatgtgcctaactctcagcagcaacttcggcagcaggtgtcgatcctaactaagcaggagctgcggctgccgggtgtgccctcaccaagccatgcgagccccgggcgcgcttctcgcccgcatgtcgcggctactgcttctgctactgctcaaggtgtctgcctcttctgccctcggggtcgcccctgcgtccagaaacgaaacttgtctgggggagagctgtgcacctacagtgatccagcgccgcggcagggacgcctggggaccgggaaattctgcaagagacgttctgcgagcccgagcacccagggaggagcagggggcagcgtttcttgcgggaccctcctgggacctgccggcggccccgggccgtgacccggctgcaggcagaggggcggaggcgtcggcagccggacccccgggacctccaaccaggccacctggcccctggaggtggaaaggtgctcggggtcaggagccttctgaaactttggggagagggaaccccacggccctccagctcttccttcagatctcagaggaggaagagaagggtcccagaggcgctggcatttccgggcgtagccatggagcagagtgtgaagacagtccccggagccagcgatcttttttactggccaaggagagccgggaaactccagggttcccaccacaagcccctgtccaagacggccaatggactggctggggcacgaagggtggacaattgcactcccgtggccgggctgctggcccagaatggatccttggggtgaaggaatccatgagcctggggtgtccccgccggggaaacagcacgaaacggcgtgtgagacttgaagaaccccttctaaccgctgaaccaggagtcctatgtgaggcctacgcgggtcatgtgtctggtccgtgggtgatcttcgggaccggcatcattgggcaacactgggcggtgatgtgcatcgttgtgccacaactactacatgcggaagcatttccaatcccctcttggccaacctggccttctgggactttctcatcatcttcttctgccttccgctggtcatcttccacgagctgaccaagaagtggctgctggaggacttctcctgcaagatcgtgccctatatagaggtcgcttctctgggagtcaccaccttcaccttatgtgctctgtgcatagaccgcttccgtgctgccaccaacgtacagatgtactacgaaatgatcgaaaactgttcctcaacaactgccaaacttgctgttatatgggtgggagctctattgttagcacttccagaagttgttctccgccagctgagcaaggaggatttggggtttagtggccgagctccggcagaaaggtgcattattaagatctctcctgatttaccagacaccatctatgttctagccctcacctacgacagtgcgagactgtggtggtattttggctgttacttttgtttgcccacgcttttcaccatcacctgctctctagtgactgcgaggaaaatccgcaaagcagagaaagcctgtacccgagggaataaacggcagattcaactagagagtcagatgaactgtacagtagtggcactgaccattttatatggattttgcattattcctgaaaatatctgcaacattgttactgcctacatggctacaggggtttcacagcagacaatggacctccttaatatcatcagccagttccttttgttctttaagtcctgtgtcaccccagtcctccttttctgtctctgcaaacccttcagtcgggccttcatggagtgctgctgctgttgctgtgaggaatgcattcagaagtcttcaacggtgaccagtgatgacaatgacaacgagtacaccacggaactcgaactctcgcctttcagtaccatacgccgtgaaatgtccacttttgcttctgtcggaactcattgctgaaggacagtactggttgggtcagatttatatgtttgattttcatatcccgtgaaagtttttaattcatatttttccttatagggaaaaatgcaaaaaagaaacaataaagaaagaaatattaactactgtagaactgattttacaaattaatatttgtgctttgaaaaaaagtttctatttagttatttaagaagaatgagaaggccaatagttttagattattttatctggtatggtgctaatattttatttgaaaaaagttactgcaacttaacttaaaattgctaacgttttttcttcttttaaaaatacaattattgtatattgattatagcaatgtgattttgtaggttattttatatttgagttgtgattgaaagtatgttgtatatggtattgtgagatgatttgtacttggaagcattcacaaagtagcaccaaataaattacactttattctttaatgtcattgtcaatctacttttaaccaatattcaataaatcttctaattgccttaaagatac

SEQ ID NO: 355579 - DNA, 354 bp, Homo Sapiens
ggggctccgtggagtaatgatttccacatcagcatttgctcttttgagatttgtcagagagctagcatctctgtggtttcggttgagaatgccttctgtatgagcaattccatcactgctgctacccatttttagcagataaaaagtcggttgggatcttgattgaggtctgtcaagagacctgagggcgtctctgtgctgaaacatactctcatcactgggcaggaaattccccacagcatacaagcccaagtacagtgcaattcctcctcctattaaaaagccacaatagacatcaactgggtggttcttatactgagttatccgtgttagcccgcagattattccacagat

SEQ ID NO: 355580 - DNA, 442 bp, Homo Sapiens
  misc_feature (24)..(24): n is a, c, g, or t
tggttcaaagtctaggccctcttnagagctggctgattcagcttgccaacagtgacatcagggtgaggcttcctctgtccacagcattagctgcgaatatcctcatggtcacaagatggctgccagtggccgtcagggtgtgtgcttccttgttcacatccagtggaagagtgacagcctgctccccttagctctctgacaccaatgagaaggtgccaagaacttactagcaggcctttcctcatgacccattcaacaggattgggtcacgtgcctattcctgaaccactaattgggaagggatgggattactcttagaccagtggttctcaactgagcatgagtttgtcttccaggtgacagttggccatgtttggagacatttatggttgtcacaactggggtgatgctactggcatctcatgggtagaggccagggatc

SEQ ID NO: 355581 - DNA, 1297 bp, Homo Sapiens
  misc_feature (435)..(435): n is a, c, g, or t
  misc_feature (889)..(914): n is a, c, g, or t
ggctggtacggtccggaatttccgggatatcgtcaacccacgcgtccggtcctttctatggtgacaaaatgaatttatactcactgtgtaagaagatagaacagtgtgactacccacctcttccttcagatcactattcagaagaactccgacagttagttaatatgtgcatcaacccagatccagagaagcgaccagacgtcacctatgtttatgacgtagcaaagaggatgcatgcatgcactgcaagcagctaaacatgcaagatcatgaagagtgtaaccaaagtaattgaaagtattttgtgcaagtcatacctccccatttatgtctggtgttaagattaatatttcagagctagtgtgctttgaatccttaaccagttttcatataagcttcattttgtaccagtcacctaaatcacctccttgcaanccccaaatgactttggaataactgaattgcatgttaggacgagaaaatgaaacatgatggttttgaatggctaaaggtttatagaatttcttacagttttctgctgataaattgtgtctagatagactgtcagtgccaaatattgaaggtgcagcttggccacacatcagaatagactcatacctgagaaaaagtatctgaacatgtgacttgtttcttttttagtaatttatggacattgagatgaacacaattgtgaacttttgtgaagattttatttttaaacgtttgaagtactagttttagttcttagcagagtagttttcaaatatgattcttatgataaatgtagacacaaactatgagaaacatttagaactctagcttatacattcaaaatgtaactattaaatgtgaagatttggggacaaaatgtgagtcagacactgaagannnnnnnnnnnnnnnnnnnnnnnnnngatattctctttgcattgaaatggtataaatgaatccattttaaaagtggttaaagttgcacattgcccaaggctttttttgtgtggttttattgttgtttgtacatttgaaaaaatattctttgaataacctttgcagaactatatttccaatttctttaatagactttaagtggcatttttaactcattaattggtacaattaataatataagcccctaagttttttatttcataaggtttttatttgaagtttctggattggggtccccctttcaaaaaaattttttttgaaacataattccttgccagggttaacactttccttaaatttaaaaaacggggaatggggggcattttttttcttcccccctttaaaagga

SEQ ID NO: 355582 - DNA, 1089 bp, Homo Sapiens
  misc_feature (561)..(581): n is a, c, g, or t
  misc_feature (653)..(661): n is a, c, g, or t
  misc_feature (997)..(997): n is a, c, g, or t
  misc_feature (1002)..(1037): n is a, c, g, or t
caggaccaggagaagatcctggaagatgcagtggatgagtggacgggctttaacaacaaggttaaaaaggccactgagattgttttagaaaaccaacagcaaaacactgacaaggtacataaatacagattggacattttagggtaaattcactgtatttcctacttgcttgtaggaaaccgagtaaagtggaaaagctgtcctgatcatatggcatgcacaccagactgcaaaaggacgtccacactatttaacaggactgtggcaaaatagctttaaagtaaggcgagcattgtgtatggcccaagcataccctgtaggaagagcaaagctaggctcacctctcagagactgtgtctcagaaagaggcttcctttcttgcctatgttcttccatgaaattcgtcattggcaggtgcttttccagggagatgcctgtgctctccctgtgcagactctgtgcacaaggaagtggctttagagagtgtgttttctgatgcctcctttatattctaaatgtataactagtaaaacaacaattactaccgcttggtgaaattgnnnnnnnnnnnnnnnnnnnnnctgaaaagctgcctctgactccaccctgtacactgactaagcagggcccttaaaaaacttataaaaagttgnnnnnnnnnggttttcaaattaaaaacatgaaaattacaccaaaaagatggaactacttttgtagcacaactcagaacttctgttcgtaacaccggactagagaagaggtcgcttttggctgaatctaatgaccttagaagggaaaggccattgctgggcaggatctggtggcaacgcacacggaagtcctagaactctatgaagcctacctcaggccctgcgggtgcgtctggagttccaaggcatttggggaaccaaagcaatttcagctaacagtgaccagtttttagaatggagcttatgatcagaggaccataaaccctcatccaccctagagctcaatngccannnnnnnnnnnnnnnnnnnnnnnnnnnnnnnnnnnngctttttgttgctatatcagaatgctggcaggtagacaattcagtaacctgt

SEQ ID NO: 355583 - DNA, 417 bp, Homo Sapiens
  misc_feature (41)..(41): n is a, c, g, or t
accttggttacttagcaaatactggacataacccttaaagnggttacttttgaaacctcctcatgctatcctaccaactgggaggcacctatcccatgctcattcccctaatgtaaccaagtatggttatctgcaatgtattggcatctaccaaaactccctatatgaaactgccagactatgtcctggaacatttcaattacatgcaaaatccaggttctacaagttggaacaagtctaattgacacacctgcataggtttaaaccttgccctccccctacttcccaacagatttccaagtttttctgagacggaaccttgctctaggcccaggctggaagtgcaatggcgccaatctcgattcactagcaacctactgcctcctgggtaacaagtagattcctccagacctccta

SEQ ID NO: 355584 - DNA, 532 bp, Homo Sapiens
cccaactaaaatgtcttaccagtaaagtattattaaaagcctcatttgtggagattcgctgacttccttggttaagctgtcttgtatttacttaatttgtcccctcaaccaggtgttttcttttcagcctgttactgtcctgtgccatttttaaaaatagccatcatgagtaagggcttctttaaaataatccctgacaatatctttggcattaatacgacataaagacaagacagtatatgtatgttttcattcctgttttgtacgagtgcctcattttgtagtcatgaaagtaacatagtaccttaaataaaaatgtaatgactaatctaaggtctaggaataactattgtagaagctaagtagaacacttagtttggggtgtcaattttctatcaacgcaaacaccttagggtacccagaccaattttatgtatatatattctgaaatgctccctttttaatgtggtcatttgttgccttctaagttgagaggacaaaactgaataaagtgaatgttaattgtagtcta

SEQ ID NO: 355585 - DNA, 3064 bp, Homo Sapiens
  misc_feature (1957)..(2007): n is a, c, g, or t
  misc_feature (2012)..(2012): n is a, c, g, or t
  misc_feature (2062)..(2062): n is a, c, g, or t
  misc_feature (2778)..(2780): n is a, c, g, or t
  misc_feature (2792)..(2792): n is a, c, g, or t
  misc_feature (2799)..(2799): n is a, c, g, or t
  misc_feature (2807)..(2807): n is a, c, g, or t
  misc_feature (2809)..(2809): n is a, c, g, or t
  misc_feature (2860)..(2869): n is a, c, g, or t
  misc_feature (2872)..(2872): n is a, c, g, or t
  misc_feature (2877)..(2877): n is a, c, g, or t
  misc_feature (2900)..(2900): n is a, c, g, or t
  misc_feature (2904)..(2909): n is a, c, g, or t
  misc_feature (2911)..(2912): n is a, c, g, or t
tcggcctgtgccgccgccgacgccgcttgtgggcccgactccgctctgtctgcttcgccaccttctccccgagcactgcccggccggccgccatggctaacgtggctgacacgaagctgtacgacatcctgggcgtcccgcccggcgccagcgagaacgagctgaagaaggcatacagaaagttagccaaggaatatcatcctgataagaatccaaatgcaggagacaaaattaaatggattctggattcctgtagcttctccccactcttctacttgaaaatgcaattatttttatttttaccttttctttatagtttaaagaaataagttttgcatatgaagtactatcaaatcctgagaagcgtgagtgatatgacagatacggagagcaaggtcttcgggaaggcagcggcggaggtggtggcatggatgatattttctctcacatttttggtgggggattgttcggcttcatgggcaatcagagtagaagtcgaaatggcagaagaagaggagaggacatgatgcatccactcaaagtatctttagaagatctgtataatggcaagacaaccaaactacaacttagcaagaatgtgctctgtagtgcatgcagtggccaaggcggaaagtctggagctgtccaaaagtgtagtgcttgtcgaggtcgaggtgtgcgcatcatgatcagacagctggctccagggatggtacaacagatgcagtctgtgtgctctgattgtaatggagaaggagaggtaattaatgaaaaagaccgctgtaaaaaatgtgaagggaagaaggtgatttaagaagtcaagattcttgaagtccacgtagacaaaggcatgaaacatggacagagaattacattcactggggaagcagaccaggccccaggagtggaacccggagacattgttcttttgctacaggagaaagaacatgaggtatttcagagagatgggaatgatttgcacatgacatataaaataggacttgttgaagctctatgtggatttcagttcacatttaagcaccttgatggacgtcagattgtggtgaaatacccccctggcaaagtaattgaaccagggtgtgttcgtgtagttcgaggtgaagggatgccgcagtatcgtaatccctttgaaaaaggtgatctttacataaagtttgatgtgcagtttcctgaaaacaactggatcaacccagacaagctttctgaactagaagatcttctgccatctagaccggaagttcctaacataattggagaaacagaggaggtagagcttcaggaatttgatagcactcgaggctcaggaggtggtcagaggcgtgaagcctattaatgatagctctgatgaagaaagcagcagccatcatggacctggagtgcagtgtgcccatcagtaaactctgcaaacaaattgcacaggtggattttctttccacatttgcctgatttgttctcagcaatccagctggagtgtcttatcaatccagatgaactgagggacatctgttggtctatgtataacttttaaaattggtatagtatctacagagtgtataatttaaactaaccacaaagctttacatcttcattttgactgttccatagcagaataaagcacttgaaaggaaacaagactccctttcacacatggattattataagtttcaatcctggtatctgtgcttgatttttatcagttttgtgtagatttttatgtttcatattttaaatttaaatcccacattgtaaagtttgtacaatttgtcctgaagctttgtgtttggctgcacctgcataagctgctacaaatagaataaagaatttcatagcctgtatctatcatttagatgcatggaaaaaaatgggctttgcacacaatgggtttggagctgactgggaacaatggaaaaaattacattagctgtggttgtaaagnnnnnnnnnnnnnnnnnnnnnnnnnnnnnnnnnnnnnnnnnnnnnnnnnnnaccancttgtgaaaggtttctgaaactcgataataaaaagcggttggcgtaaatnattcttttgtgtcacatttttagaaggaaaaacataaaagaatgtatccttagtactggttcttaaacagcccataaaaacccattggcctgaagcttatatctcaggcctatgcccatcttatagtcttggaagacaaaaggctggtagagacagtcttcagtggcttcagtgatgctctgtagaggccagggtgtcttgagtgctgtaactcccaagcactgggctagcctgacttctgtatctccctaccaccacccccttaaaaaaataaggtaacagcaaatctatagtaaaaccatgtctgcatagaacgtgttcaaatcctctgttttcattaaatgtaaaagatgctgtctccattaagttgaatatttggaattggagaagccattgattattattttgagtttctgtaatgttttatagaaaagtaagatgcttattcagaatttaagaatgaaggcaactgaaatatgcattgttgtagttatttatatttcaaactaaaaataagcaaaaacaaacaggctggtttcgagaaacaatcaggtaaaattgatgaaacggatgtcgtgtttctctttccatcatctggtttttaccatttcactcagtaggtatttttagaacacacttatttgaggaaagagacatcagatgcacaattttacatttataaaggaacaaatggggaaaactgaaaactaaaaatnnnaaatgtattaantgccatncctgagcntnaatctagtatttgtagtttatttctaggtctgctagaacctgaaaacctgnnnnnnnnnnggngtgcngacactaatcaagtcctgtcgcngcgnnnnnntnnttgacctatccactctacctccattgtacaaaaaatattttacaacaagcctgggtaagattcaacagcatagtagttttgtatccaaggttacttccccacaaccactttaaacataagaaatgtggtggcaatataaagtttgtagcctt

SEQ ID NO: 355586 - DNA, 1087 bp, Homo Sapiens
  misc_feature (42)..(78): n is a, c, g, or t
  misc_feature (1020)..(1020): n is a, c, g, or t
  misc_feature (1032)..(1032): n is a, c, g, or t
  misc_feature (1044)..(1044): n is a, c, g, or t
gtaagatcatatggggacatggatttcaccgcggtggggcgnnnnnnnnnnnnnnnnnnnnnnnnnnnnnnnnnnnnnatcaggccaaatcggccgagctcgaattcgtcgagagcggaaagttcagccccgcccccgcttccccctcgctgtctccctcggcctgtgccgccgccgacgccgcttgtgggcccgactccgctctgtctgcttcgccaccttctccccgagcactgcccggccggccgccatggctaacgtggctgacacgaagctgtacgacatcctgggcgtcccgcccggcgccagcgagaacgagctgaagaaggcatacagaaagttagccaaggaatatcatcctgataagaatccaaatgcaggagacaaatttaaagaaataagttttgcatatgaagtactatcaaatcctgagaagcgtgagttatatgacagatacggagagcaaggtcttcgggaaggcagcggcggaggtggtggcatggatgatattttctctcacatttttggtgggggattgttcggcttcatgggcaatcagagtagaagtcgaaatggcagaagaagaggagaggacatgatgcatccactcaaagtatctttagaagatctgtataatggcaagacaaccaaactacaacttagcaagaatgtgctctgtagtgcatgcagtggccaaggcggaaagtctggagctgtccaaaagtgtagtgcttgtcgaggtcgaggtgtgcgcatcatgatcagacagctggctccagggatggtacaacagatgcagtctgtgtgctctgattgtaatggagaaggagaggtaattaatgaaaaagaccgctgtaaaaaatgtgaagggaagaaggtgattaaagaagtcaagattcttgaagtccacgtagacaaaggcatgaaacatggacagagaattacattcactggggaagcagaccaggcccccaggagtgggaaccccggagacattggttctttttggctacagggagnaaagaaacatgnagggtattttcnagagaagaatggggaaatggatttttgcaacctggacaatata

SEQ ID NO: 355587 - DNA, 425 bp, Homo Sapiens
  misc_feature (363)..(372): n is a, c, g, or t
gcgtggtcgcggccgaggtacaatggaggtagagtggataggtcaataatttaaacctcacaggacttgattagtgtcagcacaccttttttcattcaggttttcaggttctagcagacctagaaataaactacaaatactagatttaggctcagggatggcatttaatacatttaaaatttttagttttcagttttccccatttgttcctttataaatgtaaaattgtgcatctgatgtctctttcctcaaataagtgtgttctaaaaatacctactgagtgaaatggtaaaaaccagatgatggaaagagaaacacaacatccgtttcatcaattttacctgatttttctcaaaccagccnnnnnnnnnngcttatttttagtttgaaatataaataactacaacaatgcatatttcagttgc

SEQ ID NO: 355588 - DNA, 839 bp, Homo Sapiens
  misc_feature (743)..(783): n is a, c, g, or t
gtggaaaaacaaactggatttaaacttcctaaaattaattccccttataatggaaaaaggttttcccccttttttgtgtttcacggttaggccccattggaaagtttggttttaaaatgattaacttagggggggaggggttttccctaaaaccgttaaagttttggggtgtgaaaaaataaaaacccctttggttgaggtttcttttttattcaatttttaaaaaatttaaggccccaaccggcataaaagatgtggaaaaagactttaatggccatggtttaaatgcaaattttgcacctgacatttaggttgaattttgagcttacttgggttttttaactagaaaaacaaccctgatatgtatgtgtgtgaaggcgaagggttaaaagttgttttaataactgtgcgacctagtccaaaaagaaaaatttatcaagtgacacgagtctcaagtatttactcgtataccaagtatcctgcaccaatcaatagcacacaatcatcaatatttgccatttctaacaatcagagaatcatctccattagaacagaaatcctcaaatcatttcacttttgctttttgctctgaaacttgcaaacagacttctctccccctttcttgacaagaatgtgtttctgtccattatttcaatctaatactgtgtaaaagctatcagcttcttcaaggaggtgcccactgtaggcaggatattccagcaacacttaaaagttttctgggnnnnnnnnnnnnnnnnnnnnnnnnnnnnnnnnnnnnnnnnnacacaattgatttaaatccatgtcattttactttatatgtactggtatctcatctg

SEQ ID NO: 355589 - DNA, 879 bp, Homo Sapiens
gacggagaccgagctgtcctggggggtgtacaccaaggagtctctgtactcattcgcactcaaatgcctcatcagcctctccacggccatcctgctgggtctcgttgtcctctaccatgcccgggagatcagctgttcatggtggacaacggggctgatgactggcgcatcgccatgacctgcgagcgcgtgttcctcatctcgctagagctggcagtgtgcgccattcacccggtgcccggccactaccgcttcacgtggacggcgcggctggccttcacgtacgcgccctcggtggccgaggccgacgtggacgtgctgctgtccatccccatgttcctgcgcctctacctgctgggccgggtgatgctactgcacagcaaaatcttcacggacgcctcgagccgcagcatcggggccctcaacaagatcaccttcaacacgcgcttcgtcatgaagacactcatgaccatctgccccggcaccgtgctgctggtcttcagcatctcctcctggatcatcgcagcctggaccgtgcgcgtctgcgagaggtaccacgacaagcaggaagtgaccagcaacttcctgggggccatgtggctgatttccatcaccttcctctccattggctacggcgacatggtgccccacacctactgcgggaagggtgtgtgcctgctcactggcatcatgggagctggctgtaccgcgctcgtggtggctgtggtggctcgcaagctggagctcaccaaggctgagaagcacgtgcacaacttcatgatggacactcagctcaccaagcgggtaaaaaacgaggctgctaacgttctcagggagacgttggctcatctacaaacataccagagctggtgaaagaag

SEQ ID NO: 355590 - DNA, 1006 bp, Homo Sapiens
gtccaatccaaagccagtctctcaagttgtatggctcaaagagcagtgaccacaatgggtcatacagtagggacccacctccacaaattagaaccagagttcagactccattgggcacatctgggaggaaggcaacctcctttgtcgtcttgttggtaccagtcattctcaagtatctctgacacctgtggtggttcagtttgctgagcctgccacctggtatgaattaaattgggtgtgatgaacattcatccatggatataccctaccattttgcgttgccttataaccaaggcacactccccataagagtttactgcagagaaagaacagcaaacagccaccctccttgaatttacaactcattatctgcaacaggttttctttaaatccaagacacaggatgggaaatgggtttccccaccaggtactcagaggtctgcaggaagtgactcccgggcaaggcagacttcagtaatccctgaagcgtgagcatgtggactgcatggctgggtggggactggtggatgtctctggagctccagaaccttggagaattcctcatggaattcccctcccagctcttagtgggctctgtggggtcaggaggagcccttcctccaggttttccttctttcctcctcagcagagaaactggagaaaggacattaaactcagtgcagtcgatttgagtgctgaaatatttccagaatcaatggtggtgctaaactatctccatgtttctagcatttttaatagtggagttggtttgtttttaatctcatcacaaaaatgcagtgcccttggggaagggaccagccccttggcctgccactttccaggtgtcctttatcactttgacgggactctttggtctgcagaaaatgctctgtcttggcatgcttctagactgtaagatttgggttttgttttgtattttatgtttacatgcatcttatatttccctgaaaactaaataaagttttgggcctttttaaccgaaaaa

SEQ ID NO: 355591 - DNA, 572 bp, Homo Sapiens
gcggccgcctcacccccaaggaccggcgcctggacacctggatctaccggagcagggcccgggccacgtcgggtgccctgaaggctgtggtggggtcaaagtgcacatccacaatggcgcggaaggatttgctcgggccccaagtcccgcaagcggacactccgaaaatccttcttgacgtctgaattccggaagaggtcgtccagggtgctctcaatgctcctggctgtctccccgaacagttctgacttggggtcagccatctcgggcgtgtagaacagctcctggccctcgacgccctccagctccaggacgccctggaacaccttggtggcggggcagttggagccctctgcgtccagcgagggcgtcttcccatcagagcagcagcccaacgcggagttgtagtaggaagccctctcgacaggtggcccaggggtggccacgctgctgccctccaagggctcgagccccccagagccacccgcactggcctgctggtccccgctcagttcctcatcgctgcttccatcagtgctgtcagattcaccaaaggcggacgccaccaggct

SEQ ID NO: 355592 - DNA, 696 bp, Homo Sapiens
tctaggagctccagactactcaaaaatccaaataccctaaacaggaaaaactggcagagaagcatgagcagtgtcacagaagacaaggaacgacagtgggtagatgattttcctctccaccgaagcgcctgtgaaggagattcagaattactaagccgtcttctcagtgaaagattttcagtcaaccagttagatagtgaccactgggcacccattcattatgcatgctggtatggaaaagttgaggccactcgcatattgttagagaaaggaaagtgcaatccaaaccttttaaatggacaacttagttctcctcttcattttgctgctggaggaggacatgctgaaatagtacagattctcctaaaccacccagaaacggatagacatataacagaccaacaaggaagatctccattaaatatttgtgaagaaaacaaacaaaacaactgggaagaagctgcaaaattgttgaaggaagcaattaacaaaccatatgaaaaagttcgaatatacagaatggatgggtcatatcgttctgttgaattgaagcatggaaataataccacagtgcagcagataatggaaggaatgcgtctctctcaagaaactcagcaatatttcactatatggatttgttcagcctcagccttcaactcaaaccatatcatcccttgccatgttcgtgactggccg

SEQ ID NO: 355593 - DNA, 388 bp, Homo Sapiens
  misc_feature (295)..(295): n is a, c, g, or t
gattgcaggcatgaaccactgcgcccagtcgagtggtaatatgttgaaaggaaacctttttctgagcaggtctcaaaagagaggttaaaatactgagtagaccatgctgtaaacagatgtgctgttattcgggctttcatattccatttataaagcacaggcagagctcagagtagatttaatgtaactctgaagggcactaggattttcagaatggtaaataagcattggcttcaacttaaattcaaatctgcattggcttgtaataagagactagcttgttactgaagctttnaagccagttgttttctcctatctagctaggaaagtcctagatggtatctacttccaataaaaggctgttctggccaggcgcggtggctcacgc

SEQ ID NO: 355594 - DNA, 1191 bp, Homo Sapiens
  misc_feature (24)..(24): n is a, c, g, or t
  misc_feature (43)..(43): n is a, c, g, or t
  misc_feature (336)..(336): n is a, c, g, or t
aggaaatccttatgaattaaaacnatgcatattttactacagnacagagtttaaatgaatacataaatgtagaagtactgaatgtatatatttaaaaggagcctcttgtattcaacaaaagatggatgcatatataagagagatgatttaatttaaagaaatatgttgtttcttgtctgtaatgtaatgtaaagggtggaaaggcctcaagctcacatttgtagagagagagcgagagaaatcagagttccctttattgccctgtcctcaaactggtcataggctctagtcacctggggagctgtagaaaacacttgcagagccaggttttgctgngtttggggcaatgccctgggcaaccagagcttttaacaatttgaagccacttcagcagcagcagcaaaaaggcgaactcatctctacccaagatgtttcttttcctagtggtggaatttgaacacttctcactttttattgtatttcatcttccgcagataaatgtagaaatacacgattctgtcacctctgatcccttccatctgaaagggtacaaggagtgttgtagcttctgaaggtgcagaaaacaatttctaaaaatgcttttattcctgggctaatcctgtccctccctaagtcacagcgaggtgtctgtcccagggctggagatgcttcccaaggaggagtctgttttgttgagagtgggcgtgggcttcttcacataagcctggggaaggaagaaaaaacggctttcattaccaaataatgtaaaacctcaaaagcaagggcttcaacagccttaaccaaatattattccccatagccagtggaaaatggatgtgacaaccccagtgcgcaggccagagtgagtgagcccagcacggcgctccgactggcttcctctctcaggtgctggattgtggggttagtggcatttccagctggattcctcctgttgtagttgccataaggaaatgagatgcagaatcagaaggatctatttctacagaatcatttcaccagttaagcacatgagtagagaaagagataaaaataaaagtatctcatgaaggaaagagattttgcctctcttttacttttcacctaagtttctctgagaaatagagacaggattctctctttaaaattcagtgaaaatgaagaaagttttcctgcagttgctaacctgagttg

SEQ ID NO: 355595 - DNA, 517 bp, Homo Sapiens
  misc_feature (22)..(22): n is a, c, g, or t
  misc_feature (35)..(35): n is a, c, g, or t
  misc_feature (471)..(471): n is a, c, g, or t
aattcctaaaaaatccttttanccccctggcctanccctgtccccttcccctaagtcgcagcgaggtgtcctgtccccccagggctggaaaatgccttccccaaggagaagtcctgttttgttgaaaagtgggccgtgggccttcctccacataaacccctggggaagggaagaaaaaacggctttccattacccaaataatgtaaaacctcaaaagcaagggcttcaacagccttaacccaaatattattcccccatagcccagtggaaaatggatgtgacaaccccagtgcgcaggccagagtgagtgagcccagcacggcgctccgactggcttcctctctcaggtgctggattgtggggttagtggcatttccagctggattcctcctgttgtagttgccataaggaaatgagatgcagaatcagaaggatctatttctacagaatcatttcaccaagttaagcacnatgagtagagaaagagataaaaataaaagtatctcatgaaaaaaaa

SEQ ID NO: 355596 - DNA, 909 bp, Homo Sapiens
ccgccgctacagtccgggccgggctccaccgcgcatcctgctccactctggcgaccgcccccggggcccccgccgcgggcgcggcgcccgccatgggcgaggaggactctatctggagctgtgcgagcggccggtgcagttcgagaaggcgaaccctgtcaactgcgtcttcttcgatgaggccaacaagcaggtttttgctgttcgatctggtggagctactggcgtggtagttaaaggcccagatgataggaatcccatctcatttagaatggatgacaaaggagaagtgaagtgcattaagttttccttagaaaataagatattggctgttcagaggacctcaaagactgtggatttttgtaattttatccctgataattcccagctggaatacacacaggagtgcaagactaagaatgccaacattctaggattctgctggactagttcaactgaaattgtcttcataacagatcaaggaatcgaattttaccaggtattaccagagaaacggagtctgaaactcttgaagagccacaatctcaatgtgaattggtacatgtactgccccgagagcgccgtgatcttgctgtctaccacggtcctggagaatgtcctgcagccttttcactttagggctggcactatgtcgaagctgcccaaatttgagattgaattaccagctgcgcctaagtcaactaaacccagcctttccgaaagagacatcgcaatggctaccatatacgggcagctgtatgttctcttcttgaggcatcattctcggacctccaacagcacaggagcggaggtggtcctctatcatctaccacgagaaggtgcctgtaaaaaggtgcacatattgaagttaaatagggcgggaaagttttgccctgaacgtggttggac

SEQ ID NO: 355597 - DNA, 1067 bp, Homo Sapiens
gtgggggcgtggcacaggaagcggcgtcgcgccgggcccagagccgcagcgcagcggtcgctacagtccgggccgggctccaccgcgcatcctgctccactctggcgaccgcccccggggcccccgccgcgggcgcggcgcccgccatgggcgaggaggactactatctggagctgtgcgagcggccggtgcagttcgagaaggcgaaccctgtcaactgcgtcttcttcgatgaggccaacaagcaggtttttgctgttcgatctggtggagctactggcgtggtagttaaaggcccagatgataggaatcccatctcatttagaatggatgacaaaggagaagtgaagtgcattaagttttccttagaaaataagatattggctgttcagaggacctcaaagactgtggatttttgtaattttatccctgataattcccagctggaatacacacaggagtgcaagactaagaatgccaacattctaggattctgctggactagttcaactgaaattgtcttcataacagatcaaggaatcgaattttaccaggtattaccagagaaacggagtctgaaactcttgaagagccacaatctcaatgtgaattggtacatgtactgccccgagagcgccgtgatcttgctgtctaccacggtcctggagaatgtcctgcagccttttcactttagggctggcactatgtcgaaagctgcccaaatttgagattgaattaccaggctgcgcctaaggtcaactaaacccagcctttccgaaagagacatcgcaatggctaccatatacgggcagctgaatggtctcttcctgagggatcattctcggaccttccacagcacagggaacggaggtgggccctctatcatctaccaccaagaaagggccttgtaaaaagatgcccatattgaagtttaataagaacgggaaagtttgcccctgaacctgttggaccaccctggtagtcgtggcatcatcaggaatcccaagacttcgggaaaaattcaaaatccgggttccgggggaaagtttgagggctccgttaacttt

SEQ ID NO: 355598 - DNA, 3411 bp, Homo Sapiens
  misc_feature (50)..(86): n is a, c, g, or t
ggatgtatcgactactataggcgaacctggattatacgcggtggcggcgnnnnnnnnnnnnnnnnnnnnnnnnnnnnnnnnnnnnnatcaggccaaatcggccgagctcgaattcgtcgagagcggccgggctactccaacccctgtggcgggcgggggtaccgcctgggcaagggccggggcgccgggccgagccacctcttcccctcccccgcttccctgtcgcgctccgctggctggacgcgctggaggagtggagcagcacccggccggccctgggggctgacagtcggcaaagtttggcccgaagaggaagtggtctcaaaccccggcaggtggcgaccaggccagaccaggggcgctcgctgcctgcgggcgggctgtaggcgagggcgcgccccagtgccgagacccggggcttcaggagccggccccgggagagaagagtgcggcggcggacggagaaaacaactccaaagttggcgaaaggcaccgcccctactcccgggctgccgccgcctccccgcccccagccctggcatccagagtacgggtcgagcccgggccatggagcccccctggggaggcggcaccagggagcctgggcgcccggggctccgccgcgaccccatcgggtagaccacagaagctccgggacccttccggcacctctggacagcccaggatgctgttggccaccctcctcctcctcctccttggaggcgctctggcccatccagaccggattatttttccaaatcatgcttgtgaggaccccccagcagtgctcttagaagtgcagggcaccttacagaggcccctggtccgggacagccgcacctcccctgccaactgcacctggctcatcctgggcagcaaggaacagactgtcaccatcaggttccagaagctacacctggcctgtggctcagagcgcttaaccctacgctcccctctccagccactgatctccctgtgtgaggcacctcccagccctctgcagctgcccgggggcaacgtcaccatcacttacagctatgctggggccagagcacccatgggccagggcttcctgctctcctacagccaagattggctgatgtgcctgcaggaagagtttcagtgcctgaaccaccgctgtgtatctgctgtccagcgctgtgatggggttgatgcctgtggcgatggctctgatgaagcaggttgcagctcagaccccttccctggcctgaccccaagacccgtcccctccctgccttgcaatgtcaccttggaggacttctatggggtcttctcctctcctggatatacacacctagcctcagtctcccacccccagtcctgccattggctgctggacccccatgatggccggcggctggccgtgcgcttcacagccctggacttgggctttggagatgcagtgcatgtgtatgacgggccctgggccccctgagagctcccgactactgcgtagtctcacccacttcagcaatggcaaggctgtcactgtggagacactgtctggccaggctgttgtgtcctaccacacagttgcttggagcaatggtcgtggcttcaatgccacctaccatgtgcggggctattgcttgccttgggacagaccctgtggcttaggctctggcctgggagctggcgaaggcctaggtgagcgctgctacagtgaggcacagcgctgtgacggctcatgggactgtgctgacggcacagatgaggaggactgcccaggctgcccacctggacacttccccctgtgggggctgctggcacctctggtgccacagcctgctacctgcctgctgaccgctgcaactaccagactttctgtgctgatggagcagatgagagacgctgtcggcattgccagcctggcaatttccgatgccgggacgagaagtgcgtgtatgagacgtgggtgtgcgatgggcagccagactgtgcggacggcagtgatgagtgggactgctcctatgttctgccccgcaaggtcattacagctgcagtcattggcagcctagtgtgcggcctgctcctggtcatcgccctgggctgcacctgcaagctctatgccattcgcacccaggagtacagcatctttgcccccctctcccggatggaggctgagattgtgcagcagcaggcacccccttcctacgggcagctcattgcccagggtgccatcccacctgtagaagactttcctacagagaatcctaatgataactcagtgctgggcaacctgcgttctctgctacagatcttacgccaggatatgactccaggaggtggcccaggtgcccgccgtcgtcagcggggccgcttgatgcgacgcctggtacgccgtctccgccgctggggcttgctccctcgaaccaacaccccggctcgggcctctgaggccagatcccaggtcacaccttctgctgctccccttgaggccctagatggtggcacaggtccagcccgtgagggcggggcagtgggtgggcaagatggggagcaggcacccccactgcccatcaaggctcccctcccatctgctagcacgtctccagcccccactactgtccctgaagccccagggccactgccctcactgcccctagagccatcactattgtctggagtggtgcaggccctgcgaggccgcctgttgcccagcctggggcccccaggaccaacccggagcccccctggaccccacacagcagtcctggccctggaagatgaggacgatgtgctactggtgccactggctgagccgggggtgtgggtagctgaggcagaggatgagccactgcttacctgaggggacctgggggctctactgaggcctctcccctgggggctctactcatagtggcacaaccttttagaggtgggtcagcctcccctccaccacttccttccctgtccctggatttcagggacttggtgggcctcccgttgaccctatgtagctgctataaagttaagtgtccctcaggcagggagagggctcacagagtctcctctgtacgtggccatggccagacaccccagtcccttcaccaccacctgctccccacgccaccaccatttgggtggctgtttttaaaaagtaaagttcttagaggatcataggtctggacactccatccttgccaaacctctacccaaaagtggccttaagcaccggaatgccaattaactagagaccctccagcccccaaggggaggatttgggcagaacctgaggttttgccatccacaatccctcctacagggcctggctcacaaaaagagtgcaacaaatgcttctattccatagctacggcattgctcagtaagttgaggtcaaaaataaaggaatcatacatctcaaaattttgcaaattagctgcgagcctg

SEQ ID NO: 355599 - DNA, 693 bp, Homo Sapiens
tctcagtactcccagaaagactgacgcagcatgaggggctggggggaaggagacacctgcccaccctcagtcagctttgtccagcttgcaggaggcagccaggtctggctccttcagggctgtaacagtcctgaaaccaccacttgcctaggccacggatgcctcaagagacccggtcagcccagactggaggagtgccccaaaccagtccagtgtccacttgccagaatttcagctccttttttctgtggtgaggcaaaggctagaaataaaatggaatccgcgccccaagtgggaccccaagcaggcatctttcggtggagaaacgccccccagtgtccttgaccacagctgactgctggcatgagcccaccctctgcctgaagatgcaggaccatttttgccttaaaagttggggaggagggacatgtagattgtgtgcattgtgcatagtcaaggaaatcctagggccacctccagttcatttgtgtgggaacaaggatattttatagatacaaattatttttatgctgtgttgaattaatcaattaggagaggaaggggaaatcacttccttcaaactttttatctgattgtctaaaattctaaccatgcttttaacttattatttttacccagctctgaaggtcattgttcttgcctgtgtttgaataaaatcatattggtgtttgt

SEQ ID NO: 355600 - DNA, 754 bp, Homo Sapiens
  misc_feature (85)..(119): n is a, c, g, or t
  misc_feature (319)..(319): n is a, c, g, or t
gatcggctgacattattgacaggatactgattggttcatgttgaagaaaacatacaatacaaaatacagaaaaagttggttccgnnnnnnnnnnnnnnnnnnnnnnnnnnnnnnnnnnnaaatactcatcatcatgatttggtcagaacagggctcagagccagaggttggggtgaccgagggtggaggggttgtgggcaatgggttcgtggctgtcacaataatgctgtgataatgctgtggtttcccagcagggaggtgggagcggggagggggctgcagcctgatgagagccagctgaaggaagagctgcctctcnccttcctaagcccctttcccaaggtttgccccaccgcccaaaccaaagaccattccgatcaaagtgaggatgttgatgctcttgctgtgtccgctgtttcgtaggagggaaagaatgggttgttgcactgaccccacttgtccccatatacaagggtttggggggcaatgagcttgtgtgctactcccagcaagggtaaaatgtgatgagcatttttaatgcgtgaggatgtggttatagtctgaagattttatattttcaaaaagtgtcttattgattaaaattggccttgttttttgtactgaagggtgcatgtgtgaatgtttcattcctgcctttggtctcattttttttggggctattttgctgtttcctttctctttgtcctcctagatttttcccgatgttgttttagtgcctattgcctttacagtg

SEQ ID NO: 355601 - DNA, 1675 bp, Homo Sapiens
  misc_feature (998)..(1016): n is a, c, g, or t
  misc_feature (1574)..(1608): n is a, c, g, or t
aaagtgctggtacggtccggaagttacgggatatcgtcgaccacgcgtcgagcggctgaaaggcggaagtggaggccggagcctgggacaccgccggcggggagagaagcggatcccgtccgagccccggccccaagtaacgccgccgccccggagccgccttggaggtccccctccccactaagtgcctctttgcatagcaccagtccccacccgcacgctctctggaccactacagctggacgggcaatggcgggtcggggaggcgcagcacgacccaatggaccagctgctgggaacaagatctgtcaatttaagctggttctgctgggggagtctgcggtaggcaaatccagcctcgtcctccgctttgtcaagggacagtttcacgagtaccaggagagcacaattggagcggccttcctcacacagactgtctgcctggatgacacaacagtcaagtttgagatctgggacacagctggacaggagcggtatcacagcctggcccccatgtactatcggggggcccaggctgccatcgtggtctatgacatcaccaacacagatacatttgcacgggccaagaactgggtgaaggagctacagaggcaggccagccccaacatcgtcattgcactcgcgggtaacaaggcagacctggccagcaagagagccgtggaattccaggaagcacaagcctatgcagacgacaacagtttgctgttcatggagacatcagcaaagactgcaatgaacgtgaacgaaatcttcatggcaatagctaagaagcttcccaagaacgagccccagaatgcaactggtgctccaggccgaaaccgaggtgtggacctccaggagaacaacccagccagccggagccagtgctgcagcaactgagccccccttgcctgcccgctgcccccgcctcctccgcctgaatgacccgactggaatccactctaaccaatcgcacttaacgactcgggccaccactnnnnnnnnnnnnnnnnnnntccaccatgatttctccatataattttgatcataggccggagtgagtcattccacctgcacctttctgtacaaatactaattcaattttaagtcttaagtcacttttttaatatatatgatcttctgctcttcccacttcctcccctttctactgctctcccattttcccttgctgggagtagccacatgctcttgccccccaacccttgtatatggggacagtggggtcagtgcagctaccctttctttccctcctgcggaacagcggacccagcaagagcatccacatcctcactttgttcggagtggtctttggtttgggcggtggggcagaccttgggaaggggcttaggaagggagaggcagctcttccttcagctggctctcatcaggctgcagccccctccccgctcccacctccctgctgggaaaccacagcattatcacagcattattgtgacagccacgaacccattgcccacaacccctccaccctcggtcaccccaacctctggctctgagccctgttctgaccaaatcatgatgatgagtatttnnnnnnnnnnnnnnnnnnnnnnnnnnnnnnnnnnngcggaaccaactttttctgtattttgtattgtatgttttcttcaacatgtaaccaatcagtatcttg

SEQ ID NO: 355602 - DNA, 1099 bp, Homo Sapiens
  misc_feature (987)..(1010): n is a, c, g, or t
gggtccggaatttccgggatgcggctgaaaggcggaagtgtaggccggagcctgggacaccgccggcggggagagaagcggatcccgtccgagccccggccccaagtaacgccgccgccccggagccgccttgggaggtccccctccccactaagtgcctctttgcatagcaccagtccccacccgcacgctctctggaccactacagctggacgggcaatggcgggtcggggaggcgcagcacgacccaatggaccagctgctgggaacaagatctgtcaatttaagctggttctgctgggggagtctgcggtaggcaaatccagcctcgtcctccgctttgtcaagggacagtttcacgagtaccaggagagcacaattggagcggccttcctcacacagactgtctgcctggatgacacaacagtcaagtttgagatctgggacacagctggacaggagcggtatcacagcctggcccccatgtactatcggggggcccaggctgccatcgtggtctatgacatcaccaacacagatacatttgcacgggccaagaactgggtgaaggagctacagaggcaggccagccccaacatcgtcattgcactcgcgggtaacaaggcagacctggccagcaagagagccgtggaattccaggaagcacaagcctatgcagacgacaacagttttgctgttcatggagacatcagcaaagactgcaatgaacgtgaacgaaatcttcatggcaatagctaagaagcttcccaagaacgagccccagaatgcaactggtgctccaggccgaaaaccgaggtgtgggacctccaagaagaacaaacccagccagccgggagccagtgcttgcaacaactgaagcccccctttgcctgcccggcttgcccccccctccttccgcctgaaatgaccccaactggaaatccacctctaacccaatcgcacctaaccgactcggggcaccacctnnnnnnnnnnnnnnnnnnnnnnnntccaccctgaatttctccaaataaatttggatcactaggccgggagggaagtcatttcccacctggaccctttcttgaacaataactaa

SEQ ID NO: 355603 - DNA, 616 bp, Homo Sapiens
  misc_feature (92)..(126): n is a, c, g, or t
  misc_feature (572)..(572): n is a, c, g, or t
  misc_feature (582)..(582): n is a, c, g, or t
cgatccgatcggctgactatattgacaagatactgattggttacatgttgaagaaaacatacaatacaaaatacagaaaaagttggttccgnnnnnnnnnnnnnnnnnnnnnnnnnnnnnnnnnnnaaatactcatcatcatgatttggtcagaacagggctcagagccagaggttggggtgaccgagggtggaggggttgtgggcaatgggttcgtggctgtcacaataatgctgtgataatgctgtggtttcccagcagggaggtgggagcggggagggggctgcagcctgatgagagccagctgaaggaagagctgcctctcccttcctaagccccttcccaaggtctgccccaccgcccaaaccaaagaccactccgaacaaagtgaggatgtggatgctcttgctgggtccgctgttccgcaggagggaaagaaagggtagctgcactgaccccactgtccccatatacaagggttggggggcaagagcatgtggctactcccagcaagggaaaatgggagagcagtagaaaggggaggaagtgggaagagcagaagatcatatatnttaaaaaagngacttaagacttaaaattgaattagtatttgtac

SEQ ID NO: 355604 - DNA, 537 bp, Homo Sapiens
  misc_feature (28)..(28): n is a, c, g, or t
  misc_feature (37)..(37): n is a, c, g, or t
  misc_feature (51)..(51): n is a, c, g, or t
  misc_feature (67)..(67): n is a, c, g, or t
  misc_feature (102)..(102): n is a, c, g, or t
  misc_feature (113)..(113): n is a, c, g, or t
  misc_feature (156)..(156): n is a, c, g, or t
  misc_feature (163)..(163): n is a, c, g, or t
agtaaagaatgttgctccaaaacccagnttgggtttngaggccggactccntcttaagacctgaagncccccaaggttcttactctgaaaggataatcctancccttgaagtnccagcagacatgcttttcccctttggcaggcaaccttccttcntgatccntgaggcaaaagcttgcccctgcctgcagttccaagtgagaatcagctgacagcaggatggctcacctgccactcagatcaaaacctgtggcttctgacatccaagatgtctgtggactttgaaaatgggcagggctggtctaacccactgcctcagccaagccagcctggcctacctatcttcagaggggctgagcttcaggcagcagtctctattggagggcattcctctgctagcttccttccttttctctcttcacatgtcttcttcctttctgtccctctcttccaactcatacgcttcttcagatccctcagaccagccttcagcttggatcattgcccaagaaaatgctgaaactatggcatgtcagg

SEQ ID NO: 355605 - DNA, 372 bp, Homo Sapiens
aaaaactctgaaacatgaaatcaagaaaacccaagaaaccccctatcaaagaggaggctatgatctctcatcccaaaagcttggctaactgatgaatatttttatattttgagctaaaataaaatgcttaggatatgaatgcatacttcaattttctgatttcctaccataatttcctgtttgattatctgatcctttggagtcaggtaagaaggttgccacagagtgtagatatggtccatgtgacatcccacccgtaactagtttatgccatagtgtatttctccagtgcttctactattttttgtttgttttgctctttactatttttgaagaattgtacatgcgtattccaccaaatgtagtacatat

SEQ ID NO: 355606 - DNA, 336 bp, Homo Sapiens
  misc_feature (24)..(24): n is a, c, g, or t
ctgggaaggccctaaacgtcactnctgctgggcggaaagggcctgtggacagcccaccccaggcggcggggtcttggtgggtccagtggtaatggtgcccctcccctccattccctgtgggtgcagcccaaaggctggcgaggaggtgcctctgccctaccctcgggtctggcgagggagggggcagggtgcatccactgtgaacagccctctgggcccacaactccctgaccctggaagctgagcctgctttcctgaccctccgccccaccccctcctccccagaacactcagagggacggtcaacatcagagcacattaaacgctggtgaaacc

SEQ ID NO: 355607 - DNA, 1526 bp, Homo Sapiens
  misc_feature (658)..(685): n is a, c, g, or t
ggcagcgggccgttactcccatgccgttcttctgtgtaatattaagaactgaatgtgaagtttaaagatagcctgggtgtaccttttaagaattttgtaaaccgtttgtctgtcttttgttactgttttatggtgccaagtatcctacgttacaacaataatatcatgggagaaatagaaatagcctagtttgcttccaatagaaactgcttttaacatgggctgtatataaaaatattaaagagaaacaaaactgtacatttcctcattgctccgctacagacaacccatgtcataaccttgttgcaaatatttttctcctatagcagtaagtacagcattagaaggtgattagagagtctgttgatgaaacacaaatgtatgttttattgattttactttagaacactacagagttcctggaccgggtgaaggcattagctgggtgtttgtgtgggataaatactaccactgcaagtgactgctgtccgctgcggaatctgttcttggtggaagcacaggtccgtgtcgctgctgtggttgccgctgtccgcggttcaacacggagtccgccccgcgggtttcagctgttggtcgttctgaggggcctttggaagtgaccggtctggttcctaagcaataaaattgaccgtggtgnnnnnnnnnnnnnnnnnnnnnnnnnnnngggggggcggcaaaaatatccctcgaaggggcccagcattaacgcgttaccccagcttttttgctccaagggtggccccctatagggagcccgatataaataggcctaggcctgaggccggcgctttcaacaacgtgcctcgacggggccacacctgcctacatggggcgactccttggtcagagggcaaccctataacttcgtggggtgctgcccattactgtgggcacaaccttcctacgcgaagaatataacgcgtcctaaggcgcaacattttaccgactttttcagccggttggttcttacctgggtgttaaaacccctagcggctgcaattatgtcccttcgccgtgcgccttggaaacagctttgcggcctcaccgcggacgatagtgacctttatctgcaccactctccttatttcccccgcggagcttagtggtctcaaataacaggcgccgcagtcaccccagccagacaccgaagcccggatacgcccaagctatcagctacgcgcaccagacgagtcacatatgttgagagatggtgatgaatcgaggcgagaggcagtgtaggaggtgaggtacttggctgatggttgggcgggagggtcgactggagtgtgtgcgagagcagacgaagagcagactgagatgtagacagagagccagcgagacacacgaccgcggaccacgcgccgcgtaacacaggaccccgagtacgcgcgcgacgacagacgagacatggtgcgagcggatatgatagtggtgggttgtcgagtgcgaacccccaaccacacaccagcacccagcacccaggagaccgcaacgcagctaaccgc

SEQ ID NO: 355608 - DNA, 439 bp, Homo Sapiens
  misc_feature (60)..(60): n is a, c, g, or t
  misc_feature (330)..(365): n is a, c, g, or t
attcgtgtgatccccgcacccatgccagcgtgcatggtttgtgccctggttaatgccctncctggggccacctcggccttgcccacgtgtgagcacactgaggggtaccagcttcccaggggctcggggctatgctgggcagagacatggaggaagatgaggatctaggtgtgagcatgcagagccctgaggctgggcaggcagggagctctgcctgcacaatgatgtagccgtgtgtggccacaccagcactgggcagcacctctggggaggggggcagggcaaggacaactggagagacaaagccagatggggccacgtccttagaannnnnnnnnnnnnnnnnnnnnnnnnnnnnnnnnnnnaatacgcagggcagaaacacaccatgtaggtcaggcaggacagaaacacatcatgtaggccaggcgtggtggct

SEQ ID NO: 355609 - DNA, 632 bp, Homo Sapiens
  misc_feature (188)..(188): n is a, c, g, or t
  misc_feature (485)..(536): n is a, c, g, or t
aaggacgagatggccgcagagaaaagcgagaagagatccgagaagataggaatccaagagatggacatgatgaaagaaaatcaaagaagcgctatagaaatgaagggagtcccagccctagacagtcccccgaaagcgccggcgtgaacattctccggacagtgatgcctacaacagtggagatgatnaaaaatgaaaaaacacagactcttgagccaagttgtacgacctcaagaatctcgttctcttagtccctcgcacctcacagaagacagacagggtagatggaaagaggaggatcgtaaaccagaaaggaaagagagttcaaggcgctacgaagaacaggaactcaaggagaaagtttcttctgtagataaacagagagaacagacagaaatcctggaaagctcaagaatgcgtgcacaggacattataggacaccaccagtctgaagatcgagagacatctgatcgagctcatgatgnnnnnnnnnnnnnnnnnnnnnnnnnnnnnnnnnnnnnnnnnnnnnnnnnnnnggatgatgttggaatagagaggggtaacatagagacaacatctgaagatggtcaagtattttcaccaaaaaaaggacagaaaaagaaaagcattga

SEQ ID NO: 355610 - DNA, 811 bp, Homo Sapiens
agcggggggtctcagccatggcgaccgtgctgtccaggcgctcaagctgccggggaagaagagcccagacctaggggagtatgatccacttacccaggctgacagtgatgagagcgaagacgatctggtgcttaacctgcagaagaatggaggggtcaaaaatgggaagagtcctttgggagaagcgccagaacccgactcagatgctgaggttgcagaggctgcaaagccacatctttcagaagtcaccacggagggctacccctcagaaccccttgggggcctgaaacagaaggcggcctcctccctggtgtcatactgtgcgcacgtctgtcttcctgcttgactttggggatctcgatgatcctggtgctcctgtgtgctttcctgatcccctgtcctcccagagatctgcacagcacctggagccgacacttgggctccccagggaaggtggggacctgtctccattggaatttggctgatgtgaatggagatggcctgcgtgatgtgcttctactcctttgtgatgtccaaggaacgggagatgaagataggtgtctcaagaccagctgctaatcttgtgtgccttacggggatgaatggcaacacaactgtggtctagtcttctccctgaaggaggctcgagataatcacatgtatgagagctggatgccaggaagcttggctgaaaccatctgccttgtgacagggaacaaccaaagatgctcagcgcatacatgcaacggtcagggaaagccatttggactttaaacccaaatacttgtccaacggtaacttagtgcccagt

SEQ ID NO: 355611 - DNA, 883 bp, Homo Sapiens
gttgatgcccggaatgccgttccagcgcactaataacttgactgcgttaagcatctggccagaattggtttggtattggtttgaaccctggggttcctccgtagtctgtaagtggagtttcgaagctcgacccccttctccaaggcgggagtgtttctaggagggaacatacttcccctgtaaaggaagatcacgttgctaaaggtaaaaaatttgaaggcgccctatgtgtagaacacttacgttcttggctttctggccactataaagatgggtcgggaatggcgccagctacgttaaaaagtaacgtgcaggaatggttcagttgcccggtgttgaccagagtagagatggttttgcccacaaaaaaaatggcgccgaaacatgtcaatccgcacaatcacgtgttcacaaacctggatgagagacggtatggcttcagatgacagaacggatgttattattctttacttccgggtgagacaaatcgggcgccatcttgtcttgttcccgaagaagtagaagcatcgaaagcgttggagaggtgttaccggaacggcggcgacaagggtgttcccgaactagagtgggtaagtgatggagaacaattacacgtgggcacttgccggaccattacaacgttcttggtttctgtggcgaaggtagcataacttaaaataggctgcgtacgctgcttggcgcgaccgctggaacctcattcctttaaagcgctgcggtccgccagacttggtaaatcagagcgctgctttcgctgaaaaggaaatgtccttgttaaagagagtgctcacggtcccatcttctcacagagtttcctctcggacgagaagggactaattgttgggttcctgaccggccgttaaac

SEQ ID NO: 355612 - DNA, 1001 bp, Homo Sapiens
  misc_feature (634)..(634): n is a, c, g, or t
  misc_feature (697)..(707): n is a, c, g, or t
  misc_feature (731)..(766): n is a, c, g, or t
  misc_feature (803)..(803): n is a, c, g, or t
tcttgttcccgaagaagtagaagcatcgaaagcgttggagaggtgttaccggaacggcggcgacaagggtgttcccgaactagagtggggcatacataatcttgctgctatgcttcgaagctgtagtctgaatcaacctaagttttaaacagaaggtgaacctctgagatagaaaatcaagtatattttaaaagaagggatgtgggatcaaggaggacagccttggcagcagtggcccttgaaccagcaacaatggatgcagtcattccagcaccaacaggatccaagccagattgattgggctgcattggcccaagcttggattgcccaaagagaagcttcaggacagcaaagcatggtagaacaaccaccaggaatgatgccaaatggacaagatatgtctacaatggaatctggtccaaacaatcatgggaatttccaaggggattcaaacttcaacagaatgtggcaaccaggctgacaggggctgggaacactctggaaacctcacttggcatctagggaagagagcattctttgtctctctattgcaacctctggccttttcagaagcagcactggcagagtaaaacatgtctagcctccaattaaagaaaaaattgtgtcactgtgntgacaaaattagtctggtcaaatatactctgcccctaccatccgccctacctttttcttcccnnnnnnnnnnncagatagtgaagatctttcataannnnnnnnnnnnnnnnnnnnnnnnnnnnnnnnnnnncacagtatgatgtagatttcttgatgctaattccatnctccatggcttgggttattcctttttaatagtcacttgaaactatggagggaatcaccctctcatttgggaatgctgaatggtgaaagtcataaaccccctttccctattaatacctttttggtttccccctaaaaaaagggagacctcctcccaagacccgccttggggcacaataccaagggccctgtcctctacc

SEQ ID NO: 355613 - DNA, 2516 bp, Homo Sapiens
  misc_feature (919)..(919): n is a, c, g, or t
  misc_feature (1599)..(1626): n is a, c, g, or t
  misc_feature (2188)..(2188): n is a, c, g, or t
gggggaagaagtaggagcatcgaaagcgttggagaggtgttaccggaacggcggcgacaagggtgttcccgaactagagtggatagaaaatcaagtatattttaaaagaagggatgtgggatcaaggaggacagccttggcagcagtggcccttgaaccagcaacaatggatgcagtcattccagcaccaacaggatccaagccagattgattgggctgcattggcccaagcttggattgcccaaagagaagcttcaggacagcaaagcatggtagaacaaccaccaggaatgatgccaaatggacaagatatgtctacaatggaatctggtccaaacaatcatgggaatttccaaggggattcaaacttcaacagaatgtggcaaccagaatggggaatgcatcagcaacccccacacccccctccagatcagccatggatgccaccaacaccaggcccaatggacattgttcctccttctgaagacagcaacagtcacgacagtgcggaatttgcccctgacaacaggcatatatttaaccagaacaatcacaactttggtggaccacccgataattttgcagtggggccagtgaaccagtttgactatcagcatggggcctgcttttggtccaccgcaaggtggatttcatcctccttattggcaaccaggacctccaggacctccagcacctccccagaatcgaagagaaaggccatcatcattcagggatcgtcagcgttcacctattgcacttcctgtgaagcaggagcctccacaaattgacgcagtaaaacgcaggactcttcccgcttggattcgcgaaggtcttgaaaaaatggaacgtgaaaagcagaagaaattggagaaagaaagaatggaacaacaacgttcacaattgtccaaaaaagaaaaanaggccacagaagatgctgaaggaggggatggccctcgtttacctcagagaagtaaatttgatagtgatgaggaagaagaagacactgaaaatgttgaggctgcaagtagtgggaaagtcaccagaagtccatccccagttcctcaagaagagcacagtgaccctgagatgactgaagaggagaaagagtatcaaatgatgttgctgacaaaaatgcttctaacagaaattctgctggatgtcacagatgaagaaatttattacgtagccaaagatgcacaccgcaaagcaacgaaagctcctgcaaaacagctggcacagtccagtgcactggcttccctcactggactcggtggactgggtggttatggatcaggagacagtgaagatgagaggagtgacagaggatctgagtcatctgacactgatgatgaagaattacggcatcgaatccggcaaaaacaggaagctttttggagaaaagaaaaagaacagcagctattacatgataaacagatggaagaagaaaagcagcaaacagaaagggttacaaaagagatgaatgaatttatccataaagagcaaaatagtttatcactactagaagcaagagaagcagacggtgatgtggttaatgaaaagaagagaactccaaatgaaaccacatcagttttagaaccnnnnnnnnnnnnnnnnnnnnnnnnnnnncaaggaaggagtaggtcgggaagttctagtagtggtagttccagtagcaatagcagaactagtagtactagtagtactgtctctagctcttcatacagttctagctcaggtagtagtcgtacttcttctcggtcttcttctcctaaaaggaaaaagagacacagtaggagtagatctccaacaatcaaagctagacgtagcaggagtagaagctattctcgcagaattaaaatagagagcaatagggctagggtaaagattagagatagaaggagatctaatagaaatagcattgaaagagaaagacgacgaaatcggagtccttcccgagagagacgtagaagtagaagtcgctcaagggatagacgaaccaatcgtgccagtcgcagtaggagtcgagataggcgtaaaattgatgatcaacgtggaaatcttagtgggaacagtcataagcataaaggtgaggctaaagaacaagagaggaaaaaggagaggagtcgaagtatagataaagataggaaaaagaaagacaaagaaagggaacgtgaacaggataaaaganaagagaaacaaaaaagggaagaaaaagattttaagttcagtagtcaggatgatagattaaaaaggaaacgagaaagtgaaagaacattttctaggagtggttctatatctgttaaaatcataagacatgattctagacaggatagtaagaaaagtactaccaaagatagtaaaaaacattcaggctctgattctagtggaaggagcagttctgagtctccaggaagtagcaaagaaaagaaggctaagaagcctaaacatagtcgatcgcgatccgtggagaaatctcaaaggtctggtaagaaggcaagccgcatgagtacagatta

SEQ ID NO: 355614 - DNA, 1211 bp, Homo Sapiens
  misc_feature (20)..(20): n is a, c, g, or t
  misc_feature (80)..(80): n is a, c, g, or t
  misc_feature (85)..(85): n is a, c, g, or t
aagggccgtcctgcggggtncccctcgtcccccccgtcccacgtctccccgggggaggggagccatccaccacagtgccngggcnaaggtcgccgccattttccaaccctctcccccttttgtttttccccttttaaaaggatagattttagtgaaagtcttttaaaaagaaagtgtattcacagagaaggcccattttaaagatgttttagatagatagcccataaaataggtgtttcctgccctcaatcccaagttattattacccattttgtacttgaaagtgtcccaaatgacacaatataaaagaactatttcttatttcaatattaattttgctaatcaaaggttccagtttccagtgatatgaccaaccaataagatataactggtgcagagagagccatatattttacataatatttataataaactttcttatcacagttcctcctcagaacacactctacagaatgtcgactgaaaagcttccaaaataattgaacacaagatatgaatcagcaacagaataagctcaagggaagagacatgggcacaggcaggcaaaacgtgatcaccacagctccgttcctgcagtgacacttaacatactcagcatcttcatgaattctgaataatttactgatcgtaaagtctaaaagtatcaatttcaggtgagcagttttaaatcagaaaatagtcaatagttaatcatgactcttcagggtatttccttcacgtcctctgaagagtttcccagaacattcttgtgaaaaggaatgcctcccaacaatggagagcaacaatagcaacaggcatctgaatcagcctggcctctgaaaacagaccaaagaggagtttatctgctttcttccagtgaagaaagaaaatcaagaacgtggtattggccgagggaaagtgaatgagggaaggtaaataaaggacccaggccagtctgtggcaaaggaagcacttaggaaatgactgcagtgatctctagtgagcattttgtaaaattccactccaacgttaggccatggatgcaggaacctatctgccatcatatttaattaagatggagtgttacgcacctaataaagaaggtgaagttctaggtagcattttaaattcataagaagtctagaagaccaagaagaaaagagataaggtagctaggatttcaagcagcactaagcaaaacttaaaattgt

SEQ ID NO: 355615 - DNA, 416 bp, Homo Sapiens
  misc_feature (43)..(43): n is a, c, g, or t
  misc_feature (49)..(49): n is a, c, g, or t
tggagacgctgcagtctcagctcatggcagagaaaattgcaantgcagnagcagctccaggcagaaaccgagctgtgtgccgaggctgaggagctccgggcccgcctgaccgccaaagaagcagggaataagaagagatctgccatgacctagaggccagggtggaggaggaggaggagcgctgccagcacctgcaggcggagaagaagaagatgcagcagaacatccaggagcttgaggagcagctggaggaggaggagagcgcccggcagaagctgcagctggagaaggtgaccaccgaggcgaagctgaaaaagctggaggaggagcagatcatcctggaggaccagaactgcaagctggccaaggaaaagaaactgctggaagacagaatagctgagttcaccaccaacctc

SEQ ID NO: 355616 - DNA, 2710 bp, Homo Sapiens
  misc_feature (2550)..(2598): n is a, c, g, or t
caaccacgcctggacttggcattgggccgggggctgccacccgaagctctggcgtgggcgagtgcggggaccacccctgcctgcccaacccctgccatggcggggccccattgccagaacctggaggctggaatggttccattgccagtgccctgcccggccgcgtcggaccaacctgtgccgatgatgaatgagcccctgccatgcccaacccctgccatgggttgcggctgccctgccgtgtgctgcccgagggtggtgctcagtgcgagtgccccctggggcgtgagggcaccttctgccagacagcctcggggcaggacggctctgggcccttcctggctgacttcaacggcttctcccacctggagctgagaggcctgcacacctttgcacgggacctgggggagaagatggcgctggaggtcgtgttcctggcacgaggccccagcggcctcctgctctacaacgggcagaagacggacggcaagggggacttcgtgtcgctggcactgcgggaccgccgcctggagttccgctacgacctgggcaagggggcagcggtcatcaggagcagggagccagtcaccctgggagcctggaccagggtctcactggagcgaaacggccgcaagggtgccctgcgtgtgggcgacggcccccgtgtgttgggggagtcccgaaatcccgcaaggttccgcacaccgtcctcaacctgaaggagccgctctacgtagggggcgctcccgacttcagcaagctggcccgtgctgctgccgtgtcctctggcttcgacggtgccatccagctggtctccctcggaggccgccagctgctgaccccggagcacgtgctgcggcaggtggacgtcacgtcctttgcaggtcacccctgcacccgggcctcaggccacccctgcctcaatggggcctcctgcgtcccgagggaggctgcctatgtgtgcctgtgtcccgggggattctcaggaccgcactgcgagaaggggctggtggagaagtcagcgggggacgtggataccttggcctttgacgggcggacctttgtcgagtacctcaacgctgtgaccgagagcgagaaggcactgcagagcaaccactttgaactgagcctgcgcactgaggccacgcaggggctggtgctctggagtggcaaggccacggagcgggcagactatgtggcactggccattgtggacgggcacctgcaactgagctacaacctgggctcccagcccgtggtgctgcgttccaccgtgcccgtcaacaccaaccgctggttgcgggtcgtggcacatagggagcagagggaaggttccctgcaggtgggcaatgaggcccctgtgaccggctcctccccgctgggcgccacgcagctggacactgatggagccctgtggcttgggggcctgccggagctgcccgtgggcccagcactgcccaaggcctacggcacaggctttgtgggctgcttgcgggatgtggtggtgggccggcacccgctgcacctgctggaggacgccgtcaccaagccagagctgcggccctgccccaccccatgagctggcaccagagccccgcgcccgctgtaattattttctatttttgtaaacttgtcgctttttgatatgattttcttgcctgagtgttggccggagggactgctggcccggcctcccttccgtccaggcagccgtgctgcagacagacctagtgctgagggatggacaggcgaggtggcagcgtggagggctcggcgtggatggcagcctcaggacacacacccctgcctcaaggtgctgagcccccgccttgcactgcgcctgccccacggtgtccccgccgggaagcagccccggctcctgaatcaccctcgctccgtcaggcgggactcgtgtcccagagaggaaggggctgctgaggtctgatggggcccttcctccgggtgaccccacagggcctttccaagcccctatttgagctgctccttcctgtgtgtgctctggaccctgcctcggcctcctgcgccaatactgtgacttccaaacaatgttactgctgggcacagctctgcgttgctcccgtgctgcctgcgccagccccaggctgctgaggagcagaggccagaccagggccgatctgggtgtcctgaccctcagctggccctgcccagccaccctggacatgaccgtatccctctgccacaccccaggccctgcgaggggctatcgagaggagctcactgtgggatggggttgacctctgccgcctgcctgggtatctgggcctggccatggctgtgttcttcatgtgttgattttatttgacccctggagtggtgggtctcatctttcccatctcgcctgagagcggctgagggctgcctcactgcaaatcctccccacagcgtcagtgaaagtcgtccttgtctcagaatgaccaggggccagccagtgtctgaccaaggtcaaggggcaggtgcagaggtggcagggatggctccgaagccagaaatgccttaaactgcaacgtnnnnnnnnnnnnnnnnnnnnnnnnnnnnnnnnnnnnnnnnnnnnnnnnngtcctcctaggagcaggacccgatgaagcgggcggcggtggggctgggtgccgtgttactaactctagtatgtttctgtgtcaatcgctgtgaaataaagtctgaaaacttt

SEQ ID NO: 355617 - DNA, 152 bp, Homo Sapiens
cccatcccatccccacccccagccccagcccagtcctcctaggagcaggacccgatgaagcgggcggcggtggggctgggtgccgtgttactaactctagtatgtttctgtgtcaatcgctgtgaaataaagtctgaaaactttaaaaaaaa

SEQ ID NO: 355618 - DNA, 246 bp, Homo Sapiens
  misc_feature (177)..(177): n is a, c, g, or t
  misc_feature (202)..(202): n is a, c, g, or t
gacatgaatggtatcctcctggggtatgagatccgctactggaaagctggggacaaagaagcagctgcggaccgagtgaggacagcagggctggacaccagtgcccgagtcagcggcctgcatcccaacaccaagtaccatgttgacccgtgagggcctacaacctggctggcactnggcctgccagcccttctgccaacgncacgaccatgtaagccccctccgcggcgacctcctgggcaacat

SEQ ID NO: 355619 - DNA, 2266 bp, Homo Sapiens
  misc_feature (232)..(232): n is a, c, g, or t
  misc_feature (798)..(810): n is a, c, g, or t
  misc_feature (1774)..(1865): n is a, c, g, or t
  misc_feature (2061)..(2073): n is a, c, g, or t
gagcaaaagggtaatcccttcacaaaacccggtttaagggacccccaaaaggtcctagcccggtttccctgctccattgggaaaagaaataaaaagggtttaggcccaatgggcctggttgggaagccggttccctcacttcttgcctgccggcccaaatggtcccaaggaataatccaagccattccaaaagttcactttgggtgcaactcattaagattcccaaaaagcncataatagtgcagccaagtaagcttctcctgatttaacaaaaagtgcttcatctttgcaggaggcccaacctcctatatataggtttctattcttgatttatttgcttcttcgaaaatctagaggaaaagaaagaagttattttccaggtacccttctcgcttttgccattagccaaggatagaagctgcagtggtattaattttgatataatctttcaaaccagcttcttgtggcttcccttttctttgttcaagatgagggccaggaggggaaacatagcacctgccctaaaccctgttcctggaggtcagcatttgatctgttgcaagcccctctttctgtcccctcttcctaccctgcctcccatgactttgctcctcacacttttggaaccatgccttccgggggggcccatctcttctggccgtccttgtctctgggccacttggagtgtgtgataaatcagtcaagctgttgaagtctcaggagtctctggtagcctgcagaagtaagcctcatcatcagagcctttcctcaaaactggagtcccaaatgtcatcaggnnnnnnnnnnnnncagccactaagaacccctctgcttttaactctagaatttgggcttggaccagatctaacatcttgaatactctgccctctagagccttcagccttaatggaaggtggatccaaggagggtgtaatggagcatcaagccactcggcggcagcatggagctataactaagcatcctttagggttctgcctctccaggcatttagccctcacattagatctagttactgtggtatggctaatacctgtcaacatttggaggcaatcctaccttgcttttgcttctagagcttagcatatctgattgttgtcaggccatattatcaatgtttacttttttggtactataaaagctttctgccacccctaaactccaggggggacaatatgtgccaatcaatagcacccctactcacatacacacacacctagccagctgtcaagggcagaatgaatctatgctggataagaaatggtggaactgcgttatgaagagctaatttactggacaaagaattccaaagcaaaaccagaacagtatgaatttgagcaggtctcataggttgagcaatttccccctaaaccaactgaaggctaaaaagcaacaggccattgtgaaccaatgcaagacgccctctatcatggtgaaaagctccatcaatgaggtatcttctttagtggtggtatgtaatggaacttagccatttttcaaagcaattgaaatgcattgctctggatctgttccttggcagtggactcagaaagccaacatgtggctcctcccagcccataaccagtatttttgctgcttctgaatacaaattggttggttttgacttcagattgaacttactgtagcctcagatgatttcccccctccgcctccaggaagaaagaatgttactgccttaataaaaaatgaaaagagaatgatgctcaaaatctttccaaataaaatgttccctatnnnnnnnnnnnnnnnnnnnnnnnnnnnnnnnnnnnnnnnnnnnnnnnnnnnnnnnnnnnnnnnnnnnnnnnnnnnnnnnnnnnnnnnnnnnnccccgcttggggtgaccaagaggggcgccccaatagagggggggcggcgcataataaaagaccgcaggagccaaagggcggcgcgcacgtgttttaaacacacggcgcggccgtgcgtgggtggagaaaaacaagtgcgtgtatcggggggaaaacctcttgtgtggaaggaggagaaaccccaaaatcattgctnnnnnnnnnnnnnacatactatttggtgggggaaacatatcaactcctgaggaggagaattattgaaaggccccttcagggggaaaatataaaacaatttacagggtgttattaggggtgttcaaaaaaagagggtgtttataaaggggggtgtgaagaaagtggtcgcatcaagggacattatattgaggaacaatttttcaggg

SEQ ID NO: 355620 - DNA, 2885 bp, Homo Sapiens
  misc_feature (2657)..(2669): n is a, c, g, or t
ggttcctggtcatacaccagtactaccaaggacagcttttttcctgcaagatctgttacctaaagcaataaaaaatggccagaggatcagtgtccgatgaggaaatgatggagctcagagaagcttttgccaaagttgatactgatggcaatggatacatcagcttcaatgagttgaatgacttgttcaaggctgcttgcttgcctttgcctgggtatagagtacgagaaattacagaaaacctgatggctacaggtgatctggaccaagatggaaggatcagctttgatgagtttatcaagattttccatggcctaaaaagcacagatgttgccaagacctttagaaaagcaatcaataagaaggaagggatttgtgcaatcggtggtacttcagagcagtctagcgttggcacccaacactcctattcagaggaagaaaagtatgcctttgtcaactggataaacaaagccctggaaaatgatcctgattgtcggcatgtcatcccaatgaaccccaaacacgaatggatctctttaatgctgtcggagatggcattgtcctttgtaaaatgatcaacctgtcagtgccagacacaattgatgaaagaacaatcaacaaaaagaagctaacccctttcaccattcaggaaaatctgaacttggctctgaactctgcctcacccatcgggtgccatgtggtcaacataggggctgaggacctgaaggaggggaagccttatctggtcctgggacttctgtggcaagtcatcaagattgggttgtttgctgacattgaactcagcagaaatgaagctctgattgctcttttgagagaaggtgagagcctggaggatttgatgaaactctcccctgaagagctcttgctgaggtgggctaattaccacctggaaaatgcaggctgcaacaaaattggcaacttcagtactgacatcaaggactcaaaagcttattaccacctgcttgagcaggtggctccaaaaggagatgaagaaggtgttcctgctgttgttattgacatgtcaggactgcgggagaaggatgacatccagagggcagaatgcatgctgcagcaggcggagaggctgggctgccggcagtttgtcacagccacagatgttgtccgagggaaccccaagttgaacttggcttttattgccaacctctttaacagataccctgccctgcacaaaccagagaaccagaacattgactggggggctcttgaaggtgagacgagagaagagcggacatttaggaactggatgaactccctgggtgttaaccctcgagtcaatcatttgtacagtgacttatcagatgccctggtcatcttccagctctatgaaaagatcaaagttcctgttgactggaacagagtaaacaaaccgccataccccaaactgggaggcaatatgaagaagcttgagaattgtaactacgcggtagaattggggaagaatcaagcgaagttctccctggttggcatcggtggacaagatctcaatgaaggaaaccgcactctcacactggccttgatttggcagctaatgagaaggtatacactgaatatcctcgaagaaattggtggtggccagaaggtcaatgatgacattattgtcaactgggtgaatgaaacattgagggaagcagagaaaagttcatccatctctagtttcaaggacccgaagattagtacaagtctgcctgttctggacctcatcgatgccatccaaccaggttccattaactatgaccttctgaagacagaaaatctgaatgatgatgagaaactcaacaatgcaaaatatgccatctctatggcccgaaaaattggagcaagagtgtatgccctgccagaagacctggttgaagtgaaccccaaaatggtcatgaccgtgtttgcctgcctcatggggaaaggaatgaagagggtgtgaggcccaatggggctgggtgggaggcggtgcactcactcctgactgcccggcacagatgctccagggatgattcaagccattccaaagttcaacttggtgacactctataagattccaaaaagcacatattagtgcagccaagtagcctctcctgtatttaacaaaaagtgcttcattctttgcaggaggcccaacctccctatatataggggttctattcttgatttatttgccttcttcgaaaatctagaagaaaaggaaagaagtaattttccaggtaccctttctcgcctttgccaatagccaagggatagaagctgcagtggtattaattttgatataatctttcaaaccagcttcatgtggcttcccttttctttgttcaagatgagggccaggaggggaaacatcacacctgccctaaaccctgttcctggaggtcagcatttgatctgttgcaagcccctctttctgtcccctcttcctaccctgcctcccatgactttgctcctcacacttttggaaccatgcctcccgggggggcccatctcttctggccgtccttgtctctgggccacttggagtgtgtgataaatcagtcaagctgttgaagtctcaggagtctctggtagcctgcagaagtaagcctcatcatcagagcctttcctcaaaactggagtcccaaatgtcatcaggnnnnnnnnnnnnncagccactaagaacccctctgcttttaactctagaatttgggcttggaccagatctaacatcttgaatactctgccctctagagccttcagccttaatggaaggttggatccaagggagggtgtaatgggagcatccagccactcggcgggcagcatggagctataaactagccatcccttttaggggttctgccctccttcagggcattttagcc

SEQ ID NO: 355621 - DNA, 1235 bp, Homo Sapiens
  misc_feature (96)..(151): n is a, c, g, or t
cttatcgtctatcccatggagtcactaggatctaagtgggtaacagtcatgtatgcatgtatgtgtatgtacgtatatactttgttggtgttggannnnnnnnnnnnnnnnnnnnnnnnnnnnnnnnnnnnnnnnnnnnnnnnnnnnnnnnggagtgactgggtgactgaaactgtacacatcaggctgtggttctgctcattgctggaagcgctgtcaagggtcctgccctcaaccccaggtctgacccttgcagcgcaggcaggacattctggaggaatcatgcccttgggaggatcctgaggagtgactggtgggtattggtggataaatacccctggtcccttgctctgggtatgatgactctgaagcacatgttctgtgctgtctctcagaggtacctggcagggctgagtcctggctgccacagtggaaactttcttgatgaaggtccctttaactgctgcattcctttcctgtctcagttccccactcctccactgatgtttcctgggattagcaccctaaggaagaactggcagtcgaattaatatcctagcgttatctccaaacaaaatttttgtatttgaatctttgcctcgggatctacttccaggaaattcagactaagacacacatttttcttttggctccttgaatccccataggcctgacattttgctgtttttatcaaaaaggaacatgaggatcagagagggaaagtcacttgcccaaagtcacccagctgaacagtggtagagttcaactttgatcatgagatgtctggccccaaggtggaggcttgctcctctcccatgggactccttccttatcagggtcaaatgaatgaatggaggatgttaaaagtggggtctctgatgcctttgccagataaaccccaggctcatggctggcgcctgttttctcattcttacctcattaagagtagtaatgaaaaacatgctcagtgctgaccgtgtgcctgggggtgttgtaggcactccacttactttaattcatttaattttcacaataaccttgtttttacttctagttgttatatgaaaaaactgaggcaaagagcaatacagagagttgcaaaaattcataccgctggtccaggtttgaaccaaacagtctgcacctggagtccttgtttgtaaccatggcaccctgtcttcacacatatctcatcgtggagttccatcttgtgttaggcatggcactgagcagct

SEQ ID NO: 355622 - DNA, 1914 bp, Homo Sapiens
  misc_feature (1284)..(1336): n is a, c, g, or t
agcaggctggtcccggcccgggtgtatggatgtccacgcacccagcgagcccaagcgccttctccgcaccaagagagctctcgggcactgagtcagttaagtccctactgctgggcagctcctcagtgtctccagtcccagatgaagactctcggtgctcagagagggaagccccacccaccagaagccaagatgtccagcaagcgggccaaagccaagaccaccaagaagcggccacagcgggccacatccaatgtcttcgcaatgtttgaccagtcccagatccaggagtttaaggaggctttcaacatgattgaccagaaccgtgatggcttcattgacaaggaggacctgcacgacatgctggcctcgctggggaagaaccccacagacgaatacctggagggcatgatgagcgaggccccggggcccatcaacttcaccatgttcctcaccatgtttggggagaagctgaacggcacggaccccgaggatgtgattcgcaacgcctttgcctgcttcgacgaggaagcctcaggtttcatccatgaggaccacctccgggagctgctcaccaccatgggtgaccgcttcacagatgaggaagtggacgagatgtaccgggaggcacccattgataagaaaggcaacttcaactacgtggagttcacccgcatcctcaaacatggcgccaaggataaagacgactaggccaccccagccccctgacaccccagccaccgccagtcacccctccccgcacacacccgtccataccagctccctgcccatgaccctcgctcagggatccccctttgaggggttagggtcccagttcccagtggaagaaacaggccaggagaagtgcgtgccgagctgaggcagatgttcccacagtgaccccagagccctgggctatagtctctgacccctccaaggaaagaccaccttctggggacatgggctggagggcaggacctagaggcaccaagggaaggccccattccggggctgttccccgaggaggaagggaaggggctctgtgtgccccccaggaggaagaggccctgagtcctgggatcagacaccccttcacgtgtatccccacacaaatgcaagctcaccaaggtcccctctcagtccccttccctacaccctgaccggccactgccgcacacccacccagagcacgccacccgccatgggagtgtgctcaggagtcgcgggcagcgtggacatctgtcccagagggggcagaatctccaatagaggactgagcactgnnnnnnnnnnnnnnnnnnnnnnnnnnnnnnnnnnnnnnnnnnnnnnnnnnnnngaagaagaacacaaagagaaacaccaacaaaagaaaagagagggggcggggactcgcagactcactactctggggcgcgacggggcacgagtactggggcacgagcccactttttatggtgaaccacgggtcgtccccacactagatgagagagtgtgtaataacaacagggagaccgccaggtcagggagatcccttatgtattaccaaaaacgcgacgcgctggtgcgtctagggcctacaaactcagctcgcgaatgtgctgggactcacaatacgtgggcgggaacacaccacctctttgagatgtgtggtgagcgatcggaccaaaataattgtagcggcacagacataccaagccccgttgcaaaacaggaggtgtttcgtatcaaacccactgtcgggtgaagagtcattcatccacgataacctcgtgagcgaggacatgtcgtctaggtatagtggtagccaacagcaacgccgagctgttgattagaacttgctcgaacaccaaagaatattcgtgtccgaagaatacgcgttgttacagttgtatcggacacaatatcttctccacg

SEQ ID NO: 355623 - DNA, 1070 bp, Homo Sapiens
  misc_feature (461)..(513): n is a, c, g, or t
ccacgctgccgccactcttatcacactcccatggcgggtggcgtgccctgggtggtgtcggcagtggccggtcaggtgtagggaaggggactgagaggggacctgtgtgagcttgcatttgtgtgggatacacgtgaaggggtgtctgaccccaggactcagggcctcttcctcctggggggcacacagagccccttcccttcctcctcggggaacagccccggaatggggccttcccttggtgcctctaggtcctgccctccagcccatgtccccagaaggtggtctttccttggaggggtcagagactatagcccagggctctggggtcactgtgggaacatctgcctcagctcggcacgcacttctcctggcctgtttcttccactgggaactgggaccctaacccctcaaagggggatccctgagcgagggtcatgggcagggagctggtatggacnnnnnnnnnnnnnnnnnnnnnnnnnnnnnnnnnnnnnnnnnnnnnnnnnnnnntggcctaagtcgtctttatccttggcgccatgtctgaggatgcgggtgaactccacgtagttgaagttgcctttcttatcaatgggtgcctcccggtacatctcgtccacttactcatcctgtgaagcggtcacccatggtggtgagcagctcccggaggtggtcctcatggatgaaacctgagccttcctcgtacgaatgcaggcaaaggcgtttgcaaaatcacatcctcggggtccgtgccgttcagcttctccccaaacatggtgaggaacatggtgaagttgatgggccccggggcctcgctcatcatgccctccaggtattcgtctgtggggttcttccccagcgaggccagcatgtcgtgcaggtcctccttgtcaatgaagccatcacggttctggtcaatcatgttgaaagcctccttaaactcctggatctgggactggtcaaacattgcgaagacattggatgtggcccgctgtggccgcttcttggtggtcttggctttggcccgcttgctggacatcttggcttctggtgggtggggcttccct

SEQ ID NO: 355624 - DNA, 1120 bp, Homo Sapiens
ggaattcccgggatggcccagttccacgcacccagcgagcccaagcgccttctccgcaccagggaagccccacccaccagaagccaagatgtccagcaagcgggccaaagccaagaccaccaagaagcggccacagcgggccacatccaatgtcttcgcaatgtttgaccagtcccagatccaggagtttaaggaggctttcaacatgattgaccagaaccgtgatggcttcattgacaaggaggacctgcacgacatgctggcctcgctggggaagaaccccacagacgaatacctggagggcatgatgagcgaggccccggggcccatcaacttcaccatgttcctcaccatgtttggggagaagctgaacggcacggaccccgaggatgtgattcgcaacgcctttgcctgcttcgacgaggaagcctcaggtttcatccatgaggaccacctccgggagctgctcaccaccatgggtgaccgcttcacagatgaggaagtggacgagatgtaccgggaggcacccattgataagaaaggcaacttcaactacgtggagttcacccgcatcctcaaacatggcgccaaggataaagacgactaggccaccccagccccctgacaccccagcccccgccagtcacccctccccgcacacacccgtccataccagctccctgcccatgaaccctcgctcagggatccccctttgaggggttagggtcccagttcccagtggaagaaacaggccaggagaagtgcgtgccgagctgaggcagatgttcccacagtgaccccagagccctgggctatagtctctgacccctcccaagaaagaccacctttctggggacatgggcctggaaggcaagaccctagaaggcaccaagggaaaggcccatttccggggcttgttccccaaggaagaaagggaaaggggctctggtgtgcccccccaggaggaaaaaggcccttgagtcctgggaatcaaacaccccttttaggggattccccacaccaaattgcaagcttaccaaggtccccctcttcagtcccccttcccctaaaccctgaaccgggcaatggcgggaaacccacccggaagccgcccaccccc

SEQ ID NO: 355625 - DNA, 1488 bp, Homo Sapiens
  misc_feature (18)..(18): n is a, c, g, or t
  misc_feature (20)..(20): n is a, c, g, or t
  misc_feature (23)..(23): n is a, c, g, or t
  misc_feature (342)..(342): n is a, c, g, or t
  misc_feature (1042)..(1092): n is a, c, g, or t
  misc_feature (1187)..(1226): n is a, c, g, or t
  misc_feature (1317)..(1317): n is a, c, g, or t
  misc_feature (1319)..(1319): n is a, c, g, or t
  misc_feature (1376)..(1376): n is a, c, g, or t
  misc_feature (1429)..(1429): n is a, c, g, or t
  misc_feature (1486)..(1486): n is a, c, g, or t
gtgctcctcagtgtgcgnancgncccctgccgcggcgcctcgcctcccggctcacctccccaccccacctgcccgctgcggctctccgcgggagatctcaccgttctggagacagggctcgctcgctctcacggcttcttagcccgggcttggacagccgccttccggccagaggggatgaggttgcgctgcgctccgggagcgccgatggcgtgactggccccgcgcggagcagcgacagtaaggctgtgtggggggagctgggacctaagccgcgcgcacacccctttctctgcgtctggtggaggtgcacagaggcttttgagtcaggcccaagcgcancaggtgacctccccgcggcctttcaagcctgagctcggtggacagctccctctcccgtgagtcccgctgtcctgtacgcgcccggtcgagccccgggctgcgcaccccgctaggaggtgggtactcgtcctccaggagttgccggtgagcccttgaccgtggcaggtcccctccagccgcgagcgacccctcagtacctgccgatgcctgctggtctctggcatcctccagtcgagggtcagggtcagggagcaaggcctcacgcgggcgccctccttgcagctgcccggccagcccgcttctctgcccggagccatgaatctcagtagcgccagtagcacggaggaaaaggcagtgacgaccgtgctctggggctgcgagctcagtcaggagaggcggacttggaccttcagaccccagctggaggggaagcagagctgcaggctgttgcttcatacgatttgctttgggggagaaagccaaagaggagatgcatcgcgtggagatcctgcccccagcaaaccaggaggacaagaagatgcagccggtcaccattgcctcactccaggcctcagtcctccccatggtctccatggtaggagtgcagctttctcccccagttactttccagctccgggctggctcaggacccgtgttcctcagtggccaggaacgttatgaagcatcagacctaacctgnnnnnnnnnnnnnnnnnnnnnnnnnnnnnnnnnnnnnnnnnnnnnnnnnnntgatgaggatgaggatgcagatatatctctggaggagcaaagccctgtcaaacaagtcaaaaggctggtgccccagaagcaggcgagcgtggctnnnnnnnnnnnnnnnnnnnnnnnnnnnnnnnnnnnnnnnnccagcgttagagacaagagcccggtgaaaaaggccaaagccacagccagagccaagaagccaggattcaagcaaatgaggagccacgcctntnggggggcacggtgcaaagatgggccttccctgggctgtgctgcaggcacagggtgcncctgtccagcccctccacctgtgtctgaatgcaacaggggtgttgcgggggcnacatgagagctcctcaccccccactctccactttcaggaggcccccagtgaagagcncc

SEQ ID NO: 355626 - DNA, 490 bp, Homo Sapiens
  misc_feature (341)..(407): n is a, c, g, or t
ctaggtagcgaggcctgggtggcgaattcggcacgagggcggacttggaccttcagaccccagctggaggggaagcagagctgcaggctgttgcttcatacgatttgcttgggggagaaagccaaagaggagatgcatcgcgtggagatcctgcccccagcaaaccaggaggacaagaagatgcagccggtcaccattgcctcactccaggcctcagtcctccccatggtctccatggtaggagtgcagctttctcccccagttactttccagctccgggctggctcaggacccgtgttcctcagtggccaggaacgttatgaagcatcagacctaacctnnnnnnnnnnnnnnnnnnnnnnnnnnnnnnnnnnnnnnnnnnnnnnnnnnnnnnnnnnnnnnnnnnntgcagatatatctctggaggagcaaagccctgtcaaacaagtcaaaaggctggtgccccagaagcaggcggagcgtggctgag

SEQ ID NO: 355627 - DNA, 1807 bp, Homo Sapiens
  misc_feature (1557)..(1557): n is a, c, g, or t
  misc_feature (1621)..(1621): n is a, c, g, or t
  misc_feature (1669)..(1669): n is a, c, g, or t
  misc_feature (1674)..(1675): n is a, c, g, or t
  misc_feature (1679)..(1679): n is a, c, g, or t
  misc_feature (1694)..(1695): n is a, c, g, or t
  misc_feature (1705)..(1705): n is a, c, g, or t
  misc_feature (1724)..(1726): n is a, c, g, or t
  misc_feature (1743)..(1743): n is a, c, g, or t
atcaggccaaatcggccgagctcgaattcgtcgagagcggagggcggctgccgccgctgccgctgctgctgttatgctactgctgctgccgccgcctctgcttccactcggctctgactggcaggcagaaagtgcaactgacgagggaaaggtctctgcagtgagtggagagcctacataaaagagagtaaagaggggcaaaaacccagatcagaatgcaggcgacgtccaaccttctcaacctcctgctgctgtctttgtttgccggattagatccttccaagactcagattagtcctaaagaagggtggcaggtgtacagctcagctcaggatcctgatgggcggtgcatttgcacagttgttgctccagaacaaaacctgtgttcccgggatgccaaaagcaggcaacttcgccaactactggaaaaggttcagaacatgtcccagtctattgaagtcttaaacttgagaactcagagagatttccaatatgttttaaaaatggaaacccaaatgaaagggctgaaggcaaaatttcggcagattgaagatgatcgaaagacacttatgaccaagcattttcaggagttgaaagagaaaatggacgagctcctgcctttgatccccgtgctggaacagtacaaaacagatgctaagttaatcacccagttcaaggaggaaataaggaatctgtctgctgtcctcactggtattcaggaggaaattggtgcctatgactacgaggaactacaccaaagagtgctgagcctgggaaaacaagacttcgttgactggcatgaaaaaagctaaacatgtgggcaaacgtgatgaaaattcacaggcccagttacagtcaaggacatctgggaacccgatttggggcttggatgacagaccctttagcatctgagaaaaacaacagagtctggtacatggacagttatactaacaataaaattgttcgtgaatacaaatcaattgcagactttgtcagtggggctgaatcaaggacatacaaccttcctttcaagtgggcaggaactaaccatgttgtctacaatggctcactctatattaacaagtatcagagtaatatcatcatcaaatacagctttgatatggggagagtgcttgcccaacgaagcctggagtatgctggttttcataatgtttacccctacacatggggtggattctctgacatcgacctaatggctgatgaaatcgggctgtgggctgtgtatgcaactaaccagaatgcaggcaatattgtcatcagccaacttaaccaagataccttggaggtgatgaagagctggagcactggctaccccaagagaagtgcaggggaatctttcatgatctgtgggacactgtatgtcaccaactcccacttaactggagccaaggtgtattattcctattccaccaaaacctccacatatgagtacacagacattcccttccataaccaatactttcacatatccatgcttgactacaatgcaagagatcgagctctctatgcctggaacaatggccaccaggtgctgtncaatgtcacccttttccatatcatcaagacagaggatgccacataggcaaatgtgacatgttcncattgattcaaacagtgtgatttgtgataaactctataagaccccttnccgtnntttncttcactattatttnngcatcatttncttccaaagcaaagcattnnntatttgtaaagttggcnggtcccaaaaccatttgctgagccttgccttaacttacaatgtgtggaaacacatctggaactt

SEQ ID NO: 355628 - DNA, 1045 bp, Homo Sapiens
  misc_feature (543)..(543): n is a, c, g, or t
  misc_feature (550)..(550): n is a, c, g, or t
  misc_feature (976)..(976): n is a, c, g, or t
  misc_feature (979)..(979): n is a, c, g, or t
  misc_feature (982)..(983): n is a, c, g, or t
  misc_feature (989)..(989): n is a, c, g, or t
  misc_feature (1003)..(1003): n is a, c, g, or t
  misc_feature (1007)..(1007): n is a, c, g, or t
  misc_feature (1020)..(1020): n is a, c, g, or t
  misc_feature (1027)..(1027): n is a, c, g, or t
  misc_feature (1036)..(1036): n is a, c, g, or t
cggaattcccgggatgggggtctgtggctgctgggctggcggggcgcaggccgcgggacccgagcccggggaaacgagagagcggaggcgccgaggatccgattcactccctggggagacctatgggccgaagccgtgtaaatgcgttttaagaggcctcggctccgcaactgccactcctcctcggggtgttgcacaagtttcgaggtcaccggcgaccccccctagcagcgcgcctggctctggcccccgcgaaggaggacggagtttgtgtgttgcatactttctaaggcggcggctgcagcagcggctccatccagcccgtcagctcctcctgcaaggcatggctggctacctgagtgaatcggactttgtgatggtggaggagggcttcagtacccgagacctgctgaaggaactcactctgggggcctcacaggccaccacggacgaggtagctgccttcttcgtggctgacctgggtgccatagtgaggaagcacttttgctttctgaagtgcctgccacgagtccggcccttttntgctgtnaagtgcacagcagcccaggtgtgctgaaggttctggcccagctggggctgggctataagctggtgccaacaaggcagagatggagttggtccagcatattggaatccctgccagtaagatcatctgcgccaacccctgtaagcaaattgcacagatcaaatatgctgccaagcatggggatccagctgctgagctttgacaatgagatggagctggcaaaggtggtaaagagccaccccagtgccaagatggttctgtgcattgctaccgatgactcccactccctgagctgcctgagcctaaagtttggagtgtcacttgaaatcctgcagacacctgcttgaaaatgcgagaagcaccatgtggaggtggtgggtgtgagtttcacattggcagtggctgtcctgacctcagcctatgctcagncancgnnacgccngctcgtgtttgaangggnacgagctggtcanaaatgangtctggacnttgtggtgg

SEQ ID NO: 355629 - DNA, 1059 bp, Homo Sapiens
  misc_feature (784)..(784): n is a, c, g, or t
  misc_feature (885)..(887): n is a, c, g, or t
  misc_feature (924)..(924): n is a, c, g, or t
  misc_feature (933)..(933): n is a, c, g, or t
  misc_feature (938)..(938): n is a, c, g, or t
  misc_feature (945)..(945): n is a, c, g, or t
  misc_feature (947)..(947): n is a, c, g, or t
  misc_feature (953)..(953): n is a, c, g, or t
  misc_feature (956)..(956): n is a, c, g, or t
  misc_feature (958)..(958): n is a, c, g, or t
  misc_feature (977)..(977): n is a, c, g, or t
  misc_feature (983)..(983): n is a, c, g, or t
  misc_feature (986)..(986): n is a, c, g, or t
  misc_feature (992)..(992): n is a, c, g, or t
  misc_feature (994)..(994): n is a, c, g, or t
  misc_feature (1001)..(1001): n is a, c, g, or t
  misc_feature (1011)..(1011): n is a, c, g, or t
  misc_feature (1017)..(1017): n is a, c, g, or t
  misc_feature (1021)..(1021): n is a, c, g, or t
  misc_feature (1023)..(1023): n is a, c, g, or t
  misc_feature (1027)..(1027): n is a, c, g, or t
  misc_feature (1031)..(1031): n is a, c, g, or t
  misc_feature (1044)..(1044): n is a, c, g, or t
  misc_feature (1047)..(1047): n is a, c, g, or t
cgggggattcctttcctgctgccccctctccctcaccgcccacatctaggcattaccaagctctgtgaattctgcctccttaaataagcctccagtgtgcttatgtggaacctcgctttctagttcagtcttcctctctccaaaggccccctgatctcccggtctcatgccaccccctccaaaggtatcatagtcctgttcaaaatctgaatttggcaattctccactgcctacaggatcaagtcagagcttccctgcctccatagccccattcccagctttccccacagtatatattatgctccttcggagctgaatgactcaatttgcatttcccaatgatgctgtgtgcccaatgatgctattaccatgcctttgcccaggctgttccttctgcctgcagcatccttctctcagcctctcccctctttacccctttctagtcattccttgcttctcatcagtgttgcctttcctgatcgccccaggcagattttctattttctttctccatgcccctgcattgcaccttgtagaaactgccatctaacatctgctgaatggacttgtaagtacttaaggggtttcttttcttccagacccaagctccttcagaacaacagtactgtttggtcatctctgtcccttagcataacgtttggcaccaagtgggcatgagtaaaaaagtgttgcatgaaagggaaactgagtcccagggaagcaactctggaagggtcccttccacatttaagtaatgtggtctcacccacagcctcatacatgntttggcctttagcacatctacaatgaacagttgtccatagggataggttgcagtgtcagtgggactagcttaaggcttcattgagcactgtgtttggaagnnntgagctgtaggtcatagctttgcctttagggagttancctttctanaaggnaaaagcnangcagtntgnanctggaacaaagcaaagcancggggnttnaaaaananttgcttntggttggggngggggntttntntaanttangttttcccaaaanggngggggggttttc

SEQ ID NO: 355630 - DNA, 1087 bp, Homo Sapiens
  misc_feature (956)..(956): n is a, c, g, or t
  misc_feature (990)..(990): n is a, c, g, or t
  misc_feature (994)..(994): n is a, c, g, or t
  misc_feature (1000)..(1000): n is a, c, g, or t
  misc_feature (1010)..(1010): n is a, c, g, or t
  misc_feature (1013)..(1013): n is a, c, g, or t
  misc_feature (1018)..(1018): n is a, c, g, or t
  misc_feature (1022)..(1025): n is a, c, g, or t
  misc_feature (1029)..(1029): n is a, c, g, or t
  misc_feature (1031)..(1031): n is a, c, g, or t
  misc_feature (1037)..(1038): n is a, c, g, or t
  misc_feature (1045)..(1045): n is a, c, g, or t
  misc_feature (1051)..(1051): n is a, c, g, or t
  misc_feature (1056)..(1056): n is a, c, g, or t
  misc_feature (1061)..(1061): n is a, c, g, or t
  misc_feature (1063)..(1063): n is a, c, g, or t
  misc_feature (1066)..(1068): n is a, c, g, or t
  misc_feature (1076)..(1077): n is a, c, g, or t
  misc_feature (1082)..(1082): n is a, c, g, or t
ggaccggtccggaattcccgggattggctgctgggctggcggggcgcaggccgcgggacccgagcccggggaagcgagagagcggaggcgccgaggatccgattcactccctggggagacctatgggccgaagccgtgtaaatgcgttttaagcagaggcctcggctccgcaactgccactcctcctcggggtgttgcacaagtttcgaggtcaccggcgaccccccctagcagcgcgcctggctctggcccccgcgaaggaggacggagtttgtgtgttgcatactttctaaggcggcggctgcagcagcggctccatccagcccgtcagctcctcctgcaaggcatggctggctacctgagtgaatcggactttgtgatggtggaggagggcttcagtacccgagacctgctgaaggaactcactctgggggcctcacaggccaccacggacgaggtagctgccttcttcgtggctgacctgggtgccatagtgaggaagcacttttgctttctgaagtgcctgccacgagtccggcccttttatgctgtcaagtgcaacagcagcccaggtgtgctgaaggttctggcccagctggggctgggctttagctgtgccaacaaggcagagatggagttggtccagcatattggaatccctgccagtaagatcatctgcgccaacccctgtaagcaaattgcacagatcaaatatgctgccaagcatgggatccagctgctgagctttgacaatgagatggagctggcaaaggtggtaaagagccaccccagtgcccaagatggttctgtgcattgctaccgatgactcccactccctgagctgccctgaccctaaagtttggagggccactgaaaatcctgcagaacacctgcttgaaaatgcgaagaagcaccatgtggaggtggtgggtgtgagttttcacattggcagtggntgtctggacctccaggctatgctcagtccatcgnagangccggntcgtgttttnaanggggncgannnngggnanaaaatnncgttctngacttngtggnggttncntgnnnaaaagggnnaaatnagatt

SEQ ID NO: 355631 - DNA, 2182 bp, Homo Sapiens
gtggctgctgggctggcggggcgcaggccgcgggacccgagcccggggaaacgagagagcggaggcgccgaggatccgattcactccctggggagacctatgggccgaagccgtgtaaatgcgttttaagaggcctcggctccgcaactgccactcctcctcggggtgttgcacaagtttcgaggtcaccggcgaccccccctagcagcgcgcctggctctggcccccgcgaaggaggacggagtttgtgtgttgcatactttctaaggcggcggctgcagcagcggctccatccagcccgtcagctcctcctgcaaggcatggctggctaacttgagtgaatcggactttgtgatggtggaggagggcttcagtacccgagacctgctgaaggaactcactctgggggcctcacaggccaccacgtcattccttgcttctcatcagtgtttgcctttcctgatcgccccaggcagattttctattttctttctccatgcccctgcattgcaccttgtagaaactgccatctaacatctgctgaatggacttgacgaggtagctgccttcttcgtggctgacctgggtgccatagtgaggaagcacttttgctttctgaagtgcctgccacgagtccggcccttttatgctgtcaagtgcaacagcagcccaggtgtgctgaaggttctggcccagctggggctgggcttttagctgtgccaacaaggcagagatggagttggtccagcatattggaatccctgccagtaagatcatctgcgccaacccctgtaagcaaattgcacagatcaaatatgctgccaagcatggggatccagctgctgagctttgacaatgagatggagctggcaaaggtggtaaagagccaccccagtgccaagatggttctgtgcattgctaccgatgactcccactccctgagctgcctgagcctaaagtttggagtgtcactgaaatcctgcagacacctgcttgaaaatgcgaagaagcaccatgtggaggtggtgggtgtgagttttcacattggcagtggctgtcctgaccctcaggcctatgctcagtccatcgcagacgcccggctcgtgtttgaaatgggcaccgagctgggtcacaagatgcacgttctggaccttggtggtggcttccctggcacagaaggggccaaagtgagatttgaagagattgcttccgtgatcaactcagccttggacctgtacttcccagagggctgtggcgtggacatctttgctgagctggggcgctactacgtgacctcggccttcactgtggcagtcagcatcattgccaagaaggaggttctgctagaccagcctggcagggaggaggaaaatggttccacctccaagaccatcgtgtaccaccttgatgagggcgtgtatgggatcttcaactcagtcctgtttgacaacatctgccctacccccatcctgcagaagaaaccatccacggagcagcccctgtacagcagcagcctgtggggcccggcggttgatggctgtgattgcgtggctgagggcctgtggctgccgcaactacacgtaggggactggctggtctttgacaacatgggcgcctacactgtgggcatgggttcccccttttgggggacccaggcctgccacatcacctatgccatgtcccgggtggcctgggaagcgctgcgaaagcagctgatggctgcagaacaggaggatgacgtggagggtgtgtgcaagcctctgtcctgcggctgggagatcacagacaccctgtgcgtgggccctgtcttcaccccagcgagcatcatgtgagtgggcctcgttccccccggagaatcccagcggggcctcagagatgcatctgggagaggtggggaagatggcaggcaagggtacccttggccaggactctggtgcccaccctgccacccccgcgctccacctgcagtgtttctgccctgtaaataggaccagtcttacactcgctgtagttcaagtatgcaacataaatcctgttccttccagctgtgtctgcctcctctgcagtgcaaggggcctggtcagccaggtgtgggggtgttcttggggtctcctttggtctccttcccacctttgtaaatataatgcaaataaataaatatttaggtttttaaaaactgaaa

SEQ ID NO: 355632 - DNA, 502 bp, Homo Sapiens
catctctgaggccccgctgggattctccggggtgaacgaggcccactcacatgatgctcgctggggtgaagacaggccacacgcacagggtgtctgtgatctcccagccgcaggacagaggcttgcacacaccctccacgtcatcctcctgttctgcagccatcagctgcccttcgcagcgcttccctaggggtgagagaggggtgctgcaagtagccaagcatgggactggcagggacactgtacactggagacgcagccccattgggcagagggctctcacgtgagcaccgagctcagctgagggcaggggcagggacaggctgctgacccctccccaactgcttcctactcccgtgtggtccccacccctcaacaagggaaagaaatccacatgtatcgagcatttactacatgccagacatcatgccaggcacttatattatctatttgtatctacccaaaaaccccatcagagagagctgcaaagatcctgtagagt

SEQ ID NO: 355633 - DNA, 2028 bp, Homo Sapiens
  misc_feature (2001)..(2001): n is a, c, g, or t
atcaggccaaatcggcgagctcgaattcgtcgagagcggatgctcagctcagctcggccctcgccttgatttattttttttctgggcggccgctgcgacccgggactgacttcgggatgggaagtggagcccccggagctgctaccgtggcggcggcgctgtgaggagcagccagggggaggcagctgcggctcgccggtgagtatccgggaagcgccaccatggggctccgtaagaagagcaccaagaacccccccgttctcagccaggaattcatcctgcagaatcatgcggacatcgtctcctgcgtggggatgttcttcctgctggggcttgtgttcgagggaacagcagaagcatccatcgtgtttctcactcttcagcacagtgttgctgcccctgcagcagaggaacaagccacgggctcaaagtccctctattattatggtgtcaaagatttggccacggttttcttctacatgctggtggcaatcattattcatgccacaattcaggaatatgtgttggataaaattaacaagagaatgcagttcaccaaagcgaaacaaaacaagtttaacgagtctggtcagtttagtgtgttctactttttttcttgtattcggggcacattcattttaatctctgaaaactgcctgtcagacccaactcttatatggaaggctcgtccccatagcatgatgacatttcaaatgaagtttttctacatatcccagttggcttactgggtttcatgcttttcctgaactctacttccagaaaaccaaaaaacaagacatccctcgtcaacttgtctacattggtcttcacctcttccacattactggagcttatctcttgtacttgaatcatttgggacttcttcttttggtactgcattattttgttgaattactttcccacatgtgcggcctgttttactttagtgatgaaaagtaccagaaaggcatatctctgtgggccattgtgtttatcttgggtagacttgtgactttaattgtttccgtactcactgttgggtttcacctggctggatcgcagaatcggaatcctgatgcccttactggaaatgtaaatgtgttggcagctaaaattgctgttctgtcgtccagttgcacgatccaagcctacgtaacatggaacttaattactctctggcttcagaggtgggtagaagattctaatattcaggcctcatgtatgaaaaagaaacggtcgagatcttctaaaaaaagaacagaaaacggagtgggagtggaaacttcaaatagagtagactgtccgccaaagaggaaagagaaatcttcataatctttgcaagcgcattgattaatgtctgcaaaggaatctgctctttgaggtttctttctgcactagagatttttctgtttttgaaaatagttcgtgctcttcggtttttgttattgaactgtttcatgtattttttaaagacatttgaggggaggaggattattatgaatgggaaaaaaagattttggttgagactaaattactcatcgtcaaaataatgtcaaaatagttttggggatcaccactatattttgttttgatttttaacctttcaacattttcctaatgatttgcagagataactgcacaattttgcatatcaatgatactggttcttactcccaccagtgtttcataatactaacaagatggtctctcctagcaagattatgtgtttaatgcttgctttggggtaaaataaaagtacgaaaaaggtggaagtcaaatcagtattctgtaattgttagaatttattttttaagaacttacaactcagaaaagattgctagactcaccaaaataataaatgttctttattttacaggtagtgattattagtgcttcatccccatttaaaaaaacacagtactaatgggtaacacatatggaggtttgctgccatatatattgcatcaaaatatcattaattaatataaaaatattaaaatnattcctgtccattccacttgtaaatgg

SEQ ID NO: 355634 - DNA, 1152 bp, Homo Sapiens
  misc_feature (1133)..(1133): n is a, c, g, or t
agcgggcggcccggcggctgcgtactggctgtgggatgggaagtgaagccccagcgagcggctgcagcggggccgtgaggagcagccagcgggaggcggcggcgagtcggtgagcagctgggaagagcagaaccggggcggagcacctgcaggcgcgggcggcggccccaccatggcgattcgcaagaaaagcaccaagagccccccagtgctgagccacgaattcgtcctgcagaatcacgcggacatcgtctcctgtgtggcgatggtcttcctgctggggctcatgtttgagataacggcaaaagcttctatcatttttgttactcttcagtacaatgtcaccctcccagcaacagaagaacaagctactgaatcagtgtccctttattactatggcatcaaagatttggctactgttttcttctacatgctagtggcgataattattcatgccgtaattcaagagtatatgttggataaaattaacaggcgaatgcacttctccaaaacaaaacacagcaagtttaatgaatctggtcagcttagtgcgttctacctttttgcctgtgtttggggcacattcattctcatctctgaaaactacatctcagacccaactatcttatggagggcttatccccataacctgatgacatttcaaatgaagtttttctacatatcacagctggcttactggcttcatgcttttcctgaactctacttccagaaaaccaaaaaagaagatattcctcgtcagcttgtctacattggtctttacctcttccacattgctggagcttaccttttgaacttgaatcatctaggacttgttcttctggtgctacattattttgttgaatttcttttccacatttcccgcctgttttattttagcaatgaaaagtatcagaaaggatttttctctgtgggcaggtcttttttggtttggggaagacttctgaccttaaattctttcagtacctgactgttgggttttgggccttgcaagagcaggaaaatcaggaagctgggattttcagtactgggaaacttcaatgtgttaggctgttagaatcgctgttccggcatccatttggcgttactcagggcattttatggatgtgggaagnttcattaattttcagcctt

SEQ ID NO: 355635 - DNA, 1960 bp, Homo Sapiens
agcgggagtccccgccccgccacttccggtcccgccgccgggagccggtgcggctgtgaggggccgcgtctcgcagcagccgcccggaccgggcatggtgttgggcgccgggcccgcctcgcctgtctcggggagcccagggtaaaggcagcagtaatgctaacgctagcaagtaaactgaagcgtgacgatggtctcaaagggtcccggacggcagccacagcgtccgactcgactcggagggtttctgtgagagacaaattgcttgttaaagaggttgcagaacttgaagctaatttaccttgtacatgtaaagtgcattttcctgatccaaacaagcttcattgttttcagctaacagtaaccccagatgagggttactaccagggtggaaaatttcagtttgaaactgaagttcccgatgcgtacaacatggtgcctcccaaagtgaaatgcctgaccaagatctggcaccccaacatcacagagacaggggaaatatgtctgagtttattgagagaacattcaattgatggcactggctgggctcccacaagaacattaaaggatgtcgtttggggattaaactctttgtttactgatcttttgaattttgatgatccactgaatattgaagctgcagaacatcatttgcgggacaaggaggacttccggaataaagtggatgactacatcaaacgttatgccagatgataaaaggggacgattgcaggcccatggactgtgttacagtttgtctctaacatgaaacagcaagaggtagccccctctcccgtcctcatgctccctctcagtcccctggattgccccagtcctgtgaccatgttgccctgaagaagaccatcttcatgactgctcattgtagatggagaattcaacataaatacagcaagaaaatgtgtttgggcttctgaagagttgtctgcttaccttaacatgtttacttttttgaacttgtactgtataggctgttggtgaaattcttaagaagttgtaatgaactcaaaattgaggccagagcttgctttcccttttcccaaacaaaattggttttctgcacaagcgatgctaatgatgtgttcagtgtaactcgcagattggcaataagatacccgctacaaactgtgattggatgcaaaatctcttagcttctttcacgaatgttggccctgcctagatgttgtgaagcctcccagaatgcatagagtcattcactgtagatctcttattgaaatgcgtattttatttaatgtaagtatattttggaacagatttgtaatttgtacaattcaatgctttaattattttttctattctcatttagtttgtattttcattgtatagagcagacagaaagatgttggtcaagcaactattgaagagaaatacaaagaaaatatgaaaggcacattattcattttgtccaaatgcaatgagaatctcactcttaaaaatcagctcttgctttcgggtccggatgtggtgagcacattttggagccctttgaagctagatttggatgatcaaaacaggcagggagcccattctcatgctgcccagaggctggctggagcctggaccagctggggctgatgcttttgcagtggtcatgtgattgtgacctggtagctacttatcagagagccagaccctgctgtcctgggagacaggagcgatgcctcaggaatcagcccaatgtctgatgtcactgagactgtacctgtggccttcttctgagtttgctatggctccaggccctgccggtggggtgagcctcctaggccttggaggaccaggagtcaacagtggcatatgccatcctcggccaggttaatatactgcagaggaaaagccctgaagagaggcaagtggatttactccagcatgtagacatttgaaccagtgaaatcaaacacaaaataaatgtctgtctagtttc

SEQ ID NO: 355636 - DNA, 1439 bp, Homo Sapiens
  misc_feature (130)..(179): n is a, c, g, or t
  misc_feature (260)..(260): n is a, c, g, or t
  misc_feature (346)..(346): n is a, c, g, or t
  misc_feature (744)..(749): n is a, c, g, or t
  misc_feature (751)..(751): n is a, c, g, or t
  misc_feature (753)..(755): n is a, c, g, or t
cggtccggaattcccgggatggcggaatggcggcggctgcggactcgttctcaggcggccccgcgggggtgcggcttccgaggtcgccgccactcaaggtgctggcggacagctgcggcgcgacgcggannnnnnnnnnnnnnnnnnnnnnnnnnnnnnnnnnnnnnnnnnnnnnnnnncgctggacctggcggccgtgtggatgcagggcagggtagtgatggcggaccgcggcgaggctcggctgagggacccgagcngggacttctcggtccgcggcctggagcgggtgccgcgcgggcggccctgtctagtcccaggaaagtatgttatggtgatgggagtngttcaggcctgcagccctgagccctgcctgcaggctgtgaagatgacagacctttctgataatcccatccatgaaagtatgtgggaactggaggtagaagatttacacaagaatattccttagagtatgttggaactgtcgttaaaaacaaccaaaatcccgaaactatttagaagcttataatgatgtgggttccatggacacttttcaatgcgtatttttcaaatgcttctcagagagccttgctttggttgaccaaggagtccggatgtaggaatgtttaaatcctcggatacttcagtgacacagcctctgctgccccttgctttgcctgtgtttgctgatgaaaagcagatgcttgtgtttcattttccttcctggtttgtgtgtgttaaaannnnnncncnnncacagacacagaagactcatgttgcattttccaaattttatgagtgatgatactttttccattactgctgcgtccctgttttacaatgcaaaatttaagtacggtcattgcccatggtgattaaagtgtggttatgggcaggaagacagactgtgtaaaaaaggaatgacatcctggctcctcatcttcttcatcagcaactaccataaccagtttgcgagtcaaatggcatttcctaacggcaggcatggcggcccctgaaagacaacagctccctttctgcttcggacaccactcaaacatttagacgcagctctatcccttttcctagctagagaaggtgatgccttcttccattactcagagatgttgagacgttttcagaatttcttgttgaaatgaaaaacatcaagataaaggacgcctttcaggcattagctaaacttccacttcataactttcggcgagacatggtgagcctcctggtgtagagttcttttgtctttgtatggaatgactttttgctgtgatggttttgaatgttgggtttctgctgtctgcttagtacccatgcctgaattttttgagattgtaaatatcaaaggagttagattgtgttctgacatggttgtagactttcacctggattattgatattctacctctaataaatccctaataggc

SEQ ID NO: 355637 - DNA, 1487 bp, Homo Sapiens
acttcgacttcgagggagactcagatgactccactcagcctcaaggtcactccctgcacctgtcctcagtccctgaggccagggacagcccacagtccctcacagatgagtcctgctcagagaaggcagcccctcacaaggctgagggcctggaggaggctgatactggggcctctgggtgccactcccatccggaagagcagccgaccagcatctcaccttccagacacggcgccctggctgagctctgcccgcctggaggctcccacaggatggccctggggactgctgctgcactcgatctttgagctgaataagcatatttcagctgtggaatgcctgctgacctacctggagaacacagttgtgcctcccttggccaagggtctaggtgctggagtgcgcacggaggccgatgtagaggaggaggccttgaggaggaagctggaggagctgaccagcaacgtcagtgaccaggagacctcgtccgaggaggaggaggccaaggacgaaaaggcagagcccaacagggacaaatcagttgggcctctcccccaggcggacccggaggtgggcacggctgcccatcaaaccaacagacaggaaaaaagcccccaggaccctggggaccccgtccagtacaacaggaccacagatgaggagctgtcagagctggaggacagagtggcagtgacggcctcagaagtccagcaggcagagagcgaggtttcagacattgaatccaggattgcagccctgagggccgcagggctcacggtgaagccctcgggaaagccccggaggaagtcaaacctcccgatatttctccctcgagtggctgggaaacttggcaagagaccagaggacccaaatgcagacccttcaagtgaggccaaggcaatggctgtgccctatcttctgagaagaaagttcagtaattccctgaaaagtcaaggtaaagatgatgattcttttgatcggaaatcagtgtaccgaggctcgctgacacagagaaaccccaacgcgaggaaaggaatggccagccacaccttcgcgaaacctgtggtggcccaccagtcctaacgggacaggacagagagacagagcagccctgcactgttttccctccaccacagccatcctgtccctcattggctctgtgctttccactgtacacagtcaccgtcccaatgagaaacaagaaggagcaccctccacatggactcccacctgcaagtggacagcgacattcagtcctgcactgctcacctgggtttactgatgactcctggctgccccaccatcctctctgatctgtgagaaacagctaagctgctgtgacttccctttaggacaatgttgtgtaaatctttgaaggacacaccgaagacctttatactgtgatcttttacccctttcactcttggctttcttatgttgctttcatcaatggaatgaaaaaaagaccactcagttaaggcaccagc

SEQ ID NO: 355638 - DNA, 1963 bp, Homo Sapiens
  misc_feature (1302)..(1302): n is a, c, g, or t
  misc_feature (1308)..(1308): n is a, c, g, or t
  misc_feature (1354)..(1354): n is a, c, g, or t
  misc_feature (1361)..(1361): n is a, c, g, or t
  misc_feature (1709)..(1709): n is a, c, g, or t
  misc_feature (1752)..(1752): n is a, c, g, or t
cgctcccggagctgggcggagcggggcgcagcccacgtggttcgggcgggaggcgccgggacgtggccagttgcccgcctgccccggagagccaggcgctaaccagccgctctgcgccccgcgccctgcttgcccccattatccagccttgccccggcgccctgacctgacgccctggcctgacgccctgcttcgtcgcctcctttctctcccaggtgctggaccagggactgagcgtcccccggagagggtccggtgtgaccccgacaagaagcagaaatggggaagaaactggatctttccaagctcactgatgaagaggcccagcatgtcttggaagttgttcaacgagattttgacctccgaaggaaagaagaggaacggctagaggcgttgaagggcaagattaagaaggaaagctccaagagggagctgctttccgacactgcccatctgaacgagacccactgcgcccgctgcctgcagccctaccagctgcttgtgaatagcaaaaggcagtgcctggaatgtggcctcttcacctgcaaaagctgtggccgcgtccacccggaggagcagggctggatctgtgacccctgccatctggccagagtcgtgaagatcggctcactggagtggtactatgagcatgtgaaagcccgcttcaagaggttcggaagtgccaaggtcatccggtccctccacgggcggctgcagggtggagctgggcctgaaccgatatctgaagagagaagtggagacagcgaccagacagatgaggatggagaacctgactcagaggcccaggcccaggcccagccctttggcagcaaaaaaaagcgcctcctctccgtccacgacttcgacttcgagggagactcagatgactccactcagcctcaaggtcactccctgcacctgtcctcagtccctgaggccagggacagcccacagtccctcacagatgagtcctgctcagagaaggcagcccctcacaaggctgagggcctggaggaggctgatactggggcctctgggtgccactcccatccggaagagcagccgaccagcatctcaccttccagacacggcgccctggctgagctctgcccgcctggaggctcccacaggatggccctggggattgctgctgcactcgggtcgaatgtcatcaggaatgagcagctgcccctgcagtacttggccgatgtggacacctctgatgaggaaagcatccgggctcacgtgatggcctcccaccattccaagcggagaggccgggcgtcttctgagagtcagggntctagngtgctggagtgcgcacggaggccgatgtaaaaggaggaggccctgnaggaggnaacctggaggagctgaccagcaacgtcagtgaccaggagacctcgtccgaggaggaggaagccaaggacgaaaaggcagagcccaacagggacaaatcagttgggcctctcccccaggcggacccggaggtttcagacattgaatccaggattgcagccctgagggccgcagggctcacggtgaagccctcgggaaagccccggaggaagtcaaacctcccgatatttctccctcgagtggctgggaaacttggcaagagaccagaggacccaaatgcagacccttcaagtgaggccaaggcaatggctgtgccctatcttctgagaagaaagttcagtaattccctngaaagtcaaggtaaagatgatgattcttttgatcgggaatcantgtaccgaggctcgctgacacagagaaaccccaacgcgaggaaaggaatgggcagccacaccctcgcggaaaacctgtgggtggcccaccagtcctaacggggaacaggacagaagagaacgaaccagccccttgccccgggttttccccttccaccaccaacccatcccttggtcccttcctttggggttctcgggggctttccccacat

SEQ ID NO: 355639 - DNA, 1808 bp, Homo Sapiens
  misc_feature (64)..(104): n is a, c, g, or t
  misc_feature (1781)..(1781): n is a, c, g, or t
  misc_feature (1784)..(1784): n is a, c, g, or t
  misc_feature (1788)..(1788): n is a, c, g, or t
aagcaggtgctcctcctccttcagggtctgcagtgagtacggctccacagcagaaacctatagnnnnnnnnnnnnnnnnnnnnnnnnnnnnnnnnnnnnnnnnncagaagaggcaggctgagttattggagaagcgcctgcaggagatagaagaattggagcgagaagctgaaaggaaaataatagaagaaaacatcacctcagctgcaccttccaatgaccaggatggcgaatactgcccagaggtgaaactaaaaacaacaggattagaggaggcggctgaggcagagactgcaaaggacaatggtgaagctgaggaccaggaagagaaagaagatgctgagaaagaaaacatagaaaaagatgaagatgatgtagatcaggaacttgcgaacatagaccctacgtggatagaatcacctaaaaccaatggccatattgagaatggcccattctcactggagcagcaactggacgatgaagatgatgatgaagaagactgcccaaatcctgaggaatataatcttgatgagccaaatgcagaaagtgattacacatatagcagctcctatgaacaattcaatggtgaattgccaaatggacgacataaaattcccgagtcacagttcccagagttttccacctcgttgttctctggatccttagaacctgtggcctgcggctctgtgctttctgagggatcaccacttactgagcaagaggagagcagtccatcccatgacagaagcagaacggtttcagcctccagtactgggggatttgccaaaagcaaaaacccgggcagctgacttgttggtgaatcccctggatccgcggaatgcagataaaattagagtaaaaattgctgacctgggaaatgcttgttgggtgcataaacacttcacggaagacatccagacgcgtcagtaccgctccatagaggttttaataggagcggggtacagcacccctgcggacatctggagcacggcgtgtatggcatttgagctggcaacgggagattatttgtttgaaccacattctggggaagactattccagagacgaagaccacatagcccacatcatagagctgctaggcagtattccaaggcactttgctctatctggaaaatattctcgggaattcttcaatcgcagaggagaactgcgacacatcaccaagctgaagccctggagcctctttgatgtacttgtggaaaagtatggctggccccatgaagatgctgcacagtttacagatttcctgatcccgatgttagaaatggttccagaaaaacgagcctcagctggcgaatcttcggcatccttggttgaattcttagcaaattctaccaatattgcattctgagctagcaaatgttcccagtacattggacctaaacggtgactctcattctttaacaggattacaagtgagctggcttcatcctcagacctttattttgctttgaggtactgttgtttgacattttgctttttgtgcactgtgatcctggggaagggtagtcttttgtcttcagctaagtagtttactgaccattttcttctggaaacaataacatgtctctaagcattgtttcttgtgttgtgtgacattcaaatgtcatttttttgaatgaaaaatactttcccctttgtgttttggcaggttttgtaactatttatgaagaaatattttagctgagtactatataatttacaatcttaagaaattatcaagttggaaccaagaaatagcaaggaaaaataccaaaaaanaantagnaaaggacatcatacatatat

SEQ ID NO: 355640 - DNA, 936 bp, Homo Sapiens
  misc_feature (51)..(51): n is a, c, g, or t
  misc_feature (118)..(118): n is a, c, g, or t
  misc_feature (193)..(208): n is a, c, g, or t
  misc_feature (211)..(211): n is a, c, g, or t
ttctgaacaaaagggattagagaagaaaaatctcttgatataaggcttganagcaagggcaggcaatcttggttgtgaatattttctcatttttccagaaatcaagcagaagattganctgctgatgtcagttaactctgagaagtcgtcctcttcagaaaggccggagcctcaacagaaagctcctttagtnnnnnnnnnnnnnnnnccnccaccaccaccgacgcgccacctttgccaaaccccacacccccggagccagaggaggagatcctggaatcagatgatgaggagcaaagaggaccctgcggactactgcaaaggtggatatcatccagtgaaaattggagacctcttcaatggccggtatcatgttattagaaagcttggatgggggcacttctctactgtctggctgtgctgggatatgcaggggaaaagatttgttgcaatgaaagttgtaaaaagtgcccagcattatacggagacagccttggatgaaataaaattgctcaaatgtgttcgagaaagtgatcccagtgacccaaacaaagacatggtggtccagctcattgacgacttcaagatttcaggcatgaatgggatacatgtctgcatggtcttcgaagtacttggccaccatctcctcaagtggatcatcaaatccaactatcaaggcctcccagtacgttgtgtgaagagtatcattcgacaggtccttcaagggttagattacttacacagtaagtgcaagatcattcatactgacataaagccggaaaatatcttgatgtgtgtggatgatgcatatgtgagaagaatggcagctgaggccactgagtggcagaaagcaggtgctcctcctccttcagggtctgcagtgagtacggctccacagcagaaacctataggaaaaatatctaaaaacaaaaagaa

SEQ ID NO: 355641 - DNA, 1120 bp, Homo Sapiens
  misc_feature (288)..(316): n is a, c, g, or t
tcttcggatgcctctggagctttttccctttatagcaccattgaatcccagtcctaacagaagtactgcgaatcttgtggcctcattctgaacaaaagggattagagaagaaaaatctcttgatataaggcttgaaagcaagggcaggcaatcttggttgtgaatattttctgatttttccagaaatcaagcagaagattgagctgctgatgtcagttaactctgagaagtcgtcctcttcagaaaggccggagcctcaacagaaagctcctttagttcctcctcctnnnnnnnnnnnnnnnnnnnnnnnnnnnnntttgccagaccccacacccccggagccagaggaggagatcctgggatcagatgatgaggagcaagaggaccctgcggactactgcaaaggtggatatcatccagtgaaaattggagacctcttcaatggccggtatcatgttattagaaagcttggatgggggcacttctctactgtctggctgtgctgggatatgcaggggaaaagatttgttgcaatgaaagttgtaaaaagtgcccagcattatacggagacagccttggatgaaataaaattgctcaaatgtgttcgagaaagtgatcccagtgacccaaacaaagacatggtggtccagctcattgacgacttcaagatttcaggcatgaatgggatacatgtctgcatggtcttcgaaatacttggccaccatctcctcaagtggatcatccaatccaactatccaggccctcccagtacggttgtggtgaaaaagtatcatttcaacagggtcctttcaaggggttagattactttacaccgttaagtggccgaatcatttcttacttgacataaaagcccggaaaaaattctttgatgggtggcgggatgatccccctttgtggagaaaaaatgcgcacctggaggccccctgggtgggctacaaagaaaaggggctccttcccccctttggggggcttagcacggcacgcacggagtttcactgtgcaagacactcttttggtaacaatttaccgtaaatatattcagaaatacgacgcgcttcaatataacgcagtacccgcggttagcgtcttcgactattcg

SEQ ID NO: 355642 - DNA, 1675 bp, Homo Sapiens
ggattctcgggaattcttcaatcgcagaggagaactgcgacacatcaccaagctgaagccctggagcctctttgatgtacttgtggaaaagtatggctggccccatgaagatgctgcacagtttacagatttcctgatcccgatgttagaaatggttccagaaaaacgagcctcagctggcgaatgccttcggcatccttggttgaattcttagcaaattctaccaatattgcattctgagctagcaaatgttcccagtacattggacctaaacggtgactctcattctttaacaggattacaagtgagctggcttcatcctcagacctttattttgctttgaggtactgttgtttgacattttgctttttgtgcactgtgatcctggggaagggtagtcttttgtcttcagctaagtagtttactgaccattttcttctggaaacaataacatgtctctaagcattgtttcttgtgttgtgtgacattcaaatgtcatttttttgaatgaaaaatactttcccctttgtgttttggcaggttttgtaactatttatgaagaaatattttagctgagtactatataatttacaatcttaagaaattatcaagttggaaccaagaaatagcaaggaaatgtacaattttatcttctggcaaagggacatcattcctgtattatagtgtatgtaaatgcaccctgtaaatgttactttccattaaatatgggagggggactcaaatttcagaaaagctaccaagtcttgagtgctttgtagcctatgttgcatgtagcggactttaactgctccaaggagttgtgcaaacttttcattccataacagtcttttcacattggattttaaacaaagtggctctgggttataagatgtcattctctatatggcactttaaaggaagaaaagatatgtttctcattctaaaatatgcattataatttagcagtcccatttgtgattttgcatatttttaaaagtacttttaaagaagagcaatttccctttaaaaatgtgatggctcagtaccatgtcatgttgcctcctctgggcgctgtaagttaagctctacatagattaaattggagaaacgtgttaattgtgtggaatgaaaaaatacatatatttttggaaaagcatgatcatgcttgtctagaacacaaggtatggtatatacaatttgcagtgcagtgggcagaatacttctcacagctcaaagataacagtgatcacattcattccataggtagctttacgtgtggctacaacaaattttactagctttttcattgtctttccatgaaacgaagttgagaaaatgattttccctttgcaggttgcacacagttttgtttatgcatttccttaaaattaattgtagactccaggatacaaaccatagtaggcaatacaattttagaatgtaatatatagaggtatatttagcctcttttagaagtcagtggattgaatgtctttttattttaaattttacattcattaaggtgcctcgtttttgactttgtccattaacatttatccatatgcctttgcaataactagattgtgaaaagctaacaagtgttgtaacaataatccattgtttgaggtgcttgcagttgtcttaaaaattaaagtgttttggtttttttttttcc

SEQ ID NO: 355643 - DNA, 1130 bp, Homo Sapiens
  misc_feature (166)..(166): n is a, c, g, or t
agcggggtgcgagtggaggctgcagcccagctcgtctcggcgcccgcgtcgccgtcgcgaagccccccgccccgcttccgcccgcgtcggaatgagctcccggaaagtgctggccattcaggcccgaaagcggaggccgaaaagagagaaacatccgaaaaaaaantcaagcagaagattgagctgctgatgtcagttaactctgagaagtcgtcctcttcagaaaggccggagcctcaacagaaagctcctttagttcctcctcctccaccgacagcaccaaacacagcggcacctttgccagaacccacacccccggagccagaggaggagatcctgggatcagatgatgaggagcaagaggaccctgcggactactgcaaaggtggatatcatccagtgaaaaatggagaacctcttcaatggccggtatcatgttattagaaagcttggatgggggcaacttctctactgtctggctgtgctgggatatgcaggggaacaaagatatgtcgcaaatgaaagttgataaaaaagtgacccagcattatacggagacaagccgttggatggaaattaaaattgctcaaatgtgttcgagaaaagtgatcccagagaaccaaaacaaagacaatggtggtccagcctcattgaccgaaattcaagcacacaagcgcatggactggggataccatgtctggcatgggactccgaacggtacctggggcacacaatctccgtccaacggtgggatgcattcgaaatcccaaggatgcaagggctcccaggacagaggtgtgaacgaagaccgacacggacagagaccttacaagggagtataacaagcgtaaccaggaaaggggcacaatcacagagaaaggggaccatataagcccccggaagaaacagtcgtgaacatgagagcgagagaagagctgcacaataggagaacaaaacagggacaaggagggcccagcgtgtggggaagctagccggtggaggacccgcgccctgacgaggagactgcagacgaggaacgagacgccagagaacgcagtgaagaaagtgagataccacacaaagaagcaaacgggacaagaacacacacgaagaggatggcacaatgagat

SEQ ID NO: 355644 - DNA, 1207 bp, Homo Sapiens
  misc_feature (166)..(166): n is a, c, g, or t
  misc_feature (226)..(226): n is a, c, g, or t
  misc_feature (237)..(237): n is a, c, g, or t
  misc_feature (280)..(280): n is a, c, g, or t
  misc_feature (302)..(302): n is a, c, g, or t
  misc_feature (307)..(307): n is a, c, g, or t
  misc_feature (326)..(334): n is a, c, g, or t
  misc_feature (434)..(444): n is a, c, g, or t
  misc_feature (488)..(488): n is a, c, g, or t
tgggccggcctgccgcgctgcctgcggccgtgaccgggccggagcggcccactgagccgctctttgcggcggcgattgcgctcccgtgggcgccgggtggctctggcctggtgttttctactgctgccccgttctggccggcggccgacggcgcttttgctgaacngaccgccgctgactgggctgtggacctgcgtgtgtcctatgcccgcgatggtggagaccnggctgcccgcncctctgtccccctgcgtctggcaccgcgactccgcgatggacnggcagatggctctgtgatcgcncgccnggtgggcacctttgagcgnnnnnnnnngggccttgggcggcaggtgatggcgcggccgggctgggctgcgggcccgggcctgggctgccggtgctccggggtgcctgcggccctggctagtgatggnnnnnnnnnnngatgccagcgtggcttggggtaccctggcgcgacgctaccgccntttgggcaactgaagaggccccgtagaaatggcttggggctcatctccacccatctataatgagcctctaccccaagaccagacggagtcactgctccgccgccagccacccaccagcatgaagtttcggacagacatggcctttgggagggggttccaattgtgcttcagacagcccctcattgcctgactgaccgggttgggggcttcctttcatagctacatgatgaaaaccctctgccctggcctcatctaccactgaagcagaaaggagtctgggagcagcagtcttcgtggctggttcagggtgttttgttccgagcctgcctgcctgccggttctatacctcaggggcatttttacaaaaagccccctcccgtcccctccccttggatattaggggtaacgaccgcttgtctttggtctctaaccctaatctctgggcttgccctttgcctcctgcagaactttgaaaagctgggttgagtgaggctatcagcacagccttccttggggactctgaaggtgtccccacgaaggccagaaagggggaaagggacctgggcgaggagaggatttgtggtgcttggaagagccggccttgggtgggccctccaccgcctctaccctcactgggtgggactgccagcggagagtccgcgggaggtggcttgggtgtgcgacgtcacggaagaataaagacgtttactactggaaac

SEQ ID NO: 355645 - DNA, 1382 bp, Homo Sapiens
  misc_feature (104)..(104): n is a, c, g, or t
  misc_feature (385)..(445): n is a, c, g, or t
  misc_feature (481)..(563): n is a, c, g, or t
  misc_feature (1240)..(1240): n is a, c, g, or t
  misc_feature (1271)..(1283): n is a, c, g, or t
aaagcaggctggtaccggtccggaattcccgggatggggcgcccgaggccgttgccgacctccgcgctaaagccgctgctgccgcggaagacgatcctccagtncccgcccgccgtcaccgcagctgccgtgtcctcctcccacccctagccgcaccccctcgcggagggatcagctgagcggccaaacggcacggtcgggggagccccgagtccgcagctgcagcggggcctgagaccagagttggcgagggcaaggaaggagcggccccgggcagtgggggcggggccgggcgggcccgagaacagccgaatttggccgagcgctgccgagcgagttcgaggcgctgggccaggccggagccggactacgggagccgaggcgnnnnnnnnnnnnnnnnnnnnnnnnnnnnnnnnnnnnnnnnnnnnnnnnnnnnnnnnnnnnnagcagcggaggaggccgcagctgcgggtccgaggannnnnnnnnnnnnnnnnnnnnnnnnnnnnnnnnnnnnnnnnnnnnnnnnnnnnnnnnnnnnnnnnnnnnnnnnnnnnnnnnnnaggatgatcaagctgttctcgctgaagcagcagaagaaggaggaggagtcggcgggcggcaccaagggcagcagcaagaaggcgtcggcggcgcagctgcggatccagaaggacataaacgagctgaacctgcccaagacgtgtgatatcagcttctcagatccagacgacctcctcaacttcaagctggtcatctgtcctgatgagggcttctacaagagtgggaagtttgtgttcagttttaaggtgggccagggttacccgcatgatccccccaaggtgaagtgtgagacaatggtctatcaccccaacattgacctcgagggcaacgtctgcctcaacatcctcagagaggactggaagccagtccttacgataaactccataatttatggcctgcagtatctcttcttggagcccaaccccgaggacccactgaacaaggaggccgcagaggtcctgcagaacaaccggcggctgtttgagcagaacgtgcagcgctccatgcggggtggctacatcggctccacctactttgagcgctgcctgaaatagggttggcgcatacccacccccgccacggccacaagccctggcatcccctgcaaatatttattgggggccatgggtaggggtttggggggcggccggtggggcaatcccctgccttggccttncctcccctccctgccacgtgcccctagttannnnnnnnnnnnnaacaccatgtgattaaggtcggcgctgcctccccccacccactcagcgatgggaaatgaattggcttgtctagcccccctgctgggtgcttgttcagcc

SEQ ID NO: 355646 - DNA, 1317 bp, Homo Sapiens
  misc_feature (199)..(239): n is a, c, g, or t
  misc_feature (290)..(301): n is a, c, g, or t
  misc_feature (513)..(720): n is a, c, g, or t
  misc_feature (728)..(827): n is a, c, g, or t
  misc_feature (860)..(901): n is a, c, g, or t
  misc_feature (931)..(940): n is a, c, g, or t
  misc_feature (1023)..(1037): n is a, c, g, or t
  misc_feature (1116)..(1124): n is a, c, g, or t
  misc_feature (1164)..(1190): n is a, c, g, or t
ccgaggacccactgaacaaggatggccgcataggtcctgcagaacaaccggcggctgttgtgagcagaacgtgtcagcgctccatgcggtggtggctacatcggtctccacctactttgagcgctgcctgaaatagggttggcgcatacccacccccgccacggccacaatgccctggcatcccctgcaaatatttatnnnnnnnnnnnnnnnnnnnnnnnnnnnnnnnnnnnnnnnnnaatcccctgccttggccttgcctccccttcctggcacgtgcccctagttannnnnnnnnnnnaacaccatgtgattaaggtcggcgctgcctcccccgacccactcagcgatgggaaatgaattggcttgtctagcccccctgctgggtgcttgttcagcccccactctgggctgtggagtgggtgggcaacgggcctgggtagctgggcccaggcaacccacccctccacctctggaggtcccaccaggctattaaaggggaatgttactgcnnnnnnnnnnnnnnnnnnnnnnnnnnnnnnnnnnnnnnnnnnnnnnnnnnnnnnnnnnnnnnnnnnnnnnnnnnnnnnnnnnnnnnnnnnnnnnnnnnnnnnnnnnnnnnnnnnnnnnnnnnnnnnnnnnnnnnnnnnnnnnnnnnnnnnnnnnnnnnnnnnnnnnnnnnnnnnnnnnnnnnnnnnnnnnnnnnnnnnnnnnnnnnnntttttttnnnnnnnnnnnnnnnnnnnnnnnnnnnnnnnnnnnnnnnnnnnnnnnnnnnnnnnnnnnnnnnnnnnnnnnnnnnnnnnnnnnnnnnnnnnnnnnnnnnngggggacccgcggcgtttaaaaaaaaccccaannnnnnnnnnnnnnnnnnnnnnnnnnnnnnnnnnnnnnnnnncccaaagggtttcttaaaataaaataacgnnnnnnnnnngctggcactttatttgagaatgagggggtggaactttttctgccctctttccccccccgccagtgggaaacccccccccgaannnnnnnnnnnnnnnagaccccgtggaaattccccccgtggggcgaccacgccccaccccttggcccaccctggccaacaacaataataatttnnnnnnnnnggggggaggaaacagagggcggggagaaacaaaaaagatnnnnnnnnnnnnnnnnnnnnnnnnnnnttcttaaactacacaaaaccgggggggaagcaaccccccgccccacacgtgatttgtggttcttcccgcccccacgaagaacacctttttttccccccaagaataaacccccctttttttgagggag

SEQ ID NO: 355647 - DNA, 1070 bp, Homo Sapiens
  misc_feature (97)..(163): n is a, c, g, or t
  misc_feature (781)..(821): n is a, c, g, or t
  misc_feature (872)..(884): n is a, c, g, or t
gggggagaggagcggagcggcgcggcaggccgggcgggtggcggcagcagcggaggaggccgcagctgcgggtccgaggagcggaggcgacgcgggnnnnnnnnnnnnnnnnnnnnnnnnnnnnnnnnnnnnnnnnnnnnnnnnnnnnnnnnnnnnnnnnnnnaggatgatcaagctgttctcgctgaagcagcagaagaaggaggaggagtcggcgggcggcaccaagggcagcagcaagaaggcgtcggcggcgcagctgcggatccagaaggacataaacgagctgaacctgcccaagacgggtgatatcagcttctcagatccagacgacctcctcaacttcaagctggtcatctgtcctgatgagggcttctacaagagtgggaagtttgtgttcagttttaaggtgggcccagggttacccgcatgatccccccaaggtgaagtgtgagacaatggtctatcaccccaacattgacctcgagggcaacgtctgcctcaacatcctcagagaggactggaagccagtccttacgataaactccataatttatggcctgcagtatctcttcttggagcccaaccccgaggacccactgaacaaggaggccgcagaggtcctgcagaacaaccggcggctgtttgagcagaacgtgcagcgctccatgcggggtggctacatcggctccacctactttgagcgctgcctgaaatagggttggcgcatacccacccccgccacggccacaagccctggcatcccctgcaaatatttatnnnnnnnnnnnnnnnnnnnnnnnnnnnnnnnnnnnnnnnnnaatcccctgccttggccttgcctccccttcctgccacgtgcccctagttannnnnnnnnnnnnaacaccatgtgattaaggtcggcgctgcctcccccgaaccactcagcgatgggaaatgaatgggcttgtctagcccccctgctgggtgcttgttcagcccccactctgggctgtggagtgggtgggccaccgggcctgggtagctgggcccaggcaagcaacccctccagctctggagggtcccac

SEQ ID NO: 355648 - DNA, 1541 bp, Homo Sapiens
gatgaaaatttcatttttgaaacttaggagtgataatatcagactgaaataatactattggatgtgaagcttccagtgacctacaaaaagagacaattttatctggttactttgaatagctaacatttctcgtacacttacttggtactgtgctgagtaccttgtattagtccattttgcattgctataaaggaataccagaggctgggtaatttataaagagaagaagtttaattgggtcacagttctgctggttgtacaagcatggtgccagcatctgcttggcttctggtgagacctcaggagcttacaatcatggtggaagacaaagggggagccggtatatcacatggcgagagagtgaacaagagagagagggaggaggccccaggtcttttaaacaaccagatctcatgttaactcatagaatcagaactcacacattactgcaaggacagtaccaagccatttatgagtgatccacacttttgacccaaatacctcccactaggtcccccctccaacattggaggtcacatttcaacatgagatttggaggggacaaaacatttaaaccatatcatacttcatataaatgatctcatttaatacttataacaatctacaaggtaaatagtattatgatcctacctatggtatacatagtgttgttatttccattttataaataagaaaagtagagaccagagaagctaacttaagtgattttatatcaccaccttaaaactcctgattttatccatatgccaatactgcaccagaagtagaagaccttcagattttatcgtgaagggagtatcagaagtatagtctgcagagtttaagaatttccaggagatgacaagaacgtaatacatagctattcagatggacccctcaaatggtgatgggatgaagatcacagtgtaaaagatgtcaaggtagtctgtgcaaacactggagccactgctggttatgtgagcagggaggaaaggagaactgcgatttcactggcactgtgaaatatggcggcatgttctgaggtttgctacttgaaggctaaggaagggttaaaactggatagcgtgggatgacagggtagtggtggaggacattagcaatctctccccgtttacctgaagcaaatgatcgtggattttcccaaagttaagctactataatttggaaaccacctacatgtccaataaggagtagctaaaacacattataggattataggacatccaattaatgagatactgggcagtcctcaaatatggtactgtggaagaatacttaatgacattaaattatacttagtacgtagctgtaggtggagaattatggagtatgcattcccatttttgtaactgtattgtcatagacattcgtcatgttcgtgactgcttgtgatctcatgaacagcttttctatgtttagggacatccccatgatataaccatctcctccccaacattgaaaccagaactcaaattttcagcctcactgagctaataaagggaaacgaatgtttcaaatct

SEQ ID NO: 355649 - DNA, 2202 bp, Homo Sapiens
  misc_feature (144)..(168): n is a, c, g, or t
  misc_feature (175)..(175): n is a, c, g, or t
  misc_feature (179)..(180): n is a, c, g, or t
  misc_feature (182)..(182): n is a, c, g, or t
  misc_feature (184)..(184): n is a, c, g, or t
  misc_feature (187)..(187): n is a, c, g, or t
  misc_feature (1283)..(1292): n is a, c, g, or t
  misc_feature (1535)..(1598): n is a, c, g, or t
  misc_feature (1641)..(1641): n is a, c, g, or t
tatgaacatacattcaaatattcttagcagtgagcgagtctaaccacggaacactgtaaacagatagggcctttaaatattttcatcatctcttttcccctctacattgcatcttttaaaattcgctttggttccttcagggannnnnnnnnnnnnnnnnnnnnnnnnttatctntcannananttncacctcactctcaggctcttggaaggtcaccagaagcttccaagctcagttcaagagccaatgagggctgagtgtggtgctggaacccggtgttttgggggactcaaggccctcatagccaaagctggggacctgctggccaggcccactgctctgcagccagacactgagcaaatccaagtttcattacgtgtggtggagagtttgccaaactgccacactccacagccatttcctgcagagatctcaggggccagtggcctggctgcagcctcttggcttttccacatctcccacctcagggaacagtccactctgtgtcgaggctttgggcctgagtggcaggctggaaccaagaccctcatttggtagaaagaaaagccaggtgggctgtaggaggcggtggctaggaactcagggctggatcagtgtggtgggtggctaggaggagtggaaagacactgatgccacctggaatcatagatttcttttcccacaaggatttgcagccctcttccacctcaaagctacctcaaagtccaacccctgttcacattggctttgaaaaacaacctcattctgggcacctagtaattcctaccccttcctcctgcccctgtccccaagctgaactgggcttgaagagcacacagcttttttactcaggggtcctgggggtgggtaggctcccagtagagggagggtgtggtggggttagtctccagggggtctggcaggggcccaatccccagtggagaccacacccagcccgcagctctgcaggctccaagagtgaaccaccaggggtcccaaacctgtcattctagctgatgcacagctctcagaatccaatgattattaggaatcttaaccactgagatcttaatcaagagagtcccagaccacctcctgtggggctatctccatgcatccctctcttgcacacctcttttcaaaagtcaccatgtggcttgactttgtcaagggcaaaatctgcatattatctcatgtgtatgaagccccccacccaattccagccgctggagtcttagaggagtggatttgctgagtagtactgtaaacggtctctgttaannnnnnnnnnccttcattctcctgttctgaaaccagattttgacttgacgatcagtgaggttgagcatgcgggacagttgcaggcgcttctctttgttaatgtagacgctgaagaagaactcccgttccagctctcggatctggtacttggtataggggcagcgctttttgcgggtgcgttggccactggagccgccggccttgtcctcagtgtggcccgaagacgactcggggctgctgctgctctcggggnnnnnnnnnnnnnnnnnnnnnnnnnnnnnnnnnnnnnnnnnnnnnnnnnnnnnnnnnnnnnnnntgtccgaacttgaagttgccggcgcgcccgttgcagccgccgncgccgccgcggaggtcgccgtggccgccgggggccccttctcggcgctcttgtccccggggtagtcggaggaggcgaggttttccggggtgccgtaggctgtctcgaaaaactggtcgaaagcctgtggcaggacgccgttcctgcccacggtgctatagaaattggacgagactgcgggggtggggtggtggtagacgttggccgagctcttggccagcacgtcgccaggcacgccggccgcgctgggcgcctgcaggcagtctctgtgcacgagctcctccgcggagtagcagtgggccagattgccgcgggggtgccatttagtggcgggctcaatggcgtactctctgaaggtcacttcgcgcacgggttggacctggggcaggttggaggagtaggagtatgtcattgggcgcgaagacggggtctggggcagaaaagaagggaggctggagaaatctggacccgagacgtagtaagtacaacttggcaaatacatgttagaggagcagggaccacgctcatcaaaatccattattgggctaccttgggctctccg

SEQ ID NO: 355650 - DNA, 819 bp, Homo Sapiens
  misc_feature (639)..(639): n is a, c, g, or t
gttccgagcggcggcggaggtgcgcgcacggacgagcgggagggacccttctccggcctgatgcgacccggaaagggaacatcacagaaaggtgaagaaatttgccctaaatcataaaactttgtaagtggcagaacaaggatttgaagctggcagtctggttccaggtatcgttcttaaaacactaaatttatactgtcctatttagcctgaaagtttcatggtgcagacttatactgtggactccatagcccttttcctcatgctgggttagaagtaactttttcaggctcactatttttattaggaaaaaatagtcactgagcagaacttccgaggagacccctccagctaactgaagagaaagggacaaccagcctaccatgtttagtgcagcagggggaacaggacggaagggcagggtgtcatggagctctaggaggcaccagctgaggaaaggggatctcaggaggtagggagagagcagagtgggcagccagctgtgggttcaaatcctggcctaccactttaacagggcgatctggaacaagtgacttctggtcctgagtttcctgtctgtaaaatgggtgcattcctatctatctttcaggattgttttgacgatgaaagtgaaaaganagtttgcaaaatgtggagcctggtgagggcatatagtaggctttaaaaaaagattgatttctaaatggtagtgctcctaaatggcataaggtgttcaggtcttgggagttgctgcccaaaataccagcattttcagaaaactcgctgctgcctatacagctttattttaaaggttttcaa

SEQ ID NO: 355651 - DNA, 2187 bp, Homo Sapiens
  misc_feature (47)..(83): n is a, c, g, or t
  misc_feature (1781)..(1781): n is a, c, g, or t
  misc_feature (1786)..(1786): n is a, c, g, or t
  misc_feature (1842)..(1842): n is a, c, g, or t
  misc_feature (1859)..(1859): n is a, c, g, or t
  misc_feature (1864)..(1864): n is a, c, g, or t
  misc_feature (1873)..(1873): n is a, c, g, or t
  misc_feature (1952)..(1952): n is a, c, g, or t
  misc_feature (2118)..(2118): n is a, c, g, or t
  misc_feature (2185)..(2185): n is a, c, g, or t
tgtatacgatcactataggggaccccccgttaatgcggtggtggcgnnnnnnnnnnnnnnnnnnnnnnnnnnnnnnnnnnnnnatcaggccaaatcggccgagctcgaattcgtcgagagcgggatccgcttccctgctcctttaagcgtccacaggcggcggagcggccacaatcacagctccgggcattgggggaacccgagccggctgcgccgggggaatccgtgcgggcgccttccgtcccggtcccatcctcgccgcgctccagcacctctgaagttttgcagcgcccagaaaggaggcgaggaaggagggagtgtgtgagaggagggagcaaaaagctcaccctaaaacatttatttcaaggagaaaagaaaaagggggggcgcaaaaatggctggggcaattatagaaaacatgagcaccaagaagctgtgcattgttggtgggattctgctcgtgttccaaatcatcgcctttctggtgggaggcttgattgctccagggcccacaacggcagtgtcctacatgtcggtgaaatgtgtggatgcccgtaagaaccatcacaagacaaaatggttcgtgccttggggacccaatcattgtgacaagatccgagacattgaagaggcaattccaagggaaattgaagccaatgacatcgtgttttctgttcacattcccctcccccacatggagatgagtccttggttccaattcatgctgtttatcctgcagctggacattgccttcaagctaaacaaccaaatcagagaaaatgcagaagtctccatggacgtttccctggcttaccgtgatgacgcgtttgctgagtggactgaaatggcccatgaaagagtaccacggaaactcaaatgcaccttcacatctcccaagactccagagcatgagggccgttactatgaatgtgatgtccttcctttcatggaaattgggtctgtggcccataagttttaccttttaaacatccggctgcctgtgaatgagaagaagaaaatcaatgtgggaattggggagataaagatatccggttggtggggatccaccaaaatggaggcttcaccaaggtggtggtttgccatgaagaccttccttacgcccagcatcttcatcattatggtgtggtattggaggaggatcaccatgatgtcccgaccccccagtgcttctggaaaaagtcatctttgcccttgggatttccatgacctttatcaatatcccagtggaatggttttccatcgggtttgactggacctggatgctgctgtttggtgacatccgacagggcatcttctatgcgatgcttctgtccttctggatcatcttctgtggcgagcacatgatggatcagcacgagcggaaccacatcgcagggtattggaagcaagtcggacccattgccgttggctccttctgcctcttcatatttgacatgtgtgagagaggggtacaactcacgaatcccttctacagtatctggactacagacattggaacagagctggccatggccttcatcatcgtggctggaatctgcctctgcctctacttcctgtttctatgcttcatggtatttcaggtgtttcggaacatcagtgggaagcagtccagcctgccagctatgagcaaagtccggcggctacactatgaggggctaatttttaggttcaagttcctcatgcttatcaccttggcctgcgctgccatgactgtcatcttcttcatcgttagtcaggtaacggaaggccattgggaaatnggggncggcgtcacagttccaagttgaacagtggcctttttcacaggcatctatgggatgnggaatctgtatgtcttngctcngatgttctngtatgcaccatcccataaaaactatggagaagaccagtccaatggaatgcaactcccatgtaaatcgagggaagattgngctttgtttgtttcggaactttatcaagaattgttcagcgcttcgaaatattccttcatcaatgacaacgcagcttctggtatttgagtcaacaaggcaacacatgtttatcagctttgcatttgcagttgtcacagtcacattgattgtacttgtatacgcacanaaataaactcatttagcctttatctcaaaatgttaaatataaggaaaaaagcgtcaacaataaatantc

SEQ ID NO: 355652 - DNA, 514 bp, Homo Sapiens
ggggggaggaggtgctattggggatttagtgggcaaggggggaaatctgccaaatgtccccaccaatgagggacacagtcctaaacaaatttcaaaccactccactagaaatttatgtaggtaaaaatttttatagttacctgagccttggtcctaaactcccatgttaccatatttttttaaaaggatattttgcatggttttaaaatatactgaattttccaggaatgcaactcccatgtaaatcgagggaagattgtgctttgtttgtttcggaactttatcaagaattgttcagcgcttcgaaatattccttcatcaatgacaacgcagcttctggtatttgagtcaacaaggcaacacatgtttatcagctttgcatttgcagttgtcacagtcacattgattgtacttgtatacgcacacaaatacactcatttagcctttatctcaaaatgttaaatataaggaaaaaagcgtcaacaataaatattctttgagtattgtcttaaaa

SEQ ID NO: 355653 - DNA, 912 bp, Homo Sapiens
  misc_feature (152)..(152): n is a, c, g, or t
acctaagggcccaaggggcccacaccttggggttcaccaaaattccccacggtgtaaacaggcgaaggccagcttttacccaacccggtggccaagggggagccccaggcccaaactgccagttcgggttgtccagccagcccccccaggtncgtgtaaggggtaccagcttcgccaccgttccctgttggtcagccacacagctttccaaccagttcagcacctcaaagatctcccgagggtcagtgtagagatgccaatccatggcactcaggaagcccctgctcgcaaggcattgagagtgggcacggccacacccccagcagctccccattcgtcgttgaagacctcctcctcctccccgtcatcatagaggtacttactggccaccatcatggagatcaggaacaagtcagaggatgacacatgctgcaagtagtctgggtttcggtgccggagccgttcaatgtacaccagagccagcatcatagcacatggggagatgcatgcctcccgggacacatgagctacgtatttcttctggagtcggcgaatagggctgggggctgccttctggagcagttcgacagcaatgtctgccaccgggctggagagctcctccaggctacagtcggcttcccagtcccagccatagtagagcctccttcggatccgggcactcagcttctggtgtcctgggaggaacgtgaagtcctggaagccggcgagggagaaggtgccttcttcgtccagcaggagcccggtcaggtccatcgcgccgccagtcgccgccctgcgaaggtgaacggaaggaaacgagttgtagggggctcgcggagctgtccttgcccgcctgtccacctgccagcctgcctccccggggcgggccgccgtcctcgccctcgccctcgc

SEQ ID NO: 355654 - DNA, 396 bp, Homo Sapiens
ttttttttcaactgaaactgtttgatggaaacctcagtcctacaaaagcgtgaaaaaccctgatacaaagcagtggccagagaggcctgggaagagaatacctgggagaagaaccagaagagagggaaacctaggagcaggacactaagagaagactggaagacaaaagatcagggttgaaggtcccagcagtccttggctccattagactaaagctaaggaatgggagtgaaaagggttccctgcctcacccaggcagctcccacctggaacccattcagtccccggctcttttgcctcagggacatcacacaggcccatgccaacatttcctttctcctctcaccccacttcccttatctcccacctatactcttccatcctagggaaatcaaa

SEQ ID NO: 355655 - DNA, 2609 bp, Homo Sapiens
  misc_feature (15)..(15): n is a, c, g, or t
  misc_feature (2070)..(2105): n is a, c, g, or t
  misc_feature (2407)..(2454): n is a, c, g, or t
  misc_feature (2470)..(2489): n is a, c, g, or t
aggctgtacggcccnggatttaggcatcccgccccggggaggcaggctggcaggtggacaggcgggcaaggacagctccgcgagccccctacaactcgtttccttccgttcaccttcgcagggcggcgactggcggcgcgatggacctgaccgggctcctgctggacgaagaaggcaccttctccctcgccggcttccaggacttcacgttcctcccaggacaccagaagctgagtgcccggatccgaaggaggctctactatggctgggactgggaagccgactgtagcctggaggagctctccagcccggtggcagacattgctgtcgaactgctccagaaggcagcccccagccctattcgccgactccagaagaaatacgtagctcatgtgtcccgggaggcatgcatctccccatgtgctatgatgctggctctggtgtacattgaacggctccggcaccgaaacccagactacttgcagcatgtgtcatcctctgacttgttcctgatctccatgatggtggccagtaagtacctctatgatgaaggggaggaggaggaggtcttcaacgacgaatggggagctgctgggggtgtggccgtgcccactctcaatgccttggagaggggcttcctgagtgccatggattggcatctctacactgaccctcgggagatctttgaggtgctgagctggttggagagctgtgtggctgagcagcagggacggtggcgaggctggtacacctacacagacctgtgtgtgctgctggagcagccgacctggcagttggccctgggctccctctgccagcggctggtaaagctgtcttgcctgttagctgtggcatatgtgagcagtgtggccctggctgtggcatcggtggccgtaatacatcagtctttggggctgtcctgcatccctacacctgggccgcctgaccttggactgacctcccgttgcctcctggagccctgcataccttctgtgccacaatgcctgccgtctctcgctaatgtctccagctgcctggaaggcagcatggggctgcggtcactctggggcagtcttctggcctcactgactcctccaccattgcctcccccagacccccctgcccctcccactcttcttcataactgccacctttgccagaagctccagagagactccccaacctgccatgcctgcctccaccccaaccgtacagtccccactgcgctgtccagcccctggtaccatacctatggcctggctcccccctggccttggagcccggtgcccctttcacttcctcagcctcagcaatgttcccttttcagtgtcatggagctggctcgcctcaagtctttcgttttcccaggctaggtagggctgtgaggaatgcattaagagggtttgggagtttctgagaacctggaggagcaaagcttgattcagatcctgtctgcctcgctgggtccttggcaggtcccctgtcctcctgggtgggagcttatggggtggtggggcagaaggactgaaggtaattcactcctagatcgcagtggctggctgcttggccaggacagtgatgccgccagggagagcttccgcttggtgaccagggacatgtcccagatggacatagaagcccctctctgcctccctgggattttttagacttttacttttgatttccctaggatggaagagtataggtgggagataagggaagtggggtgagaggagaaaggaaatgttggcatgggcctgtgtgatgtccctgaggcagaagagccggggactgatgggttcaggtgggagctgctgggtgaggcagggaacccttttcactcccattccttagctttagtctaatggagccaaggactgctgggaccttcaaccctgatcttttgtcttccagtcttctcttagtgtcctgctcctaggtttccctctcttctggttcttctcccaggtattctcttcccaggcctctctggccactgctttgtatcagggtttttcacgcttttgtagaactgaggtttcaataaacagtttcagcctggcaatccgnnnnnnnnnnnnnnnnnnnnnnnnnnnnnnnnnnnngccacattccaccgccccccaccagatgcgccacaaagggggggcggcgcttccaagaagaccccctctagagggggcccagggcgttgaccccgtgcacgccgcgttttcttttaacgcgccgggcgccctcaccaaaagtcggcgcctgtaagactcttacgtctcacgcatcagcgcgcatccgccaagccgcgcacaatatcccgcatcctagagacaaccttatccccgcttccttgggacacatcttataaaacccggacaattgtattctagtatcgccccgtcggaccacaatnnnnnnnnnnnnnnnnnnnnnnnnnnnnnnnnnnnnnnnnnnnnnnnngcctcattagtatctnnnnnnnnnnnnnnnnnnnntattttcgcgcccagtcatacatatcccacaccacgcttccatacctcgctccaccccttgcctcgatataccccccgtacccgatacgccccccacgcgttatttgccccgcgcccgtc

SEQ ID NO: 355656 - DNA, 1016 bp, Homo Sapiens
ctgtgaggtcattccaaagttcagcgctcccagttgtaggaatgcaggacagccctcaagactggatgtattacggccccgcgatgccacagccaggcccacactggctcacatatgccacagctaacaggcaagacagctttaccagccgctggcagagggagcccagggccaactgccaggtcggctgctccagcagcacacacaggtctgtgtaggtgtaccagcctcgccaccgtccctgctgctcagccacacagctctccaaccagctcagcacctcaaagatctcccgagggtcagtgtagagatgccaatccatggcactcaggaagcccctctccaaggcattgagagtgggcacggccacacccccagcagctccccattcgtcgttgaagacctcctcctcctccccttcatcatagaggtacttactggccaccatcatggagatcaggaacaagtcagaggatgacacatgctgcaagtagtctgggtttcggtgccggagccgttcaatgtacaccagagccagcatcatagcacatggggagatgcatgcctcccgggacacatgagctacatatttcttctggagtcggcgaatagggctgggggctgccttctggagcagttcgacagcaatgtctgccaccgggctggagagctcctccaggctacagtcggcttcccagtcccagccatagtagagcctccttcggatccgggcactcagcttctggtgtcctgggaggaacgtgaagtcctggaagccggcgagggagaaggtgccttcttcgtccagcaggagcccggtcaggtccatcgcgccgccagtcgccgccctcgcggagcagaaaggagatgcggctgcgaggcgcgtactccgcctgtgccgcgtccgcccggcgtttacaagccgcgggggtgccgcctgcaagtcagcgcctggcacttcctgccgcccatctggcccagcctcccgccccgacccgcgggcaggaaccgccgct

SEQ ID NO: 355657 - DNA, 1715 bp, Homo Sapiens
  misc_feature (94)..(94): n is a, c, g, or t
  misc_feature (325)..(325): n is a, c, g, or t
  misc_feature (1432)..(1449): n is a, c, g, or t
  misc_feature (1472)..(1528): n is a, c, g, or t
ggatcagaggagctggaggtgcctgtttgttgggagtctggaggaaaggaggtgccaatcaccagcggcaagaaggaaagtgtccaaggcaganagccaggttggtcccagcggcagggctgagcaagagatccaggctcagactcctccaggaggggcctcgaggttgagaatttaaaaagaagagttctgttcaggtctgcgggtgtctgatctcatctgaggagtgcatcaaggagatgaatggagaagcccacttgtctcccattggggtcaggatgaagggtctgggctgaccagctccagaagaagctcacctttcganaatgagttctcctttaaacctttctcctcctctgttctgcccttctcctgcctgccactgccagcagtcaagaatggactgtgtataccatattctggagaatctgattacaccctggacactggtgtgtggattgcagtctgctgcaggatgacattagagtttagttgtttttttctaatggggctccattctgtgtgtctggtaggaggtgcttttaatatgctgataaaccaacctcaggaaggtattatgtacagaagattcccaaggctgctgttgctgaaagagacttgggctactgccgggggaactaggtgagtccccgtagctgaacagagctgcctaagagaagtggaatagaggatcatgtggtgcctgttttgtgcctttagtgatcggtgtttcatatgtatttggggatgttgctttctctgtgggaacaagcaaaagaatcgttttgttctgatgaaattaacaatgaatttggtgaaagaaacttccaactcccttgcccatctcccttcatcccattcatttggaaaaccacaaccctggggcaaatccagttctctgcctcctgcgcacttggacttgtgcagctaaactttgggaagctcagccgtgcaggccagactcgcttgaaattcatgaccatgggctccaagtgggccttgatgctgccagggatcaaatcacattttattccccaagacgcttctcttctgtcctcagacttaccccttctcctccctgcttcaccagacctccaagactcaccaccgagtctccccacctaccagcgccctcttgagtatccatcccccttcccccaaggcaatgactgatttgatttctgtcacgacagacacatagacacatgattttgcctgttctagaaactaacataaatggactcaatcagtttggactttttttacctggcttcttttgctcatcataatattttaaacctaaatcatatttctatacatatcaataggttattcctctttatttctgaaaagtatttcattgtgggaatatgccatcatggttatctactcacctggtaatggacattcagattggctccagtttttagannnnnnnnnnnnnnnnnngagaaggagttttacttctgttnnnnnnnnnnnnnnnnnnnnnnnnnnnnnnnnnnnnnnnnnnnnnnnnnnnnnnnnnggtcaagggatatcttctggcttaaactttcaaggtgttgggatatcaggcatgtgccaccatggcctgggtatattttggtttttcaggagagacacgggctttcaccgcgttggggcaaacctggcttgggacaccccgaccctcagagagacccgcccaccctcaatttcgaagaggtattttt

SEQ ID NO: 355658 - DNA, 1633 bp, Homo Sapiens
ggctggtacggccggaggtaccgggatatcgtcgacccacgcgtcggagcccggtcccagctccatgttcctaagcctgcctcactggtttcggagggctggagagcagctcagctcgctagctgcgcgcttcccggcacaggcagtgccactgcgcaggttgatcagcgaaacagcatccattttaatctgcggggagcccctgccttaccagggcgttctctccgcccgccggtggatgctccgcgcctgccctccgcagcctcgctcagcagtcctgcgttggggtctgcgccctaggatgcactgagatggtacatcaggataactgctcgtatcaggcacagaaaaatgagagagagtctatcagacagaagttggcacttggaagcttctttgatgatggcccaggaatttataccagctgtagcaaaagtgggaagccaagcctttcctcccgactgcagagtgggatgaacttgcagatatgctttgtcaacgacagtggcagtgataaggacagtgatgctgatgacagtaagactgaaaccagcttggacacccccttgtctcccatgagcaaacagagttcttcctattctgatagagacactactgaagaggagtctgaatccttggatgacatggacttccttacaaggcaaaagaaattgcaagctgaagccaaaatggcccttgccatggccaaaccaatggccaaaatgcaagtagaagtggagaaacagaacaggaaaaagtctcccgtcgctgatcttctgccacacatgcctcatataagtgaatgcttgatgaaaagaagtttaaaacccaccgacctgagagacatgactattgggcagctacaagtgatagtcaatgatctccattcccagatagaaagcttgaatgaagagttggtccagctgcttctcatccgagatgagctgcacacagagcaggatgccatgctggtggacattgaagacttgaccagacatgctgaaagtcagcagaagcacatggcagagaaaatgcctgcaaagtgaaaagaagccattcaaccagagaacaagctagaatttattttgcttctgtggttgtaaaaatgctgttgctaaaggtggcgcagaaacaaatatcagtgttagtcattgataatgtctgaagcttaatgtccagtgattggcctttgcttcttaatttattttaattttttacttgtgccacttaatatcaggcattttaataaaatattgttacaaaaaatgtacagtactgacaccaccacaaatcatggttaataaaagagagtagttttaactttatttttatttgtttagagattttaagttggaacagtattttcccattgactacttttcattcttcactgtagttttaaagaagaactgtaaatgacggtgctatacaagtcaaaaaatacatgcctgcctcgtagtgaagttgtagctctccgtaatatgtatattttactcagttttcaacattttgtgaatgttgactacctgaagttcctttttagatgtgctattaacattctgttggattcagagggttccttgaaagttttatgtataaatatgtaaaataaaaattaaaactttgtttcata

SEQ ID NO: 355659 - DNA, 471 bp, Homo Sapiens
  misc_feature (407)..(407): n is a, c, g, or t
  misc_feature (432)..(432): n is a, c, g, or t
  misc_feature (449)..(449): n is a, c, g, or t
  misc_feature (456)..(456): n is a, c, g, or t
gaaccagggccaggcgaggaccaactccacctccgcacagaaaaatgagagagagtctatcagacagaagttggcacttggaagcttctttgatgatggcccaggaatttataccagctgtagcaaaagtgggaagccaagcctttcctcccgactgcagagtgggatgaacttgcagatatgctttgtcaacgacagtgggcagtgataaggacagtgatgctgatgacagtaagactgaaaccagcttggacacccccttgtctcccatgagcaaacagagttcttcctattcttgatagagacactacttgaagaggagtctgaatccttgggatggacatgggacttcccttacaaaggcaaaagaaatttccaagctgaaggcccaaattggccctttgccntggcccaacccattgggccaaattncaagtgggagttggggnaaccggncccgggaaaattttc

SEQ ID NO: 355660 - DNA, 975 bp, Homo Sapiens
  misc_feature (746)..(754): n is a, c, g, or t
  misc_feature (952)..(952): n is a, c, g, or t
  misc_feature (957)..(957): n is a, c, g, or t
  misc_feature (966)..(966): n is a, c, g, or t
gggagtgtagttccagaaaataggactgaccaagaagcagaaaagcaagatgaatgatgtgaagcttgctgtcttgggtggtgaaggaacaggcaaatctgcccttacagtgaggtttcttactaagcgattcattggagaatatgcttctaattttgaatctatctataagaagcacttgtgtttggaaaggaaacaactaaatctagaaatatatgacccttgttctcaaacacagaaagcaaaattctccctcacaagtgagcttcactgggcagatgggtttgttattgtgtatgacatcagtgataggtcttcatttgcttttgcaaaagcgctgatctacagaatccgggagccacaaactagtcattgtaaaagagctgtggaatcagcagtgtttttggttggcaacaaacgagatctttgtcatgtgcgagaggttggctgggaagaagggcaaaagctggcactggaaaaccgatgccaattctgtgaactgtctgcagcagagcagtctctggaggtggaaatgatgtttatcagaattatcaaggacatcctgataaacttcaaactcaaagaaaagagacgtcccagtggatctaaatcaatggccaaattgatcaataatgtatttggaaagagaaggaaatctgtttagtagacaggtaatcctgggagatttcctatatcagagagtttcaaacattcacatgataattaaactaacctttgtatgcaannnnnnnnnggtaaaaagaattctcttgggagatatgaaatgattgagtatgaaccacagctgtgttttcaaatatgtagtttgcctttttggttgttgtaccctgctcactctccttcacacagaacctttcatttattgtacaacatcacactcaccctaacctacttggcggacagcgatcccagtttgccttgccaaataaantctgnttatgtganttaaaaaaa

SEQ ID NO: 355661 - DNA, 1944 bp, Homo Sapiens
  misc_feature (23)..(23): n is a, c, g, or t
  misc_feature (33)..(33): n is a, c, g, or t
  misc_feature (44)..(44): n is a, c, g, or t
  misc_feature (46)..(46): n is a, c, g, or t
  misc_feature (61)..(61): n is a, c, g, or t
  misc_feature (89)..(89): n is a, c, g, or t
  misc_feature (229)..(229): n is a, c, g, or t
  misc_feature (263)..(263): n is a, c, g, or t
  misc_feature (299)..(299): n is a, c, g, or t
  misc_feature (306)..(306): n is a, c, g, or t
  misc_feature (309)..(309): n is a, c, g, or t
  misc_feature (313)..(314): n is a, c, g, or t
  misc_feature (318)..(318): n is a, c, g, or t
  misc_feature (324)..(324): n is a, c, g, or t
  misc_feature (332)..(332): n is a, c, g, or t
gtacagtcgactgcaaatgaaangcagaggatngggtgcccagnangcacctgcggcagangcgcacgtggaagcccgtgggcccaggntcatgcaacacgacgcttcaccgcggctcgtggccgttgtgggccgtctatgtagaaacctttttaaaaaatggagatgaatgttacagaattggacaacccgaactgtctttttaaaaccagaggaaggaggttcttanccgttactcagataccatttctgggtgaggtgangcctgacttcatcaacatctgtgggttgggctggangccggcncantttnngccncccgcnccactgtntcagccaccacctgtgcggcgcttgctccgaggggtcaagcaagagcaacctgatgcctgccacttccaggtccccgatgagacatggcctcacgtaactttactgcagccgaggtccaggccgtggagggggtcctagctccgctgcattctgcatcccaagtgggcacgtggaggaagggtctgaaggaaggctccggagcacaggccctggtgttcctgtgaggacgctggacctgcaggagcggggagctgcagtgccacctgctgggtaccacgggccgggcctggggtccacgcctttgggttgggtgtgtctgatgtcttgccaagcgcctggtcctgtcctcttgagctgcccttgcccagcactgcactctggaggtgggtggtgcaggcggtggagggacacaggccagctcaagcccgctggtggcagggcgttttcccaccgggatacgggaagccacctgtgtcagggctaggccctgggatcgggagttacactaccctgtcccaagccgagggggccggtggaatgatttgagcagctctgggagtggggaaaaaagacgactaatttccaaacccgtttgttctcagataaaaagcagttttataaacccgcaatctgctccagattcaagcagtaatatttcagcaggaggaggtggtcatgggaagccagcacagcagaggctccctgaccgggaggcctgcctgcttttcaggttgtttcccatgttcagcttggactgcagaagtggctcacgctcctgtggtgagggcagggtgctccacagacacctccagacccagccaagaactacagggcggcgggctgcggtcagcacgtgtgctcgggacacagcggagtcagggccagagcccttccctccaggaactgatccttgggaaaacagccatgggccaggctgcagtctggttcccagtggggctgcctcagtcctacccccagcaccctcaaaagctggggtgtctgcatgtcccttcacataattgataatggtaccaccttctataataataatataaaataaaaacatctgatgtctgggttttttcatttccaaatttggtagactcccaggaaaagattttttgcggccttttaaaaatctggttcttggcagtttatccatctgtatcgatcctgtgggactgctttggtatccggagggcctcactgtccagcaccatcacctgatgcaggacgccccggaactgatagagcactttcaggttcttctcttcccccacacacgggtcataaaagccaggcagcccagccttggaggcctccgtgaggatgagcttcgagtccttcaccaggcactgcaggggcacagtcacgtcaatcaccttcaccttctcgctcttcctgctcttgtcattgacaaacttcccgtaccaggcattgacgatgatgaggcccattctggactcttctgcctcaattatccttcggacagattcctgcatcagccggacagcggactccgcctcttgcttcttctgcagcacattggtggcggcgctttccctttgtggaacaatccttctcttcccgtcggtaggaccgccacccagc

SEQ ID NO: 355662 - DNA, 1359 bp, Homo Sapiens
  misc_feature (47)..(83): n is a, c, g, or t
tgtatagatcactatagggcgaactggatgtcacgcggtggcggcgnnnnnnnnnnnnnnnnnnnnnnnnnnnnnnnnnnnnnatcaggccaaatcggccgagctcgaattcgtcgagagcggttgggggcagccaggcctggctcgagatgccgaagtcgtgcgcggcccggcagtgctgcaaccgctacagcagccgcaggaagcagctcaccttccaccggtttccgttcagccgcccggagctgctgaaggaatgggtgctgaacatcggccggggcaacttcaagcccaagcagcacacggtcatctgctccgagcacttccggccagagtgcttcagcgcctttggaaaccgcaagaacctaaagcacaatgccgtgcccacggtgttcgcctttcaggaccccacacagcaggtgagggagaacacagaccctgccagtgagagaggaaatgccagctcttctcagaaagaaaaggtcctccctgaggcgggggccggagaggacagtcctgggagaaacatggacactgcacttgaagagcttcagttgcccccaaatgccgaaggccacgtaaaacaggtctcgccacggaggccgcaagcaacagaggctgttggccggccgactggccctgcaggcctgagaaggacccccaacaagcagccatctgatcacagctatgcccttttggacttagattccctgaagaaaaaactcttcctcactctgaaggaaaatgaaaagctccggaagcgcttgcaggcccagaggctggtgatgcgaaggatgtccagccgcctccgtgcttgcaaagggcaccagggactccaggccagacttgggccagagcagcagagctgagccccacaggctccggacgcagaggtggcagtggcaccagggccggcagagctttggagctctggctgtggacatttttgtctgctgtggacactgagaaagttggccatgaggcctgcttggccggggatcgagacagtagccaagctccccggcgagagccccaatgccgtctgggggacgtttagaggcgtggcactaggagtgcacatctgtgagcatgacaagcttatcctcccatggtaacagaagtccaggctgaggctgattctggacgctgtcctttcagcacacgcagagcaaagatcgttggaagccccagtgtgggagatgctcctcagggaggaagccatgtgagggggctggctctgtggcgggtgagtggtcccctcctccatcagcctggacagccgctcggggttctaaggagtgactcctgtcccggcctggtgtgagtgggcagtgtaataaagtgtcaatatataaaaaa

SEQ ID NO: 355663 - DNA, 775 bp, Homo Sapiens
  misc_feature (15)..(15): n is a, c, g, or t
  misc_feature (44)..(44): n is a, c, g, or t
ccttcaaggccctgnacctcggctgcaattaaatttacgtgaancctgtctctcgggccctggaaatggcagccaatcagttgctcttgctgacccctcggaagcaagcgccgcacaggtggtggctgagaacaactggcgcggggggccccaaactgcgccggcctccagcccacccacagctgttgctgaagtcaggcctccctccccagcactggtatctgagtaacggctaagaacctccttcctctggttttgaaaagcagttcgggttgtccaattctgtaacattcatctccattttttaaaaaggtttctctgacggccccacggcccgagccgcggtgagcgtcgtgttgcatgagcctgggccccgggcttcccgtgcgcctctgccgcaggtgcttctgggcacccatcctctgcgtttcatttgcagtcgactgtacagaaggcactcaccacaataaacctttcctgaaagcagaggctggcgctcttccgtgtattgtgtgttcatcttcaggagggagggaaccccttccccagaggcctcctccccatccttcactcctcactcaaccacaaggcttcacgtgaagctggggttccattttctacattaaacaacattgcctgttatacatggacaccgctattttggggtcactgatggtcttcatgtgcattgtccctgtttctcccaggactgtcctctccggcccccgcctcagggaggaccttttctttctgacaagagctggtatttcctctc

SEQ ID NO: 355664 - DNA, 1127 bp, Homo Sapiens
  misc_feature (53)..(85): n is a, c, g, or t
  misc_feature (981)..(989): n is a, c, g, or t
  misc_feature (1067)..(1067): n is a, c, g, or t
ggaatgtaatcactatagggcgaactcggaggctcatcgcggggcggcgcatnnnnnnnnnnnnnnnnnnnnnnnnnnnnnnnnnatcaggccaaatcggccgagctcgaattcgtcgagagcgggtcggttaactgttcctacaaatgaaagacacaagccaataaagccagtgagaaaggagcttaccaaaggcagtgtacgaagaaggttcctgggagactgtcagaaatgagtttttcactgaacttcaccctgccggcgaacacaacgtcctctcctgtcacaggtgggaaagaaacggactgtgggccctctcttggattagcggcgggcataccattgctggtggccacagccctgctggtggctttactatttactttgattcaccgaagaagaagcagcattgaggccatggaggaaagtgacagaccatgtgaaatttcagaaattgatgacaatcccaagatatctgagaatcctaggagatcacccacacatgagaagaatacgatgggagcacaagaggcccacatatatgtgaagactgtagcaggaagcgaggaacctgtgcatgaccgttaccgtcctactatagaaatggaaagaaggaggggattgtggtggcttgtgcccagactgagcctggaatgatgcagctcagtcaaggagcagcagacctggcactggaacagggttgaaaacccagggttttgtacttggagaggaaagatgccaagctgcttcttaatcaatccaaatttcatttacagctctggaacactttggggctgatttgtctctttaggggacatccccaacatggttaattccaactctcagatcttgtgctttagttagtacatgtgactcaccagatggggtccttagatcctattcctgctcccagtgggaatttgcttttctttgtcattttgggaaaggggcttggtttctgagtgtcttgccttctcatcnnnnnnnnncatatcctttttctcaaaaaagccatcagatctgactttcatgggaaagtgttgctgaggtcagccgggtgcaagttngggatacaaatgaaacttatggcaggatgtgtgagaggaagcagttaattggttctgaat

SEQ ID NO: 355665 - DNA, 914 bp, Homo Sapiens
  misc_feature (142)..(142): n is a, c, g, or t
gggaataatgacaaggaaaaaaaaggctgtacatgttcagcacaagtgaaaccatcctttttgcccccaaatatttttcaatttggattgggttgaaacccatggatgcagaactccacgaatacaaagggccgactgtacnttcctttaaagtgttcaaaagtattactagcaaagaggaggaggagcaaagcatatatcagaagtaaaacaatttttcttgttgactgctttggtaaaaaacagtttgatggatagttttacatttcactggactagataaaaaatggtgctaatatttatgtagcttgatgctatagttgctttggtatcaaacttaatacctaacccatataagatccttattatataattttgtgatcagtaaaatgatattttaaagagtgatcttaaaaatatgacctggtcattgcacaacgtttgcatttgaaatgaatttttgtactatagggtggatatggagttattcagtgcaagtgtgtgcttaatatcaaaccctatgcaaggagctatgtctagatttttggtccaaatttgcctccttcaagcctactagtgtgagatggaaaaaaatcgattgctcttttaatattatttccattttgaaattctcgacacttgaatgaaggcagtagaggcctctttttggatttctcttctaataacaaaactttatttagggaaggtttccctgtgctatcgtaagtttgttttgagcactgcattcactttaaaattctggaggaacaaaggctgggcacataatcacaaagcccaggccacacaataattcggggttgtattttctaagaactatgtattgtttttagcttatagttaatattgtatttacttggaaaaatgtgaataaagttaattaacattacaagctg

SEQ ID NO: 355666 - DNA, 1144 bp, Homo Sapiens
agctgtggatcacaccgctgtagtaccccagcctctctactgctcccagagcacatccacacactttgaaccctgaccttgaagctctgattcctgagtcctagttgaaagggcctcgcaacaacctatgagatcggtgatgactgcccccatttgccagctttgcagggagaggtcaagaccaagacgatcttcaggcccaagggaggcagggaggaggcttgcaaagcccacccctgggaagagaggaggaagctgaggcttgagctggagctcagaaatggggctggagttcctcatcattatctcaactacccttgcctgctggcctggaggatgaggctgggactgaattctgggcttggcctgtctccactgagtctggctggccgccctgcctgttggcagcttggagtgtgggtgtcgagctgggcatctggtgggctggctggagctggaagaccctgggaaagatgaggcctcgcaacaacccacgagatctgtgatgactgcccccatttgccagatgagaagctgaggctcggagatattgaggaatctgtcgagcgtggtagggaggggatgtgggagtcaaatctgggtcagaatggctttaagacattttctttgccttgggccacagctgcctcttccttgtttatgttgtggttttggaggaggtaaagggaccccatcacttcaagtccctcctctgggaaggagacctcgttcctaggtccttactctgtagctactcaatcaggccagggcctcagctggaccctcaagtggctgttttcacctcatgggactccacatgggtatatgacattccctttccactgccttgcaattagatgtgggaggcctgggcggttgactcacctccccctactctcagcccatcccgggaatctcatcgggacctctggtctcctatgctagcatgggcatggccaggccagctgcaccctcctctctcactccagcctgggtgaaagggcacaagtatgtctgggaagccatttctccctgcccacagccatcctggttcacgctgtgacctcagctgccatccttcccattacctgctgtatccaggacaaccgacagctcctactatacagggaggggagggtgaggg

SEQ ID NO: 355667 - DNA, 2001 bp, Homo Sapiens
  misc_feature (1688)..(1748): n is a, c, g, or t
aggctggtaccggtccggaattcccgggatcgccgaggcaggcgcgcggcgggcaggcctgggagggggcgggtccgcgcgggcttcggaggagcccgccctgccagaggagagggaggtcacggcgtaaaggtgcagctgccgccaccgccgcttctgcaaggtctcagggacgggctgcagccatgtcctattgccggcaggaagggaaggatcgaatcatatttgtaaccaaagaagatcatgaaactccaagcagtgcagaattggtggctgatgaccccaacgatccatacgaggagcatggattgatactgccaaatggaaacattaactggaactgcccatgccttgggggaatggccagcggtccctgtggagaacagtttaagtcagccttttcctgcttccactatagcacggaggagatcaaggggtcagactgtgtagaccagttccgggccatgcaggaatgcatgcagaaatacccagacctctatccccaagaggatgaggatgaggaagaggaaagagagaagaagccagcagaacaagcagaagaaacagctcccattgaggccactgcaaccaaagaagaggagggatcaagttaatgaaggccacaaggcactgggcaccagtccttttggagtggaccttttgcaaaaggccttgtcatcaccttccaagaaagtttccttctgttgtcctgtgcattataatatacaaaataacttattttgatgatcagaggtcttgaggtcttgacctcttgacatatacactgaaaaaaatgggggttgtatgtatgtgtgtcctacccaaacctgtgggccgccacttttgaattctcagattgccctgaattttgccacttttaaataatgtgctgaataagctcagcaactaaaaaccattacccaagaacgtttcttgtgagtgagctgatttattctgattcattatattccttttggtagattttataccccttggggaaataatacaacaaaaacatctcttaaaaatgctgggatggggccatatctactaccagaggccagatggtcagatatgatttctgcaaacccatcttgaccttgagtatgtgaaggggtactgtactttattcctgatacattttggtttccatgtaggtgttgagctcctggttttctgtgtttggatgatgaagatttggacccttccattcataatccctttctaagtgaagggagaggctggcttggctgttccttgttattccgaaagccctggtttggggcccatgttcacactggctctcagtctagtcaggtgcaatgttcttgagaggtggggacctaattattaccagagtagcagcaagagaggaaacgttgtgaattaagtattcaattaaaaggaaacatgatttctacctgaaatagaacggaaccagaacggacaaaccaaccccaccacaagaaacgcctcccttaaaatgctgaaccccggcagcaaccctcacacgaaagaattttctcttgtgggggccgccttgggcccctaaaaaaattttttataaaaccttttcttttgggccccccggggcccctttaagggaaaggggaaactggggccataaacctggtttcccctaaggaaataccccgggctcaaaccaaataggggctttgggaattctnnnnnnnnnnnnnnnnnnnnnnnnnnnnnnnnnnnnnnnnnnnnnnnnnnnnnnnnnnnnnaattccccccaaggggagattcctacgaaagggtttttctcggggggacctttcttccaaaggcggacttctccagagcgaacgctccaaaaaatcaaaatataagcgcccccccgcccgctggcacattttatttaagcaaatacggtgttgtggaatattttttttcatagctctttctcctgcatatactgtgtgaaaaaaccctttcatccaagccggtctttttatatccaactctccaatctctcca

SEQ ID NO: 355668 - DNA, 1578 bp, Homo Sapiens
  misc_feature (78)..(78): n is a, c, g, or t
  misc_feature (80)..(80): n is a, c, g, or t
  misc_feature (127)..(127): n is a, c, g, or t
  misc_feature (148)..(148): n is a, c, g, or t
  misc_feature (176)..(176): n is a, c, g, or t
  misc_feature (202)..(202): n is a, c, g, or t
  misc_feature (206)..(206): n is a, c, g, or t
  misc_feature (208)..(208): n is a, c, g, or t
  misc_feature (213)..(213): n is a, c, g, or t
  misc_feature (215)..(215): n is a, c, g, or t
  misc_feature (220)..(220): n is a, c, g, or t
  misc_feature (222)..(222): n is a, c, g, or t
  misc_feature (274)..(276): n is a, c, g, or t
  misc_feature (283)..(283): n is a, c, g, or t
  misc_feature (300)..(300): n is a, c, g, or t
  misc_feature (307)..(307): n is a, c, g, or t
  misc_feature (310)..(310): n is a, c, g, or t
  misc_feature (312)..(312): n is a, c, g, or t
  misc_feature (363)..(364): n is a, c, g, or t
  misc_feature (367)..(368): n is a, c, g, or t
  misc_feature (374)..(374): n is a, c, g, or t
  misc_feature (404)..(404): n is a, c, g, or t
  misc_feature (407)..(407): n is a, c, g, or t
  misc_feature (463)..(463): n is a, c, g, or t
  misc_feature (482)..(483): n is a, c, g, or t
  misc_feature (485)..(485): n is a, c, g, or t
  misc_feature (491)..(491): n is a, c, g, or t
  misc_feature (493)..(493): n is a, c, g, or t
  misc_feature (703)..(703): n is a, c, g, or t
gctccctccagagcccacatttgggcccagccccgtccaaggctgcatcccggccctatcccgggtcacggagtcatntncctcgtcccgataaccccgcccggtccacccgccatgggcttcttanaggaggagggcagatggaacntgtccttctccggcgccggctacctggncgcccaccacgtgggcaaaccgaatncctncnccacnanccccncncctcctccagggcgcccgccgcatctacggttcctcgtctggggcgctcaannnagtaagnatcgtctgcggcaagtnggtcganttntnctgctcccacctcctgggcatggttgggcagttggagcggctgagcctaannatnntgcacncggcctacgcgcccatcgagcacgtcaaanaanagctgcaggatgctctgccccccgacgcccacgtcctggcctcccagcggctgggnatttcgctgaaccgctggnntnaaggangnaaattcttggtcactgacttcgccacctgcgatgagttcatccaggtagtggccgacaactgcagacaaggctacctggatgccctgaggttcctggagagacgtggactcaccaaggaaccagtgctatggacgctggtgtctaaggaacccccagccccggctgatggaaactgggatgctggctgtgaccaacgccggaaggggggnctgtctctcaactggaaagtgccccatgtgcaagtcaaggatgtacccaactttgagcagctctcaccagagctggaggctgcactgaagaaagcatgtacgagggatcccagccggtgggcccgcttctggcactcggggcctggacaggtgctgacgtacctgctgctaccctgcacactgcccttcgagtacatctacttccgcagcagaaggttggtggtgtggctgcccgatgtgccggcggacttgtggtggatgcagggcctgctgaggaacatggccctcgaggttttctccaggaccaaggcccagctccttgggcccatcagccctacggccactcgcgtcctggaaacaagccccctccaaccccagatagctcctcatagagaggagctcgggcccacccaccaggcctgagggggccgagcagggccagcccagtgactggtgtcccttgattcctgctctggcctttgtcctgtgtgcccacatctgccccagcgggaagaggccctgccaatctccgtggagaccctgcagcttggagcccgttccttggggcgcagcctgtcagcatgtccccggtcactgtgtacccaggtcacctgccctccctcttgccccgtctcatcagggagagaaaggaggacagccacagagacacgtcttactttcagaatttccacggggggactaggagggcagaattgctggggagaggggctcctgttctgccggggagctgcccacggagcacctcacagaagattgagaaagggcctgatgcccgcggcagagaccagaggagccaattgatatatggatgggatccgcccccttgccgtttttctcaccctttcccgcccctt

SEQ ID NO: 355669 - DNA, 1183 bp, Homo Sapiens
  misc_feature (12)..(12): n is a, c, g, or t
  misc_feature (111)..(130): n is a, c, g, or t
  misc_feature (662)..(685): n is a, c, g, or t
  misc_feature (967)..(978): n is a, c, g, or t
  misc_feature (1061)..(1061): n is a, c, g, or t
tcaggtgcaggnagaattagtgagattgtgtgcctagccagtgcctgactccagtaggtgctcagcaaatgctcccatccatctgggagtatagacttagggtttatctannnnnnnnnnnnnnnnnnnnggctctctggactttaaaactcagcatcttctgaaccagaggcatttctgattagcccttccctacctattttcctagtatcactctttaatcagcttggggaggtggcagcatttcatggcctccgtagtaactcacaatgcttcctggggtatttaaattctactctctcatcagcactgagcacctactttgggccctttcccgtgctagccatttgggggaaatataggtgaagagtggctggggtttgaacctttaggatttcacagccatgctggatgggataaaaccagctcacatggagaatcagagaatgggacagtgccacaaaacagtctactgaggcacaagttctgagtgcctgggaagtggtagagagaccccagagagggctgctgcagtctggaacagcttcctagcaagctgtaccaaacagggccttgaaggatgagaaagatctggctgagatgatacccgaccctctagggaaattcttagagtaacttctaggaaatgtcattgctccttnnnnnnnnnnnnnnnnnnnnnnnngcaggttctaattcaaattccgctgcactactgaagtagtgcaggacttatcagaacctttaaaatgctaatggcaatttcaaatactcagggacagggcataggatgaagtgttccttgacttttatggccgtagaatctttttctcatggaacatcgtttagaactgtgggagatgctaggctggggtttctatgggaaaagtacagcagtgatagaagatggcataattagggtacacttaggtgctttgtagcattggctgaggccagcttgatgcgnnnnnnnnnnnnctaatggtgggagggcaagccaatagttggagaaactagaggcctgacagtcggtgatggaagagatgtctactaagcacggntgtcaaatcttttgcgaaagatgcggtgttccttgtgctgtcagagtgtacaagatccagccctttggaagggcttaccagaaccagcaggggtttctgttaagacaattaggtcattttag

SEQ ID NO: 355670 - DNA, 1441 bp, Homo Sapiens
  misc_feature (115)..(266): n is a, c, g, or t
gaaacagagtcttgctatgtgacccaggttggcgtaatcatagttcactgtgaccatgatctccctggttcaatcgatcctctggcttcagtggctgggactacaggcatttatnnnnnnnnnnnnnnnnnnnnnnnnnnnnnnnnnnnnnnnnnnnnnnnnnnnnnnnnnnnnnnnnnnnnnnnnnnnnnnnnnnnnnnnnnnnnnnnnnnnnnnnnnnnnnnnnnnnnnnnnnnnnnnnnnnnnnnnnnnnnnnnnnnnnnnnntaagggttagatcttataagctctgctgggcttcctggccatgccattacagggctggtagttcttcaccagcggctggaaggctttccagagggctggcagctgggcacacagtgtgcccccaccccgttgctcctctccctggttccgattcatgtcacccacgcaggtccagggcccttttggggacacgcaccatttggagtggtcctctgtgctgttgaagcttgggccggctggtccagggaaagctatctggttcacattcagaacctgccagatatccgagcagttagagggcaggatgcctacagttttgtgccagaactggacctgcaggttggtaccaagggctgctgccaaccagccggagtacaggtcatctccaaatttgctgaacttggcaaagctctggaaaacagccccggcctgggatgtgagtgtgatgctgctgttccagggttcttggctaacgtggtggcccttgaccacattctccaagtcggggaattcctgggcaaagatcccttccagctggtagttatagacccaggggtaggtgtaggtcagctgcttgcccatcttcgagaactgagcgaagggaaaagacacacagagcagggtctgcccgtaggtacaggcgctatgaggccagctgtatgcagcagaggaggccggtggagggaagttaggtacactgtggaccagccagaagcccccatcgtggtcaaggagcaggacacccttcgtgtgcccacgcatggaagagtcctgagccttgctgggttgaggcggttggtcattgtagagcaggaaggcgagctggctggtgttgctccggtacagcggctgcaggcttcggcccacgggcccctccgggctgttgatgagtgccctgccgtcccgccagcctccggagctctcgtccagatacttgtactgcagccctctctgcgccgcctccccggaccctctaagagctggcagcttgtagaccacgaaccagtctacaggctgcccggagtccccgtagcaggtcagggccccggcggggacgcacagcagcgctgccagcagcagcgggatcatagctgctatggggctgagatccaggaatctgtgtcgggactgcggggcgctgggttacatcagaggccaggactggcacctggcgc

SEQ ID NO: 355671 - DNA, 2878 bp, Homo Sapiens
  misc_feature (1831)..(1887): n is a, c, g, or t
  misc_feature (1902)..(1997): n is a, c, g, or t
  misc_feature (2592)..(2592): n is a, c, g, or t
  misc_feature (2706)..(2706): n is a, c, g, or t
  misc_feature (2748)..(2748): n is a, c, g, or t
  misc_feature (2759)..(2759): n is a, c, g, or t
  misc_feature (2821)..(2821): n is a, c, g, or t
  misc_feature (2824)..(2824): n is a, c, g, or t
agaaaggggtgcggcagcactgccaggggaagagggtgatccgacccggggaaggtcgctgggcagggcgagttgggaaagcggcagcccccgccgcccccgcagccccttctcctcctttctcccacgtcctatctgcctctcgctggaggccaggccgtgcagcatcgaagacaggaggaactggagcctcattggccggcccggggcgccggcctcgggcttaaataggagctccgggctctggctgggacccgaccgctgccggccgcgctcccgctgctcctgccgggtgatggaaaaccccagcccggccgccgccctgggcaaggccctctgcgctctcctcctggccactctcggcgccgccggccagcctcttgggggagagtccatctgttccgccagagccccggccaaatacagcatcaccttcacgggcaagtggagccagacggccttccccaagcagtaccccctgttccgcccccctgcgcagtggtcttcgctgctgggggccgcgcatagctccgactacagcatgtggaggaagaaccagtacgtcagtaacgggctgcgcgactttgcggagcgcggcgaggcctgggcgctgatgaaggagatcgaggcggcgggggaggcgctgcagagcgtgcacgaggtgttttcggcgcccgccgtccccagcggcaccgggcagacgtcggcggagctggaggtgcagcgcaggcactcgctggtctcgtttgtggtgcgcatcgtgcccagccccgactggttcgtgggcgtggacagcctggacctgtgcgacggggaccgttggcgggaacaggcggcgctggacctgtacccctacgacgccgggacggacagcggcttcaccttctcctcccccaacttcgccaccatcccgcaggacacggtgaccgagataacgtcctcctctcccagccacccggccaactccttctactacccgcggctgaaggccctgcctcccatcgccagggtgacactgctgcggctgcgacagagccccagggccttcatccctcccgccccagtcctgcccagcagggacaatgagattgtagacagcgcctcagttccagaaacgccgctggactgcgaggtctccctgtggtcgtcctggggactgtgcggaggccactgtgggaggctcgggaccaagagcaggactcgctacgtccgggtccagcccgccaacaacgggagcccctgccccgagctcgaagaagaggctgagtgcgtccctgataactgcgtctaagaccagagccccgcagcccctggggccccccggagccatggggtgtcgggggctcctgtgcaggctcatgctgcaggcggccgagggcacagggggtttcgcgctgctcctgaccgcggtgaggccgcgccgaccatctctgcactgaagggccctctggtggccggcacgggcattgggaaacagcctcctcctttcccaaccttgcttcttaggggcccccgtgtcccgtctgctctcagcctcctcctcctgcaggataaagtcatccccaaggctccagctactctaaattatgtctccttataagttattgctgctccaggagattgtccttcatcgtccaggggcctggctcccacgtggttgcagatacctcagacctggtgctctaggctgtgctgagcccactctcccgagggcgcatccaagcgggggccacttgagaagtgaataaatggggcggtttcggaagcgtcagtgtttccatgttatggatctctctgcgtttgaataaagactatctctgttgctcacaannnnnnnnnnnnnnnnnnnnnnnnnnnnnnnnnnnnnnnnnnnnnnnnnnnnnnnnntatagaacagacacnnnnnnnnnnnnnnnnnnnnnnnnnnnnnnnnnnnnnnnnnnnnnnnnnnnnnnnnnnnnnnnnnnnnnnnnnnnnnnnnnnnnnnnnnnnnnnnnttgactgtgggtggaagggcccctacccccacaacaaaattcttataaaaaacatttttttgtggggcgcgagagggccaataagagaaaaaagtagcaaacggggtcttcaattcttcaaacaaaaagagagcacagtgggcaccaaacagagggtgttgtgatatcctccacacaaataaaaataaaagcacctcgcggggtgaaaaaccaaagtcggtgttacgtaaaatatacatcataaacgaagtctgtcgaggggctgtatatacggagaacatcaccacacaagcagcaaacaacacaatatggtagtcatcataattcataaagataaattgaccacacgcccggccagcagaacagaaaccatgaagacagacataagtcgggaggataacatatatcaaaaacacacacaatatactcgaccaaggacacgtaaggaaaacgtcccaatgacacaaactgtctcggcgctagcgaagaatacatagttaatataccatcgcagcagacggaagatagagactatgcgcacgcgactaacatagctacgaggcctctacgatatatataaatataagtatttctnacaccataagagcacacaacgaaactaatcccggcacaaataaaatacacaatcattgtagtcccaacactttgtagggctcaccaccatcataatatataactacaacaaatngatgcgcagcagcaatagcgactcaccacgcacacgatgaancgtacgccgtngtgagaatacacgcaacacaatatataataatctcctcttcgccgtcaagaacacatctacnttntctcgagaatcgacacatagaccacgatcgccgtcgtctacatcatcgccccac

SEQ ID NO: 355672 - DNA, 1067 bp, Homo Sapiens
  misc_feature (12)..(12): n is a, c, g, or t
  misc_feature (25)..(25): n is a, c, g, or t
  misc_feature (30)..(30): n is a, c, g, or t
  misc_feature (32)..(32): n is a, c, g, or t
  misc_feature (60)..(60): n is a, c, g, or t
ggttaagcaacntattgcatcatanttatntntcagccaccgcggagaccccgggcagcncactccaaaaaaagtaactcctatggttggtccttttatttcggagccttctctctcatcatcgcagaaattgtaggagtggttgccgtgcacatctatattgaaaaacatcagcagttacgagccaaatcccactcggagttcctgaagaaatctacttttgcccgcctcccaccctacaggtatcgattccggaggcggtcaagttctcgctccaccgagcccagatcccgagacctgtcccccatcagcaaaggcttccacaccatcccttccactgacatctcgatgttcaccctctcccgggacccctcaaagatcaccatggggaccctcctcaactccgaccgggaccacgcttttctacagttccacaattccacacccaaagagttcaaagagtcactgcataataatccggccaacaggcgcaccacgcccgtctgaactgacctctgacctctgccccacgcccagcacagccttgggggaagtgaacagagatgtctctgaggttgcatggcatggtccttgtgatggtattactttttacaaagaatgaaaccaaatggactcagccctctcccacattttcccctcaccctccaagtcctaacccctccatcctctctaacttttcaagccaatcccttaatgtcattcctctctctgtgtatctgtgccagatgttttcctttcttccttctttactggaaggacctccacattcttccctccttggaagaggactttactaaaagtcacaggtggtggccaggggggatttccgaatctccatcaggcgcgctcatagttgtccccattgtctacccacacaaatcctcaggaaaccaaccaccgcccaggtggccctgagggaggcattcacctttatgtgttagaaaaacatgaccagaaatcaaagatgtcagagccccgaagcagctaatgtaataagcactcatgttattaaaggttttgccttgtcgtaaccaaccgaaaaaaaa

SEQ ID NO: 355673 - DNA, 865 bp, Homo Sapiens
  misc_feature (637)..(656): n is a, c, g, or t
cggaaggtggagttggtcctcgcctggccctggttccgtacctcctgctcccggaactgcagcccggccagatgcttctccagcgcctcccaatccataggtggcaccgggggctcttcggggacgcacgtcccgccgtctgggggctgaaggcagagccccccagccgccgggccgcggccactgcgccggcccccagccggctggggtttttggatcgcccggcggggccccgggaacagctcggccggccagccaccaccacgttgccattgtgcctgaggtcctgggggtcgtgctggtggaggttgccgttgggcaccgggggcggcatggcggtggtggcgctcctgcccccgccgccgccgctgcgggtcctggcgcttacgtccccggttcccgggccggagagcggtcatcccggtaccctcgctggtcgcgctcgtcctcctcttccccctcctccccgtccccctccggcgcccactcatcaatcaccttcttctggtagaccgggaagggctcctcatagtcctccagggcagacaccaagtccaggctgccccccggcgacgatgaagatttgcactcggagcaaggggtcactttggtggagttggactgtgaactggcgcgnnnnnnnnnnnnnnnnnnnncggcgtcactgcctagagccatcccatcctctcggtaatccctcaaattagcaaaggggtgcccagccaccagcgcgcacacttttcatacaaggggccccgcggcgcgcgcagactttgtattaaccattttgcgccaggcgcgcccctttaccccgccccaaggattctccgagaaccagacactttcccaggaaattataattccc

SEQ ID NO: 355674 - DNA, 1401 bp, Homo Sapiens
  misc_feature (411)..(411): n is a, c, g, or t
ggcggactcccgggcggcggggacgcgcggggacccggccgcgggacgagggaggccggcggctggacactacctgcgggagagcgagtaaggttctggccctccgagttgaccgcctgcaggtgttatacagaacatccacggagtttgggccaagcccagagtgaggagctgggcactggggtggcagaagaccaggccttgccttgagcccttgtgcgagctttacctcaaagcctctgtaatcgaagtgggagaaggggtggtggtgcgtggttggtctcagccacctccaccactcctcagaagatgaacgctggatccaggaagagattgtcaagcctcccaagccctgtggggacagtgcacacagactatgatggatgcctgaagtgggttgcattacaaganaggagcactgagctaaaggaatttgcctcttttaggctacacagaattaagcctgctctttgaaggtggggagatgttatctcatccctcaaacgttgcttgctacaaacaccgcccagagaaatggactgataaagagctggacattggagtggcagaacagcaaaaatgatcagagaagttcaagggccatggcagagagccttttccaacatagtacagtgtacttatacactacatatgaaggccagctaatctagtcttgggagaaccaagagaggcttctgaaagagatgacatctatgccgaaccttgaaggtcaaacaggaatcagccacataaagagaaggaggagagcattctggatagcaggaacatcatgtataaaactttgaagtaaacgatacactccgagaagtttttaattccctttcacattcatctccatattgaactccaatctcaaacacctataattaaagtcagtgtgtgactctggaaggtctagattcaatacacttctgtgaattgcagtggcctctggaatctttacattaatgtcacataaaattcacagctaattattgtcgactcagttcataacatttccaccttttcggtaactcttctttttttactccacagtccgcctggttaacagtgaggctttgtaacagcataactttaactatggctacagtttattggctcctattttggaaactgactcatgctgaactaatcccctttccctgggagtttaaaatcaaggttaggaggtttttaacgtaccgactgctctccaacagcagcattataacctttgctatttttttcccttgtattctgaaaatagaagagaaatacagaaaactctctgggttatgtatagtgcactagagtctggtacagttcatgagcagcgtctctatctctggtttctgagacatccttgcatccttataataaattcctctttaactttaaaaa

SEQ ID NO: 355675 - DNA, 1424 bp, Homo Sapiens
  misc_feature (279)..(291): n is a, c, g, or t
  misc_feature (489)..(593): n is a, c, g, or t
  misc_feature (858)..(867): n is a, c, g, or t
cgttaatgtagttcaatatgagataaattattatcttcaatgaaacaagctctaaaagcattccattcctaaattgtatttcaaacttcctattttgttgatatttcttaacttctggccagttttggaccataatcttttaatgtgaaccaaagatggtacgtatttgaccaaagcagttagttttaaatgtataaaattgaaccaaatggaaaaaataggttggggatgcagtatagattagtgactaagtgcataggctctggagtaaatctgagnnnnnnnnnnnnnaaaggaactaaaaaatgtactgcattttctttgtggaataaaagccttgcctgagttgtgctattttcataaggcttttgaagtggtcttgacccactgtgtgtaacagtatttcaggtggtcctccccatgggctgaataatgccatccattattctttaatttttatttttaggaaacagtgtttcactctgtcannnnnnnnnnnnnnnnnnnnnnnnnnnnnnnnnnnnnnnnnnnnnnnnnnnnnnnnnnnnnnnnnnnnnnnnnnnnnnnnnnnnnnnnnnnnnnnnnnnnnnnnngtgtgagccacccacgcctggccaccatctattacttttgaaatcttcaaaagacttgcttactcaatgtcagctgatggttggtaaaaataatttggcctttagtgttaagtgagacatcataagggtattgaggtatacattatggagattgatgtcaggtcagaatattggagttatacatctatttctgagttgaatactcagctcccacgagaaagaaagtagttttaaggtccagcttcttagtctacttgaagcaaannnnnnnnnngttatatttctgaatataaatatactcttatatgggctaaaaagaccccatgaataaatagcaggttcagtagttgaggagtggagtttagtaggtttgttttcagtataaattagataacatgtggaggtcacagcattttggaaattgagtgtccccaagtgagctttgtttataaactttcgaaatgtcggaagtggacaggtttgttaaatcttgtctgccagcacccttttcttcctttgttccttttcctctctgtgttattgcctgcggcagccagtccttcatactagatagagttcagataaagcaaacgtttggcaaaaacatactgtttgacctcctccccctctgcttatgaaggggtagcatgattctgtgttttaaagcagtgatgtttcagctgtgaaatgcactcgctgtaagctctaggctgagtgcatggaaactgttacgcttctcattttatgtgatctcctaattggtatgtagcaaaaattttctaaaactgttttgtggcttgttttgtaataaaaccatgtgaaatactgaaa

SEQ ID NO: 355676 - DNA, 2439 bp, Homo Sapiens
  misc_feature (152)..(229): n is a, c, g, or t
cccttgtcattattcccctaaacaatatagtataacaactatttacagagcatttacattgtattaggtattttaagtaatctagagatgatttaaagcatacaggaggatgtgtctaggatatatgcaaatactacaccattttatagaannnnnnnnnnnnnnnnnnnnnnnnnnnnnnnnnnnnnnnnnnnnnnnnnnnnnnnnnnnnnnnnnnnnnnnnnnnnnntaccataacattccatttacaaagtgtgtgcccagaacagcattatcaacctgaaaaaggatagtggaagaccctacagattttttttaacttacgaattgtgcagaattatcttctggaagttatggcttccaataacagccatcttgcttgctctcgttcttacaatttagtcagctgagttcaagtgacccaagtataaatacccttcaagttgctagcaattgatcttcgatgaaacacaatgacaaagatattacatatgaaatggtataaatatgtgcctcctacctaatacgcaagtaagatcacctatagcctattatacatttattcatttttaaaatgaatcttttgaagatccatttattcacatttttccaagtaaatagaatattaactataactactaactataatcttttaaagattcattttaaaagtgaataaatgtgcttagaaattttaggggggagaacacacataacatacatataaccagaggtgccaagtattttaacatctcctaactaagggcagttaaaagacaaagaatcgattcctgttcacttctcctcccgcggacttaatgtccagcagagtgctagacaatattgcttcaatattctattactttaatattaaaagcagtaacaaaatcaaaaagcatatttatgacattgttttaattaagttaaaatcaaaattttaaaaagagttttatgtagcatttattttaaatatcattgggttctctgtttcagactttttcaacatgaaaggtaatttttaaactgtctcactgtcttgcaggttgtcccaagaattaggaacatgattacaaccacattcatttctagaatgaaaagaaagaattaggaccatcagactgttaacaactatcaaattttcacaggttcaaaaggtaattgacactctttaaaaaagaaagaaaagaaaccctaaccaactaaggacttggatgtaagatgaaggcttacaattcatactgatttattaaccattcatgcactttaaaagcactttaaaaatcccgttcatttgtcttccacttaaaaagaggaaaaaattggccaatatttgccttctacattatatctctgtctggagttttaagtagtaagtacattaaatataagtttgttttctaaacaagagaaaagtctggcggttcaaagtctagaggaagtcgggtttctaaggcagtccgtcagtgtggggcctgcaccactctctaaggccgtctttcctagattgtcagctgcaacacaagcctgagctggatgactaacaccgaacatgcaagaagcgactttaaaggaacagttttcacaatcagctagctacaccatcacaaattgccacattaaggtgatctttaggtacctgtgtcgtttaaagactttaataatagttaataccaaaattcaccagttactagcaaggctgttttggacaacatgtaaaatttcctcttttgaaatatacatctcaatgattaggagagatctgtaaggaaacaaattcacctcaaaactatgcaaatatttaaaaagtttttttaagctcacaatacttcagtatgtgttttcaaagcttaaacagttatcatgtgtgaagagtttatggggaatgaaagcaatatgttctaaaaattgactatggttttccaaagacccagagaaaaatactaaggtaatactcagcctcacgtccactcacacatcttcgggtgccaagctggcataggcagagcaccattatctcttataaggaacttagcacatatccttctagcagattcttgtctccacaggatggagaagacatcattcatttgatggaaaccagtgtttgttaaaaccatttttctacccccaaagcaaacatactaaagagaaggagcactatttacataaatttgtgcctacccacacaccaccattctctcccattaaagtgtagataagatctactggctaggaatcaaagagtaacgtatttcaacctaaagtttgaatactgtacatcatcaagactttgttattgttaagtgctataaagaaaaagagaaagtaggggtgggcagtctatctaacaggcatcttcacactggtccccatcccagtggaacaagcaatgccaatgtaccaagtgcaattccagattgtaagtttgaaatgtcattg

SEQ ID NO: 355677 - DNA, 1040 bp, Homo Sapiens
ctgtacactagagggttccatgagattattgtaaactcatgatgctgctatctcaaccagatgcccaggacaggtgctctagccattaggaccacaaatggacatgtcagttattgctctgtctaaacaacattcccagtagttgctatattcttcatacaagcatagttaacaacaaagagccaaaagatcaaagaagggatactttcagatggttgtcttgtgtgcttctctgcatttttaaaagacaagacattcttgtacatattatcaataggctataagatgtaacaacgaaatgatgacatctggagaagaaacatcttttccttataaaaatgtgttttcaagctgttgttttaagaagcaaaagatagttctgcaaattcaaagatacagtatcccttcaaaacaaataggagttcagggaagagaaacatccttcaaaggacagtgttgttttgaccgggagatctagagagtgctcagaattagggcctggcatttggaatcacaggatttatcatcacagaaacaactgttttaagattagttccatcactctcatcctgtatttttataagaaacacaagagtgcataccagaattgaatataccatatgggattggagaaagacaaatgtggaagaaatcatagagctggagactacttttgtgctttacaaaactgtgaaggattgtggtcacctggaacaggtctccaatctatgttagcactatgtggctcagcctctgttaccccttggattatatatcaacctgtaaacatgtgcctgtaacttacttccaaaaacaaaatcatacttattagaagaaaattctgattttatagaaaaaaaatagagcaaggagaatataacatgtttgcaaagtcatgtgttttctttctcaatgagggaaaaacaattttattacctgcttaatggtccacctggaactaaaagggatactattttctaacaaggtatatctagtaggggagaaagccaccacaataaatatatttgttaatagttttt

SEQ ID NO: 355678 - DNA, 1799 bp, Homo Sapiens
  misc_feature (54)..(55): n is a, c, g, or t
  misc_feature (59)..(59): n is a, c, g, or t
  misc_feature (72)..(72): n is a, c, g, or t
  misc_feature (74)..(74): n is a, c, g, or t
  misc_feature (88)..(88): n is a, c, g, or t
  misc_feature (107)..(107): n is a, c, g, or t
  misc_feature (110)..(110): n is a, c, g, or t
  misc_feature (112)..(112): n is a, c, g, or t
  misc_feature (1267)..(1267): n is a, c, g, or t
atttaaatattgccttatgaaagacccagaaagagaaatatgggcatttgtggnngtgntcaaaaagggagngnacgggaatacatgntctaaaacacaggataggnttncntctgtaataaaatttggtacccttaaaatatctgtaattcaacctcagaatgagtgtatcttttaaaagctctttgaaaacacttccccactctctttgtctcttttctttataaggcatcttctctttaactccctttgggaaacttcttataaatgaggatttgcatctccagggattactctggttaggaaagtgttttattaaaaaatatatgtttgccacagaatgctgagtgatataattagctggtcccttctgttttgttttaaaaggctgtatggccaagttctaattaaacatattctcaggacgtttgaaatgtgaaggtgcctcagaaatgggcactgaaatgaaagaagcaatggctccgggagtatataccaggaaggaggatctctggccacggtgcacccggcagtacggcttcatttctgtctctgtgtgcacagctactgtggatagagaagctggtcccatccaaccttggtgggacactgccttgtgttctggaagactatgtgctaaatgagctgatcttgttccacccaggacaatccaggaaggctgagggagtgagtcctgggctgggattctggggacctggggatgtaataggttatcatctgtaaagtgacaattgctaaggtccctgccagctctgacattctgattggacacatggctgtttccactggctttgttcttgtcacaaagcataagaatgctccaaatgatcacgctgcattttactctgtgaccccaggaataaaatagaaggctggagaatctcactgctgttcctactgaataatgactggctcaaccacgagaggcagtgctgtgccctcatttgcaaaaagagaaggatacttccctgtctcccttttggagaagcaagtaacctggaaatggaagtattctgtccccattcagaaggatggctaggagcccacaggagtttagagtttagaaatgccccctctgaatcctcccgcctgggcacactgtgagacacccttagtctttacaaagcactttcatattcactaatgcctcttacagagcaagcggagctctcatttcattgctagcggggatacaaaatgctacactcactttggaaaacagtttagcactttcttgtagcattanacacgctcttaccattgacctagcaatcattctcctaggtattgaaacttaagagaaatgaaaacttatgttcacccaaaacctagaggtgcttgtacatcgtggctttatttgtaatcaccccaaactggaaacaacccagttgtcctctaactgatgaatggataaacagatctgggtacatccatgcaaaggaatacttctcagcactgctaagacacaaacttactgatacatccgacaacatagataaatctcaaatgcattacactagatgaaagaagccagacttgaaaggtgacatactctataattccacatacgctacaccctggaaaagggaaagctttaaggtgaagaacagatcagaggttcagtggtttctaatgcgggggagctggggttaagggcaggcagatagtttgactacaaaaaggcagcataaagcagttttgggggagtaagaaaactattctaggccaggcacggtggctcatgcctataatcacagcactttgggaggtcaaaaagg

SEQ ID NO: 355679 - DNA, 2968 bp, Homo Sapiens
  misc_feature (2048)..(2048): n is a, c, g, or t
  misc_feature (2114)..(2114): n is a, c, g, or t
  misc_feature (2202)..(2202): n is a, c, g, or t
  misc_feature (2280)..(2281): n is a, c, g, or t
  misc_feature (2297)..(2297): n is a, c, g, or t
  misc_feature (2344)..(2344): n is a, c, g, or t
  misc_feature (2388)..(2388): n is a, c, g, or t
  misc_feature (2407)..(2407): n is a, c, g, or t
  misc_feature (2414)..(2414): n is a, c, g, or t
  misc_feature (2422)..(2422): n is a, c, g, or t
  misc_feature (2431)..(2431): n is a, c, g, or t
  misc_feature (2481)..(2481): n is a, c, g, or t
  misc_feature (2569)..(2570): n is a, c, g, or t
  misc_feature (2630)..(2630): n is a, c, g, or t
  misc_feature (2658)..(2658): n is a, c, g, or t
  misc_feature (2673)..(2673): n is a, c, g, or t
  misc_feature (2694)..(2694): n is a, c, g, or t
  misc_feature (2721)..(2722): n is a, c, g, or t
  misc_feature (2729)..(2729): n is a, c, g, or t
  misc_feature (2780)..(2780): n is a, c, g, or t
  misc_feature (2824)..(2824): n is a, c, g, or t
  misc_feature (2941)..(2941): n is a, c, g, or t
cgctggtactggcccggagtcgtagggatagaagatccagaccgtgttcgagcagctggtgctggtggaccacccgaacatcgtgaagttgcacaagtactggctggatacctctgaggcctgcgcgagggtgagcacgggcaaggccccgggcaggcagagaccacagctaggtggggcgggcatggggacgaacccgcagctggtggaaatcctgagctcgcaccgtgcaggtcatcttcatcacagagtacgtgtcatcaggcagcctcaagcaattcctcaaaaagaccaagaagaaccacaaggccatgaacgcccgggtatggggagcgggctggggcagccacggggacaggacggggttggggcagcctcggggactgggatggtgagggggtgcccggcggcctcggacaggggctgggcgaggatgcggggcgggctccgcaggcccagccgcctctcctgcgcccacccgaccgacggagtcgtgcgtccgccgccaggcctggaagcgctggtgcacgcagatcctgtctgcgctcagcttcctgcacgcctgcagccccccaatcatccacgggaacctgaccagcgacaccaatcttcattcagcacaacggcctcatcaagatcggctccgtgtggcaccgaatcttctccaatgcacttccagatgatctccgaagccccatccgcgctgagcgagaggaacttcggaacctgcacttcttccccccagagtatggagaggtggccgatgggaccgctgtggacatcttctcctttgggatgtgtgcgctggagatggctgtactggaaatccagaccaatggggacacccgggtcacagaggaggccattgctcgcgccaggcacttcgctgagtgaccccaacatgcgggagttcatcctttgctgcctggcccgggaccctgcccgccggccctctgcccacagcctcctcttccaccgcgtgctcttcgaggtgcactcgctgaagctcctggcagcccactgcttcatccagcaccagtacctcatgcctgagaatgtggtggaggagaagaccaaggccatggacctgcacgcggtcttggcggagcttccccggccccgcaggcccccgctgcagtggcggtactcggaagtctccttcatggagctggacaaattcctggaggatgtcaggaatggaatctacccactgatgaactttgcagccactcgacccctggggctgccccgtgtgctggccccacccccggaggaggtccaaaaggccaagaccccgacgccagagccctttgactctgagaccagaaaggtcatccagatgcagtgcaacctggagagaagcgaggacaaggcgcgctggcatctcactctgcttctggtgctggaagaccggctgcaccggcagctgacctacgaactgctcccaacggacagcgcccaggacctcgcctcggagctcgtgcactatggcttcctccacgaggacgaccggatgaagctggccgccttcctggagagcaccttcctcaagtaccgtgggacccaggcctgacccggagccccagccccaggggaaccatgcccgggtgctgcccgggcaggcccatgttggggagactcaagcacactggggctgccctcctccatgcgcctgggaggccgaaggccccacttaatggcggaacccccccgacctcctgagaggtggggctgtaccatggcttagagaccccgaacgggctctcccgccacacacaccgccaccacacccacttcgcctcctgagcccccgccctacgcctgtggacactcctaacgagatggtccgccccttgcgctgccccccatgcaaccgtcgccgggtaggaagtcgcccatcccacccctcgcgccgaacgtcgcgaccgccagatcagctcccgtgtatgccccgcccgccacgccttcctcaatctctaacgtatcgctacgaagcggtcactcgaacacggtcaatgtaacagaatccaggtgcgcagagggaggcntgcgatgagtatcccgcaggtatctacgaactaattccaccattagcccacgaatttcgccccctncgccggaactaccacatgggagcccgatacctttgcatccagacgataccacccccaaacacccgcgcccgggtgaggcacgcccganctcgcgacactccttgtgtatatatgttggcgtggaggggcgaaaaaagaggccgtatccgcgcctgatagaatcttnnttgggtacaagcacgnaccaaaaaaccggcatcgtcgtaggtaagcgccgaaactccttcccnatggcgaccccctccctggtcgcattccaacaaatcattccacngtcggaacaatggggggangtaattnatcactantcagccatnttcggcggaaattgtcgggtaggtataagggtaaccacgtcccgcggggnggttatggggcgggtgttacgcccgcatggtaatttttgttggcggattcgaccatcccaatttgagcgcaccttgatcgttctcaanntcaatgttcgcttttgcccggtaaggtgactgtcatcaaaacgagcaccaccccccccgntacaacggcccccatttgcaaaggggtngcgacgtgaaaatcngtgtatatagggacataattnaagagggccgcgctcctcaatacatanntattcgntgcatgacggagcaccgtttcatctgttaccacatcgctttcaatttggtntatccgagatgacagcccccgagggtgagcgcgctgcgtaaacnacgcaacccgccaagacgcgcgtccgtcgtactcggacggatgcgccccccgtcccaccccggttcatattaccgacgtggttgtagcgggtgtgggtgcgtgcgtcgggtatgatncatcagaggctgtgtgaacaattgttg

SEQ ID NO: 355680 - DNA, 1260 bp, Homo Sapiens
  misc_feature (718)..(765): n is a, c, g, or t
  misc_feature (1140)..(1160): n is a, c, g, or t
ggaaaaaaattaggggccccttgcttaaaaaagaaattcccccagttaaaggatttttccggaaaaaggattttctccatggtattttggtgagagtaaaatttaccttcttccccattaaaaacttttttaaaagttctaaggaagggaccatgttcttattattgccatattttggcaggtcccagtttggttaataaaggcagccccagtataagtgggtaaacatcttaaagggtagtaaaccaaggcctggccattcttttcctcccccaaaacatgccatttccaatgctctttgccatgaataattattctttcctagaaaagttttcagggtatattttaaatctataaaaaaaatacactgaaatatggaaaagatttagtcatggcaatttcactgcagcttttattgcctctgttggtaatatgacagggactgtaagaaacacaatggaacttacagagatatgcagatgatattcactaaagataatcttcatctcaagtattttttatatgtgggcacttctaattttatacatttttctatttaaaaagcattacattttaaaatttgggcctgttttgacatttggcaaaaaggaaactgtacctatggttcagtttaaaacaaagaatcagcatggggagtttaccggaatgaggactgaaacacttaggagttaaagcaattcaaggggcgtgtgtgtgnnnnnnnnnnnnnnnnnnnnnnnnnnnnnnnnnnnnnnnnnnnnnnnnagacacagactcaaacacacacagccatatgtgtaatcattttttaggacaaaatattccctgtagccagacatttatcttcagaataatcacaccacattaaatcagtcttctcttttcagccctagtaaaagttttgtttaattctaagatgccatcatagtgaacaaccttaacttttatgctacataattatattcaaagctttatgtatttttgtttataattacacagtaattataaatgtttagtaccaacctgatgacaaacactattttgttgaaaaggttttgcatttaaaaagaaaaatatgtaaaatccaaggcactaggccacgaaccaatatgacttttaaagaaaacactttatattggnnnnnnnnnnnnnnnnnnnnngctaatgggatctcatttcaaaacacagcatatgtgaattaatcaatctgaaaccaataaccataactcaaaatcttcaagacaggaaacaaaacagtac

SEQ ID NO: 355681 - DNA, 1871 bp, Homo Sapiens
agagatgtctgcatgaggaacagaggctgctttgtggattggggagctccccattagcggaggcagagccagatttcacactgagcagctgcagtcggagaaatcagagaaagcgtcacccagccccagattccgaggggcctgccagggactctctcctcctgctccttggaaaggaagaccccgaaagacccccaagccaccggctcagacctgcttctgggctgccatgggacttgcggccaccgccccccggctgtcctccacgctgccgggcagataagggcagctgctgcccttggggcacctgctcactcccgcagcccagccactcctccagggccagcccttccctgactcagtgaccacctctgctgccccgaggccatgtaggccgtgcttaggcctctgtggacacactgctggggacggcgcctgagctctcagggggacgaggaacaccaccatgccccggggcttcacctggctgcgctatcttgggatcttccttggcgtggccttggggaatgagcctttggagatgtggcccttgacgcagaatgaggagtgcactgtcacgggttttctgcgggacaagctgcagtacaggagccgacttcagtacatgaaacactacttccccatcaactacaagatcagtgtgccttacgagggggtgttcagaatcgccaacgtcaccaggctgcagagggcccaggtgagcgagcgggagctgcggtatctgtgggtcttggtgagcctcagtgccactgagtcggtgcaggacgtgctgctcgagggccacccatcctggaagtacctgcaggaggtgcagacgctgctgctgaatgtccagcagggcctcacggatgtggaggtcagccccaaggtggaatccgtgttgtccctcttgaatgccccagggccaaacctgaagctggtgcggcccaaagccctgctggacaactgcttccgggtcatggagctgctgtactgctcctgctgtaaacaaagctccgtcctaaactggcaggactgtgaggtgccaagtcctcagtcttgcagcccagagccctcattgcagtatgcggccacccagctgtaccctccgcccccgtggtcccccagctccccgcctcactccacgggctcggtgaggccggtcagggcacagggcgagggcctcttgccctgagcaccctggatggtgactgcggataggggcagccagaccagctcccacaggagttcaactgggtctgagacttcaaggggtggtggtgggagccccccttgggagaggacccctgggaagggtgtttttcctttgagggggattctgtgccacagcagggctcagcttcctgccttccatagctgtcatggcctcacctggagcggaggggacctggggacctgaaggtggatggggacacagctcctggcttctcctggtgctgccctcactgtccccccgcctaaagggggtactgagcctcctgtggcccgcagcagtgagggcacagctgtgggttgcaggggagacagccagcacggcgtggccattctatgaccccccagcctggcagactggggagctgggggcagagggcggtgccaagtgccacatcttgccatagtggatgctcttccagtttcttttttctattaaacaccccacttcctttgccaaacaccagaatcctcataccaacaaaaaacttgtttggccgcttccggccctcgaagaaacttttctagacccattctttttgggcgcgcgggccccctttagggtaactgaaccagggcccttagccttgttttcctaaggaaattccctgggccttgcacaaaatggcttgggattt

SEQ ID NO: 355682 - DNA, 862 bp, Homo Sapiens
ctggaccggtccggattcccgggatctgtgggttgggggcagcctcagcctctccaacctggcacccactgcccgtggcccttaggcacctgcttggggtcctggagccccttaaggccaccagcaaatcctaggagaccgagtcttggcacgtgaacagagccagatttcacactgagcagctgcagtcggagaaatcagagaaagcgtcacccagccccagattccgaggggcctgccagggactctctcctcctgctccttggaaaggaagaccccgaaagacccccaagccaccggctcagacctgcttctgggctgccatgggacttgcggccaccgccccccggctgtcctccacgctgccgggcagataagggcagctgctgcccttggggcacctgctcactcccgcagcccagccactcctccagggccagcccttccctgactcagtgaccacctctgctgccccgaggccatgtaggccgtgcttaggcctctgttggacacactgctggggacggcgcctgagctctcagggggacgaggaacaccaccatgccccggggcttcacctggctgcgctatctgtgggatcttccttggcgtggccttggggaatgagcctttggacgatgtggcccttgacgcagcaatgaggagtgcactgtccacggggtttctgcggggacaagctgcaagtaacaggagccgacttcagtacatgaaacactacttccccatcaactacaagatcagtgtgccttacgagggggtgttcagaatcgccaacgtcaccaggctgagggcccaggtgagcgagcgggagctgcggtatctgtggggtcttgggtgagcc

SEQ ID NO: 355683 - DNA, 1113 bp, Homo Sapiens
  misc_feature (5)..(5): n is a, c, g, or t
  misc_feature (8)..(8): n is a, c, g, or t
  misc_feature (11)..(11): n is a, c, g, or t
  misc_feature (17)..(17): n is a, c, g, or t
  misc_feature (29)..(29): n is a, c, g, or t
  misc_feature (34)..(34): n is a, c, g, or t
  misc_feature (39)..(39): n is a, c, g, or t
  misc_feature (46)..(46): n is a, c, g, or t
  misc_feature (55)..(55): n is a, c, g, or t
  misc_feature (109)..(109): n is a, c, g, or t
ggcanttntcnagaagnaatttgggtcancaaantcagntttcagnaccccacantcaaatgggaggagatatacagcgctgctcactgcaccccgtagcaggttgttntaatgctgattgtaagttcgaatccgggcctggagctctggcaggatcagccgcagatatccgatgtaatatgaccatgccagcccatgggccacgttgaaattccctttttcacacactgcagagatctcagctggggccagcccttgaggcccaggaggatgttcagtgcctgcgagaggccccaggagggcaagcatccaagtgaagggcgggccgacgcgcatgtgggagggagtagtagaagatagatggacagcgagcagacaggggccgccaacggcggagggggcagcccaggcaggcccgcacgagtcctcaagtagctgccccggtacctgtgagtgacagccagaccccagaccccagccccgcagcccagctcagccagagaggttcaaggaggggcagggctaggcatcaagggagtgacacacgttggataccccgtccctgggtactgcagtgagtcacctggagtggatgtggcgcagctcctcagccaggctgcagaccccgtttaacagcagtcccagctgcagggaggctaggtggagcaccaggtaccggagagtgtgctctggtggctctcctagcccccaaagggtcaccaggcaggcactcagcagaaccaaggctgccttctgggccccgtgacccctgggacacgggatggatggatgcaggctggagtggggcatcttctgcctcccggacactggctgctctggatgatgacgaggagagaaggcccggcgctacgagcagccaagggcagcttctctgagtgcagccgcagtcacagctctgaacagcgggttcccctcaagccaccacgatcaaacacactgtacctaacacctgagcaggactccacacactcagccaaaggcagcacacacatcacacgatgattccccgtctcatatttttcttctggtttccaggatgcagattctttttctgaaaagtgtgacatcccgttactccgggcggtacagccc

SEQ ID NO: 355684 - DNA, 2150 bp, Homo Sapiens
taatctgagatgtgctttaaaaaaggaccgttgagaaaggggtggagtataaggaaaccgcaagtgagagggagtactctagtggggtgggggtgccgatacacagctaggcttaaggggccagggaaggaagtggtgccagaatcctagagatagtcatgattacgcaagagttgcccggcaggagagtccatagcaaccttgatgctgcagggtgggagccgggggattcaataccccaaactcagcctcctcctcctctccattcttctgctggggctccccaataatggaacatgaccaggagccagagggcgaaggagcctgttgataccattgagagagttcggcgtccccgggcaaaggaaggggagaagggtgggggagtgggtcttggaaggccccatgaaagacacctggcacaccccctaagtacactagcatccaaagtttatgaaaaacttccacacactcagtcctcacaacaaccgtgagggaggtaaggcagtgattatgatcccatttcacaggttgaagacaccgaggctcagagaggggaaatgactggcccaaggggacaagacgcatcttaagatgtcaagtcctggacccttccctgcaaggccccctgtggaaggaaatagctctgctggacattcagccactgaagagagcccccagtccagaggcttggagaccactggaggctctggcctggtgaccctgggtctcaagagaaatccgtgcggagagggaggggcttttccattccactgatgaggagctcaggctcttgggacatcgtggaggtactgggcaccgctgaggtcttcaagctgcccacagtaacctcttccttttcctcctgccgcaggtgccggagaacctcctgggacagcgagaagctgctgtcatctgcaggttcctggtaggcaatgaggcggcagttgttctgagactcaggggcatctgccaggatgtcctcaagtgtccggcagaagagtttggcctgctcaagcctatcctcccggctaaagccagcttgactgtattgtgacatggcaaacaaagtctgcaagggggtggcgtactccaggacacaggtgcccgcccgctgcccgttctccagaagctcatagatgctgttgctgtaaacccgatccttgatgccagcacggtcaccggtctgctggggcagtttatccaggaagcgaatgttggggtcagccatactcaggttatcaggcaccccacagtccaatgggaggagaatatacagccgctggctcactgcaccccgtagcaggttgttgtaatgctgattgtaagttcgaatccgggcctggagctctggcaggatcagccgcagatatccgatgtaatatgaccatgccagcccatgggccacgttgaaattccctttttcacacactgcagagatctcagctggggccaggcccttgaggcccaggaggatgttcagtgcctgcgagaggcccaggagggcaagcatccaagtgaagggcgggccgaccgcatttgggagggagtagtagaaatagatggacagcagcaacagggccccacggcggagggggcagcccaggcaggcccgcacagtcctccagtagctgccccggtacctggagtggatgtggcgcagctcctcagccaggctgcagaccccgtttaacagcagtcccagctgcagggaggctaggtggaggaccaggtaccggagagtgtgctctggtggctctcctagcccccaaagggtcaccaggcaggcactcagcagaaccaaggctgccttctgggccccgtgacccctgggacacgggatggatggatgcaggctggagtggggcatcttctgcctcccggacactggctgctctggatgatgacgaggagagaaggcccggcgctacgagcagccaagggcagcttctctgagtgcagccgcagtcacagctctgaacagcgggttcccctcaagccaccacgatcaaacacactgtacctaacacctgagcaggactccacacactcagccaaaggcagcacacacatcacacgatgattccccgtctcatatttttcttctggtttccaggatgcagattctttttctgaaaagtgtgacctag

SEQ ID NO: 355685 - DNA, 1442 bp, Homo Sapiens
  misc_feature (615)..(615): n is a, c, g, or t
  misc_feature (712)..(712): n is a, c, g, or t
  misc_feature (734)..(734): n is a, c, g, or t
  misc_feature (830)..(830): n is a, c, g, or t
  misc_feature (928)..(928): n is a, c, g, or t
ccggggctcttcaccagtccagctcgtttccagcaccatgtcggtgcggacgctaccgctgctcttcttgaacttgggcggggagatgctttacatcctcgaccaacggctgcgggcccagaacatcccgggagacaaggcccgcaaagatgaatggacagaggtggacagaaaacgagttctgaatgacatcatctccaccatgttcaatagaaagtttatggaggaattattcaagcctcaagagctctactccaagaaggccctgaggactgtctatgagcgcctggctcatgcctccattatgaaactgaaccaggccagcatggataagctctatgacctgatgaccatggctttcaaatatcaagtattgctgtgtccccgacccaaggatgtgctgctggtcactttcaatcacttggataccatcaagggattcatccgagactccccagccatcctgcagcaagtggacgagactttgcggcagctaacagaagcagatatatggtggtctctctgcaggggagttccagctgatccggaaaacactcctcatcttcttccaagacctgaacatccgagtatccatgtttctaaagaacaaagttnagaataataacggtcgctttgtgttgccggtgtccgggcctgttccttggggaactgaagttccagaactcatcagaatgttcaacaacaaaggtgnagaagtgaagaggatagaattnaagcatggtggaaactatgtccctgcacccaaagaaggttcttttgaactttatggagaccaagtcctgaaactgggaactcacatgtacagcgtnaatcagcctgtggaaactcatgtctctggatcatcaaagaacttagcctcatgacccagcaaagcatcgctccaaaccctcttgctaaagaagagctnaatttcttggccaggctgatgggagggatggagattaagaaacccagtggccctgagcccagattccggttgaatctctttaccaccgatgaagaagaggaacaagcagcgctaaccaggccagaagagttatcctatgaagttatcaacatacaagccacccaggaccagcaacggagcgaggagctggctcgaatcatgggggagtttgagatcacggagcagccaaggctgagcaccagcaaaggggaccatttgctcgccatgatggatgagttatagctgttctgaccaggcgtcctctgcccccagggagaggctgctggatggtgacccctggggaatgccccatggcccaaaatgatgctgctagttttctactgagtaaagccataacctctatatctaatttatgttgtaaggaactgtgtgagtctcccttgaggagcactcactcttgaaggcacacacatacacatattttcagtgaaatatattctgactataaaacttg

SEQ ID NO: 355686 - DNA, 1198 bp, Homo Sapiens
  misc_feature (73)..(73): n is a, c, g, or t
  misc_feature (255)..(255): n is a, c, g, or t
acaggcatccaatttctggggcccatggggggcaatccccccagggggtgcaccatcccagccagctcttttncctggggggccagagggacgcctgggtcagaaccaggctataactccatccatacatggcgagcaaatcgttccccctttgctgggtgctcagcctgggctgctccgtgatctcaaactcccccatgattcgagccagctcctcgctccgttgctgttcctgggtggcttgtatgttgatancttcatagggataactcttctggcctggttagcgctgcttgtctgggtccatgaggctaagttctttgatgatccaaacacatgagtttccacaggctgattcacgctgtacatgttagttcccagtttcaggactcggtctccataaagttcaaaagaaccttctttgggtgcagggacatagtttccaccatgcttgaattctatcctcttcacttcttcacctttgttgttgaacattctgatgagtcctggaacttcagttccccaaggaacaggcccggacaccggcaacacaaagcgaccgttattattctgaactttgtcctttagaaacatggatactcggatgtgcaggtcttggaagaagatgaggagtgtctgccggatcagctggaactcccctgcagagagaccaccatatatttctgtcagctgccgcaaagtctcgtccacttgctgcaggatggctggggagtctcggatgaatcccttgatggtatccaagtgattgaaagtgaccagcagcacatccttgggtcggggacacagcaatacttgatatttgaaagccatggtcatcaggtcatagagcttatccatgctggcctggttcagtttcataatggaggcatgagccaggcgctcatagacagtcctcagggccttcttggagtagagctcttgaggcttgaataattcctccataaactttctattgaacatggtggagatgatgtcattcagaactttgcgggccttgtctcccgggatgttctgggcccgcagccgttggtcgaggatgtaaagcatctccccgcccaagttcaagaagagcagcggtagcgtccgcaccgacatggtgctggaaacgagctggactggtgaagagccccggggttcggtagccagtggcctgaaggccaggccgcagcgtcccaat

SEQ ID NO: 355687 - DNA, 770 bp, Homo Sapiens
  misc_feature (146)..(157): n is a, c, g, or t
  misc_feature (572)..(582): n is a, c, g, or t
  misc_feature (584)..(594): n is a, c, g, or t
ggattcaagcatggtggaaactatgtccctgcacccaaagaaggttcttttgaactttatggagaccgagtcctgaaactgggaactaacatgtaagcaaattcttctctgagtgaattcaagtccaagggaggtcacttcatttnnnnnnnnnnnngagaaacagccagacttctgctatgaaaatccctgccgacaataggagtaatttccccttaggtacactgcatacagaggcctgacatttcaaagggcacccaggaacgccaaacataaggcaactcaacagaatgaaaagatacatgatgttcaatagccatgcaagagaactagccaaaatatgtgctgcagtggaaatccagaaagacttatccgttctgtaaagctgcatatattttcagtgatgcgtgttactcttcacaagaggaggcattgccacccagcctccccaggtgtttttctttaggaagaagtgaaatgtgaatggttaacacacactcagttgcattctgtacccacagcacctttctggatgctatttaatgtctcagaataaaagctacaaactatcnnnnnnnnnnnannnnnnnnnnnaaaaaaacatggtcggccgccctcggcccctcgaagaaagctttctaggaccatctcgttttgcgcgcgccgggccccagttagggtaaagggaaacatgggcccataggctgtttttccataggaaagatccctgggcccatggactaggtggctttggaattcctccaccaaat

SEQ ID NO: 355688 - DNA, 648 bp, Homo Sapiens
cttacttctgtcagctgccgcaaagtctcgtccacttgctgcaggatggttgggtagtctcggatgaatcccttgatggtatccaagtgattgaaagtgaccagcagcacatccttgggtcggggacacagcaatacttgatatttgaaagccatggtcatcaggtcatagagctgccaacccacacacaagcaaaagaaatgggaccatatcaaaatcaggtgtgagaatctccaaacagtgattcagtcaagcatttactgaaaaccaactctgggcttgccatacagctcgggggaccatatcacttatcacccaaaccaagacacttctgagagtcaaggcgggtgcttttaataattaagccaggaaaacaggagtaagccagcacattcctgggcaaaccaggatttctggtcacctgatgtgtattgttaatgggaaacgtctgaaataatattggcagcagcggagtcccaaagtgagcactggatctggagaaagaaaatgcaaatttaagtactcctttcctcctaacttattgtataaccttggccaagtttcttaacctctttgggcctgagttttctcatctgtaaaaaaatactctctaatttcccaatgttgcagaggtgctgagagcaataa

SEQ ID NO: 355689 - DNA, 1029 bp, Homo Sapiens
  misc_feature (10)..(10): n is a, c, g, or t
  misc_feature (18)..(18): n is a, c, g, or t
  misc_feature (22)..(22): n is a, c, g, or t
  misc_feature (29)..(29): n is a, c, g, or t
  misc_feature (33)..(33): n is a, c, g, or t
  misc_feature (36)..(36): n is a, c, g, or t
  misc_feature (40)..(40): n is a, c, g, or t
  misc_feature (47)..(48): n is a, c, g, or t
  misc_feature (60)..(60): n is a, c, g, or t
  misc_feature (69)..(69): n is a, c, g, or t
  misc_feature (76)..(76): n is a, c, g, or t
  misc_feature (78)..(79): n is a, c, g, or t
  misc_feature (86)..(86): n is a, c, g, or t
  misc_feature (95)..(95): n is a, c, g, or t
  misc_feature (103)..(103): n is a, c, g, or t
  misc_feature (108)..(108): n is a, c, g, or t
  misc_feature (110)..(212): n is a, c, g, or t
  misc_feature (229)..(229): n is a, c, g, or t
  misc_feature (234)..(234): n is a, c, g, or t
  misc_feature (236)..(237): n is a, c, g, or t
  misc_feature (250)..(250): n is a, c, g, or t
tgggaggccnagcggcanatcnctggtcngggnccngccnatcctgnntatcttgtgaanccccgctcnataaaancnnaaaaaantagctgggnatgatggnttgcncnnnnnnnnnnnnnnnnnnnnnnnnnnnnnnnnnnnnnnnnnnnnnnnnnnnnnnnnnnnnnnnnnnnnnnnnnnnnnnnnnnnnnnnnnnnnnnnnnnnnnnngagagagcaagactccntctanannaaaaagaaaaaanacatgatttgtaattatgtaaattactaattctacttcaaagtgccacacagccttcatgtgataaaatgaagcaattggtaagtctaagcattgagaaaaaacattatttttcccagctccattgcaacagttgggacagtgttttctctgcgcctatagaaacctcagctagtgtgccgaggagtctggtccctttggggaatgtggcagtcaggttctggcagggacctcgaagaggctggtaatgtctttcattaccaccaccacgtgacctggtcttacgacctgttagcttccttcatcaggcatgagcaccaggatggcaggggcctcatctgtcctgttcctcctgtggcctgggtcctagcaccatgtctggtacagtgtaggtgctcaagggaagtttactttatagaactgtctacctgggagatgttgctgttagtctaacctgtaccattttgtaaacctgcagccattttgcacaccctggtcagaatgaaacattccttgggaactcgggccgtgagaagcatccttcctgatcacctgactgtagaaacatccttatcgcaccctcccgggcaaaggcccaacagcctgactgcaggaacatccttgccatatcctgccgggcagcaagctctaccacccagacccctccctcccagtcccatgattaccccagcctgtgagaggcagttggtgctggcactaagctggtttcctcctccgcagggttttgctggcaataaaggtgttgctgttgaagccgtc

SEQ ID NO: 355690 - DNA, 2012 bp, Homo Sapiens
  misc_feature (1959)..(1959): n is a, c, g, or t
tggagaggggaggacctccatgactggtgtctgcagagccaggggtacaggcacccagtgcagtgacctggcaccaccggcctctcagagcgtgggtagcacactgtccttacccggaggacagcaggcctgatcaccagcttttctacctgtccctgcaagcatcacattgctagaagaaaatctcatgccagagcttgcaccatccctagctggggggttaggggttgtctcttggtgacctaaatgaaaaaataggtccagatcagagttcctgacgcagagcactcacccactcttttgaatcgtgggaggggaggcctggctttagttaaacctaacctctttgaggaaccacagagcccaagactggaagccttcagaatcttctggcccccaaccctccctggggacccctgtggcctgtctcaccagagcactcttctgtctgtagatgtctcagctgctctacaagggagtcccatttcaggtgtggggctgggcatggtcactcctgctggatgtctagaaggtggaaactaaggacctaggaaaatgccagatacagcctttccaccctcatccagagcaggacaaacaggcccggtggtgtcaggagcccaggtctccagctggagggaacgtcaaccctgcagtgggagcaggggcccatcacacatcctaggcacagatgctaatgcaggcactgcaggtaagctgggcttggtacccttccctggcttcagaaagaagccaaacaaggagcgttctgcagaatgaaacctctgttccatccagaagcactgctgactgtaaggtggttgccgttagtggcagtgagcattttgtccattctgagattagactggtttctcctcttggccttgccctgccctacagaccataaaggaaaacagcaagaagcccccagcaaacatccacagatggccctggacatcagccacattctgaggaacatgtcatgttctgggagggctaaggcatcaagtaaggcctgtggggctggaggatcccaggcaaggtggggcaatccagagccatgggggcttcccatgggaattgggaggtcccaaggcagagtcagaggttccacaggaggagtcagagagtcaccaagggctctcctggcccagggagcagtcaacaccatggactgaacacttgctgggctccaacccttgggccaggctgcccatgtggggccaggaggcagctcagagtgggaggcagagagagaagtgtgctcagagggcacctgtatctggatgtaatgtggtcctgagactctggctgggaagtgcttccagggtatcatatgtgttatgcagctacttcctctccccagccttaccctgtaggaattctagtgactatgttgccaccatcttggagctccatgccctcatagtgtaatggcaccagcagatctgcctgtgcacagacttcctgtactacctcactcctgaggggagatgcttctgcgggcctgcgacctggcgctcaactttagacaccatcatcctggagcggcactgcaccctcactagccagggtggtgacgtcctcaaggccaaggccacattccagaccttggacttcattgatgcacttgtgccgagcaaggatgctggcagcccaacccagctggtctggccctggacgtggccttccgggggccgggtaagcctccctgaacttgcgtctttggtgagtgggcaaagcaccacctggctttctaccttcacctgttggggccaaaatttcatccccccccggggggctccttccttggcggcctgctttcctgcgttcctttcaaggggaaccttggccttggcaactgccccccctgtgtttcctgttttgggggctcccacttgggcggaaggtaacccttgtaacggaacgcacacgggttaatggcgcacctctttcgtntggcccccacctcccgcggcgtgggggccttttcatcacttcgcggggcgaac

SEQ ID NO: 355691 - DNA, 638 bp, Homo Sapiens
  misc_feature (460)..(461): n is a, c, g, or t
  misc_feature (480)..(481): n is a, c, g, or t
gccagctacggcttcaagagttctgagggaccgcaatcctgaagacattgaatggctgtgttcctgctcattgctggatggcactgtcaggtgccctgtcctcaacaccgggtctgacacttgcagatcaggcaggacattctggaggaatcatgcccttgcgaaggatccctgaggagtgactgttgttagattaaaaaacagtggcaaagagcaatacagagagttcccaaaattcacacccctggtcccaggtttgaagcaagcaatctgtacctgcagtccttgtctgtaaccatggcaccctggcttctcacacatctcatcgtggagttccaccatgtgtcaggcatggcactgagcaccttcttttaagaatataatttgtaattatgtagattcttaattctacttcaaaatgccacacagccttcatgtgataaaatgaaacaattgctcnnctgatctcctgggatctcnnctaagatgttggcagcccggccagctggtctggccctggacgtgccttcagggtctggttatgcttcatgacctgcattgtggtcagtgccattttgcagactttgatcacagtgaaacgttccacgggaacttgggccatgagaaacatccttcct

SEQ ID NO: 355692 - DNA, 1143 bp, Homo Sapiens
  misc_feature (42)..(52): n is a, c, g, or t
  misc_feature (312)..(323): n is a, c, g, or t
  misc_feature (584)..(627): n is a, c, g, or t
atcatttatatatacaaccaaagggatccccccgtcggcggnnnnnnnnnnnttctgtctgccaacaatgattccactaataatccccctctggtatagagcgcacaaaaattttttctcaacaaccacgtctccacggccaatatatatcgcctcgcgtcctcagtgttgtttcaaccacgcacctgatcaaacacgtctctgaaaaacagtgtctctatcatattatcccccctcgaagagagctctctcaaaaaatcttctccgctttagaggatgaggattgtgtggccgccacaatatgtggttctnnnnnnnnnnnngcgaagattaagaggtgtctctccttccccccacagagatgtctcctccaggtcagaaccgagttgttttccccgcgtctcctccaacggtgttgtttaaaacgggcgggcccccgctgctcctctggtgtctttataaaagccggctcccctcaatagggggccccctttgtgaacaaaaaaaactgggggacgagcgtgaaaattgggcgccccccgcggggaaaaattttttggaggcgcgcgcgccgccctctctcnnnnnnnnnnnnnnnnnnnnnnnnnnnnnnnnnnnnnnnnnnnnaaacaggcaacacaggtttattactagcaaaaccctgcggagggggaaaccagcttagtgtcagtgcccactgccgctcacaggctggggtaatcatagcgctgggagggagggctctggacagtatagcttgctgctcagtagaagatgataaggatgttcctgaagtcaggctgttgggcctttgcccagcaggatgtgataaggatgtttctgcagtcaggtggttaggacatttctcacagcccgagttcccatggaatgttttactccaaccaggatcactcaccaaaacacaggtcatgaagcatacccagcccctgaaggcacgtccagggccagaccagctggctgggctgccagcatcctagtagagatcccagaagatcagataagcttgctcggcacaagtgcatcaatgaagtccaaagtcttgaatgtggccttggcctttggaggacgtcaacaccctggctagtgagggtgcagtgccgctccaggatgatggtgtctaaa

SEQ ID NO: 355693 - DNA, 1492 bp, Homo Sapiens
ggaaagcggagaggagaagggcaagaaagacccagagagaggggaggaagtaccagtcacttcttccagggggactcggtattctcatctgtgaaacggggctttgggttcaagcgctccaggaggtccgctggaactctggcaaacgcgcactctaagcagaggaagtgcagcgaagcggggacccgggaggaagagaagagtcggaggggtcagagaaaagaaaagggaaggacgcgcttggcgagatgggacactgtgccgcgggaccgcgggcgcaagtaacggtctttccttgggaagcctggcagtgtcggcgggagcggcctcggtgtctctcagccgacgcatagccggagaccctacgcgcgccccctccccgcccacgctgctcacctccggtcaccggcaaatgagcagccagcagctgcgggacgcctccgggagcgcaacgctttcgcggcgcgtccggagtcccgtgggcccagccctgagccgcgccggcgctggggtcttctctgcgtgcaggacccggccgccacggagcttcagcctgacagcccggtggcctcgcctccgctgtctcctcggaagaagcgggggaactgggaacccgccgggcgccagaggtctgcgaactggggcttggatgaagtggatctgcggagttgatagttgtatttacacgcgtccggagctgcgccccgaggtgggggcgggggctcccttcttttcccctccccttaggtcgagtttcacgcgcacgtgactcgcccgctggtcccggacactctccctctggcacagccccagcacctacatttccaccctggacccccatcttctcccccaagcccccagactaacatcaggcagcgccctctgtatccttgttcaaaacaaagtgcgattcggctgaagccgactgaccgcgattcagggccgccttgggtggggttttgaactgtgcagctggaagcagtgttttccgagaggcagagtggcacgggtttctttggagttagtcagatcgaggtctgagtcttgactttttaactgactaccctgggttacctagggcaagttacctctctgaacctcagcttcctcctctttaaattcggttaaaatggaacctacctaactgcccaaaggaatcgcgattgtgatgcaggtaaaatgctaagcatagcatttggcatagtaagcataatgttaattgttgctgctgtcattatttcagaagacctggtgatcggatgcttccagatcaacaattgattgactccaggtaaatctctcagcctccctgagcctcagtatcctcatctgtaaaatagactactatggtgtggagtaatgagaagtaatctcattacatgtgagttttattgtgtgttaagagtgctgctaatgctatgctgagcttaatacctagctgatgggttgataggtgcaataaaccaccatcgcatacacttaccacgtcaca

SEQ ID NO: 355694 - DNA, 2187 bp, Homo Sapiens
  misc_feature (143)..(143): n is a, c, g, or t
  misc_feature (190)..(190): n is a, c, g, or t
  misc_feature (197)..(197): n is a, c, g, or t
  misc_feature (220)..(220): n is a, c, g, or t
  misc_feature (356)..(356): n is a, c, g, or t
  misc_feature (371)..(371): n is a, c, g, or t
  misc_feature (416)..(471): n is a, c, g, or t
  misc_feature (474)..(474): n is a, c, g, or t
  misc_feature (491)..(491): n is a, c, g, or t
  misc_feature (494)..(494): n is a, c, g, or t
  misc_feature (500)..(500): n is a, c, g, or t
  misc_feature (503)..(503): n is a, c, g, or t
  misc_feature (507)..(507): n is a, c, g, or t
  misc_feature (518)..(518): n is a, c, g, or t
  misc_feature (521)..(521): n is a, c, g, or t
  misc_feature (526)..(527): n is a, c, g, or t
  misc_feature (540)..(541): n is a, c, g, or t
  misc_feature (578)..(578): n is a, c, g, or t
cggaagccgggcgccgcggctctgcttccctcggggatctggcgacatggccagaaaggctctcaagcttgcttcgtggaccagcatggctcttgctgcctctggcatctacttctacagtaacaagtacttggaccctaatnactttggcgctgtcagggtgggcagagcagttgctacgacggctgtnatcagtnacgactacctcacttccctgaanagtgtcccttatggctcaaaggagtacttgcagctgaaatctaaggtgcaccttcgctctgccaggcgtctctgtaagctctgctgtaccaaccggggcaccttcatcaaggtgggccaacacctgggggctctgnactacctgttgccanaggagtacaccaacacgctaaaggtactacacaaccaagctccannnnnnnnnnnnnnnnnnnnnnnnnnnnnnnnnnnnnnnnnnnnnnnnnnnnnnnntcnataatttattccaaaanttnaataanacncctntagaaacaacntcnctganncaaatccacaagnnaatactgcataataaaaaacggtagccataaaaatcnagcacccaaaggtgcgggctcagagctcgaaggacattctcctgatggaggtgctcgttctggctgtgaagcagctgttcccagagtttgagtttatgtggcttgtggatgaagccaagaagaacctgcctttggagctggatttcctcaatgaagggaggaatgctgagaaggtgtcccagatgctcaggcattttgacttcttgaaggtcccccgaatccactggggacctgtccacggagcgggtcctcctgatagagtttgtggatggcgggcaggtcaatgaaagaaactacatggagaaggaacaagatcgacgtcaatgagatctcacgccacctgggcaagatgtatagtgagatgatcttcgtcaatggcttcgtgcactgcgatccccaccccggcaatgtactggtgcggaagcaccccggcacgggaaaggcggagattgtcctgttggaccatgggctttaccagatgctcacggaagaattccgcctgaattactgccacctctggcagtctctgatctggactgacatgaagagagtgaaggagtacagccagcgactgggagccggggatctctaccccttgtttgcctgcatgctgacggcgcgatcgtgggactcggtcaacagaggcatcagccaagctcccgtcactgccactgaggacttagagattcgcaacaacgcggccaactacctcccccagatcagccatctcctcaaccacgtgccgcgccagatgctgctcatcttgaagaccaacgacctgctgcgtggcattgaggccgccctgggcacccgcgccagcgccagctcctttctcaacatgtcacgttgctgcatcagagcgctagctgagcacaagaagaagaatacctgttcattcttcagaaggacccagatctctttcagcgaggccttcaacttatggcagatcaacctccatgagctcatcctgcgtgtgaaggggttgaagctggctgaccgggtcttggccctaatatgctggctgttccctgctccactctgagtggaattgctctccctgccccattctggtgtctttccactcctcagcccctcatcttgcctccacccagctgctccatttttgccacatcgtggcccgcagccccagagtcactgtccatgtcaccatcctcctcctcctttggaatcctctccgcacactgtggcccttgtctcagggcccacaagctgaactgtggcatagctctctcttcttctccaagaagactcagcagcctacattcccattcctggtatgtgccattgggttggatgtccccactacttccgttaacccttcccattgtcaagatgtgccacgggtgccactgggggcacactgaacttgtagggagtgtgattttgttggaggtgcacatggtctctgaatttgacagagaacaccttccctttccttgccatgtcaccctccagaggaagtcacacctcagcgaggtggtttggcatctggggccaactccattacagctatgagctcactgctgtcagtgacgtttggtgttttctgtactgtgtttcaataaaaactccttcaaggttaaaaaaa

SEQ ID NO: 355695 - DNA, 810 bp, Homo Sapiens
cgcacggttcccagctaattccccgctaccgggttgcggccggaagccgggcgccgcggctctgcttccctcggggatctggcgacatggccagaaaggctctcaagcttgcttcgtggaccagcatggctcttgctgcctctggcatctacttctacagtaacaagtacttggaccctaatgactttggcgctgtcagggtgggcagagcagttgctacgacggctgtcatcagttacgactacctcacttccctgaagagtgtcccttatggctcagaggagtacttgcagctgagatctaaggtgcaccttcgctctgccaggcgtctctgtgagctctgctgtgccaaccggggcaccttcatcaaggtgggccagcacctgggggctctggactacctgttgccagaggagtacaccagcacgctgaaggtactgcacagccaggctccacagagcagcatgcaagagatccgccaggtcatccgagaagatctgggcaaggagatccatgatttgttccagagcttcgatgacacccctctggggacggcctccctggcccaggtccacaaggcagtgctgcatgatgggcggacggtggccgtgaaggtccagcacccaaaggtgcgggctcagagctcgaaggacattctcctgatggaggtgctcgttctggctgtgaagcagctgttcccagagtttgagtttatgtggcttgtggatgaagccaaagaagaacctgcctttggagctggatttcctcaatgaagggcacgaatgctgaaaaggtgtcccagatgctcag

SEQ ID NO: 355696 - DNA, 1075 bp, Homo Sapiens
  misc_feature (378)..(378): n is a, c, g, or t
  misc_feature (599)..(599): n is a, c, g, or t
ctcacaccagtgcctcaaaccagactttaacactggacgtgctcatcccaatcttgggtccctggggaatccctgggaacccccaggaggaggtttcaaaagaacccaacccaataagggtttttagtttaaacccggaaaaaagtcaggggggctagttgttccagttttgcgggccatgaaaatcgggtaggcccttaaattcttgcgtggtttctctttggggcataaatgaggaaggggctgtctcacaggccagcaagagggatgcctatcccaccagaaagttgccagtaaccagatcccaggatcacatgcctaaggtatggtgtcagggcatggcccaggaagaagggtagataagtaagctggggtgcntttcagagaaagaattaccaaaggctgcaggcgagagagttccaagaaagaagacgcaggaagccccgagaaaaattcagataaactcaacatctccagcctgggggaaacgtgagagggtggtatgaagatacacacgatgcatgttgcttagtgaaagcagccagtcggaaaaggctacgtagtgaatgaccccaactatgacattctgaaaaaggcanaactatggagacaggataaagatcagtggttgccagtgaggcaggagaatagggtctgggggcagggagcctaaggctgattcatgctgacttcatgaacgcaatcaaaagcaaaaccctaaatttccatgcccacgtaacaaaaggatcagaggctactccctttgcaactccccccaactttctgtgttgcagatgaaaaatggaaagtgcctcggattggtcccctcctgcaaccagtcagacatctgcatagagcgtaactttgtaacttcacttcagcctctgcttggtcaccttccacaaccaatcagactggtcatgggccactatttcatagggtgtaaaccaagtgaccaatgggaaacatctagagggtatttaaaccccagaaaattctgcgaccagtgcttttgagccttgcttgggcctgctcccactctgtaaggcattttgtttcaatacagctagctttt

SEQ ID NO: 355697 - DNA, 1144 bp, Homo Sapiens
cggtccggaattcccgggatgggggatgcagagcagctgaggctccgtttggaccacccctctgagggtgccctccgaggccccatcccaggggctgcggggaagccgggcctggggaccccctcccaccctgggctgagcccccaccccactgcctgtgctgcctgtccccggcttccaggtctctgctcctgcgctccaggcagcgctccacttccgcggcttcgcccttgacagcgccctgtggatcttccgattcggtaccccgaacccctgtagacgtggcctagggagccccggaccgccggcccctgcggctcccaaagccgaagaacttcttcaaggtgctacagcagaaagcaaaggggatgcagaggtgaaggtccacagccagttcctctactgattccctccaggcataaatgttcaatctaacggctttggttggcactttcacctcagcacttacctatgcctacagcaatgcgagtgggagagccaggaacccagtctccgagcgggacaccacggattgttttatgaaaatggcagctgggacgtggaggaagagccacctgccagttggactggagccacaagctgcactgtgaacctggtcacttggtaccaatgccgtcagcccgtgggtatctgaggggacctgccaattggactgccaaattccccagttggctcccagatattatagaaaattatttgtataaataatgtaaagaaaacacacctatggcaaaaacatatacatgttctttagcacagggtgaaatcataactggcgtcatctaaacatttcctcaaagatcagccaaatctaggtaaattctggtaaatatactatattcaaccttaaagcttaccaccattacatgcatggctatggtagtatggtatcaacatctaaactagtgaatctaacacaggtaagaattttaaaatgcccccagatgacttcaaggccaaatttctgctaaggtctccacaaaatggctattttcaaatatagcatattgtgactgggttttctgaggtactttcccccatactttttttgttctgggactgggggctgtggaagaaaagactgctttgcaaagctgcataataaatatggttttaaaagtgc

SEQ ID NO: 355698 - DNA, 1652 bp, Homo Sapiens
  misc_feature (1196)..(1196): n is a, c, g, or t
  misc_feature (1204)..(1204): n is a, c, g, or t
  misc_feature (1210)..(1210): n is a, c, g, or t
  misc_feature (1250)..(1250): n is a, c, g, or t
  misc_feature (1254)..(1254): n is a, c, g, or t
  misc_feature (1259)..(1259): n is a, c, g, or t
  misc_feature (1270)..(1271): n is a, c, g, or t
  misc_feature (1278)..(1278): n is a, c, g, or t
  misc_feature (1284)..(1284): n is a, c, g, or t
  misc_feature (1287)..(1288): n is a, c, g, or t
  misc_feature (1298)..(1298): n is a, c, g, or t
  misc_feature (1306)..(1306): n is a, c, g, or t
  misc_feature (1315)..(1315): n is a, c, g, or t
  misc_feature (1343)..(1343): n is a, c, g, or t
  misc_feature (1352)..(1352): n is a, c, g, or t
  misc_feature (1360)..(1360): n is a, c, g, or t
  misc_feature (1364)..(1364): n is a, c, g, or t
  misc_feature (1371)..(1371): n is a, c, g, or t
  misc_feature (1373)..(1373): n is a, c, g, or t
  misc_feature (1378)..(1378): n is a, c, g, or t
  misc_feature (1382)..(1382): n is a, c, g, or t
  misc_feature (1387)..(1387): n is a, c, g, or t
  misc_feature (1395)..(1395): n is a, c, g, or t
  misc_feature (1435)..(1435): n is a, c, g, or t
  misc_feature (1441)..(1441): n is a, c, g, or t
  misc_feature (1575)..(1575): n is a, c, g, or t
  misc_feature (1583)..(1583): n is a, c, g, or t
  misc_feature (1588)..(1588): n is a, c, g, or t
  misc_feature (1590)..(1590): n is a, c, g, or t
  misc_feature (1596)..(1596): n is a, c, g, or t
  misc_feature (1598)..(1598): n is a, c, g, or t
  misc_feature (1610)..(1610): n is a, c, g, or t
  misc_feature (1618)..(1618): n is a, c, g, or t
  misc_feature (1642)..(1642): n is a, c, g, or t
tgggaatcttgtctgaacaacaagttaactgctgttcccagttatatctggtctttcccacccccaaacatacacaaaagatttttgtcattcttggcactggacaacagaagtgataagacatgccagcagaactctaaaggcagaatgtccttccacctgttttatgctgtaagacaaacttccaagtgcgaggcagtgtggagggctgttgccttgaatggcagctgaatgcaccagcgggatccttggcagcaatgcccaggcactgaagtcgggcattcaggagagctaaatggagaaaagaaacttgagcaaactgcttcctggaacactgagaacctgaatgggaaattaagaagaaccagattctttctattcttccaccagccaagagacccattacaacttgcttatcgttgggtagaggttatatccagggaagagggaacgaggagaagtggaggaaaggaggaaggcatgagatgttggccctaacctagattgttccagagactggaagttcaagaccaaggtatagcagagctggtgtctggtgagggctctcctcgtaggtggcagacagctgccttctcactgtgtgctcacctggcctttcctctgtgttcctcagattttgaagatttgttttgaatcttgaagagagagcagcaagccttttggcctatggattccaagagtcacattccaacaggtgatatcaaaaggacaaggaagcagggaggggtgacttgcacggaaggtgcccagtgagatgtctctgccatggagattgtgctgatgccacaagcaaagcgttttgtacccctctcatccacaagagaagtccctcccgggtatttcagatgatacctgaaaggatgataaggcagggaatcagaaggctgacaccgctattggatggactgggggagtgaagaccaaaaggtcattttcaggaaaaaaataaattaggaagtacagggataagacagaagccaccaccaataactccacacctacagctccaaagcatgtgattcagaaggatccttgttgatattggccatcaccttgtgtcacaataccagtggccgcagagatttaaataaatgcatcccagatacagagttaaaagcatgccaacaatgagggctgtgtggtttggagaagagcagaagagcacactgctttcngtccggcngaggcngattagattgcctgccaccgccagtgggatggtggccccncccngtccnccacctcctcnncggcccnccgccnccnngtctataaantgcagcgnacgcccaangcctcctccaccgcattgtctgagcatnagaaagggngtgtgcanatcnccggacntntggcngaantcatnacatgccngctgttattgaaagtaattgaaatgttgtcaagctagtcngaggangatttctaactataagctatactagcgatagcactgtggatagagtgtggtgtctcctattatttaacacttccgtctacataatacatgtatgtaaatactcaatatattttatagatagttgtctaatgagntcattaanatatntncttctncnccataaagttgnagagtttntctttaattaatatatatcttatncacaataaag

SEQ ID NO: 355699 - DNA, 2040 bp, Homo Sapiens
  misc_feature (1951)..(1951): n is a, c, g, or t
agcgggcgtgccccgtgccgagtttcctgtttaagatggcgtcccccgtagcagcgcaggccgggaagcttctgcgagccctagcgctgcggccccgcttcctggcggccgggtcccaggcagttcaattaacctccagaagatggctgaacctgcaggaataccagagcaagaaactgatgtctgacaacggagtgagagttcaaagattctttgtagcagacactgcaaatgaagctctcgaggctgctaagagactaaatgcaaaagaaattgttttaaaagcccagatcttagctggaggaagaggaaaaggtgtcttcaatagtggtttgaaaggaggtgttcatttaacaaaagaccctaatgttgtgggacagctggctaaacagatgattgggtacaatctagcgacaaaacaaactccaaaagaaggtgtgaaagttaacaaggtgatggttgctgaagccttggatatttccagagaaacctacctggcaattctgatggaccggtcctgcaatggccccgtgctggtgggcagcccccaggggggcgtcgacattgaagaggtggctgcttcaaacccggagctcatttttaaggagcaaattgacatttttgaaggaataaaggacagccaagctcagcggatggccgaaaatctaggcttcgttgggcctttgaaaagccaggctgcagatcaaattacgaagctgtataatctcttcctgaaaattgatgctactcaggtggaagtgaatccctttggtgaaactccagaaggacaagttgtctgttttgatgccaagataaactttgatgacaacgcagaattccgacaaaaagacatatttgctatggacgacaaatcagagaatgagcccattgaaaatgaagctgccaaatatgatctaaaatacataggactagatgggaacattgcctgctttgtgaatggtgctgggctcgccatggctacttgtgatatcattttccttaatggtgggaagccagccaacttcttggatcttggaggtggtgtaaaggaagctcaagtatatcaagcattcaaattgctcacagctggatcctaaggttgaagccatccttgtccaatatatttggtggtatcgtcaactgtgccatcattgccaatgggatcaccaaagcctgccgggagctagaactcaaggtgcccctggtggtccggcttgaacgaaccaacgtccaagaggcccagaagatactcaacaacagcggactccccattacttcagccattgacctggaggatgcagccaagaaggctgtggccagtgtggccaagaagtgatgtctttgtcctgatccaatggagaaagaaagccatttttccataaaaagggatggctcatcattgtgaaagaaatggttatctcattggggaagaaaaggggagggggaaggcaagaatcacttgaaaaatcttaaatctgtgttttctggaataacatatcctagacagttctacatcttaattttagccttccccccaataatcatcttgtgttcctctaccttttctgtcactgtaaaacctgccccgtcacgccagcgtcttcgcaaacctttgcgcgaatgctcctccgccggcccaccccatttgttgtgtcaaagaccccaaatttgaaaatcaagtccctgctttccgttctccaagaaaacttttggccggggcccccccaattccctaccttttctggaccaccagtaaaaaccacgaccctttcttccccataaccccccaaccatcccctccttatttttcccgatacccccgcctacctatccccacggccacataccatctccccccctgtaccaatccgttcaatcctcccccaacaaaagggccccttggccttcaagacccattttccatggcaacactaagtcctattccgaaaanaccctcacccggcgccgaaactctcctaacacgctttcccccccaccgtccccccaccactcattgcctccttgcacgcccaatcctcc

SEQ ID NO: 355700 - DNA, 1875 bp, Homo Sapiens
  misc_feature (6)..(6): n is a, c, g, or t
  misc_feature (29)..(29): n is a, c, g, or t
  misc_feature (78)..(78): n is a, c, g, or t
  misc_feature (97)..(154): n is a, c, g, or t
  misc_feature (1194)..(1194): n is a, c, g, or t
  misc_feature (1470)..(1486): n is a, c, g, or t
  misc_feature (1779)..(1792): n is a, c, g, or t
  misc_feature (1835)..(1835): n is a, c, g, or t
ccccangtaggcctcccaccacggcaganccaatggaggggctagagctctagggtcctgtcaggtgaggctgggaantgagctgccatcggttctnnnnnnnnnnnnnnnnnnnnnnnnnnnnnnnnnnnnnnnnnnnnnnnnnnnnnnnnnntcactcgctagcatgtctgtaacgcgtgtgggcaccgttgctgctgttgtgtgccgtctgtgcaggaggctgcctttgtgttgagggtgtgcacggcctcacacctgccctgcatgtgctgctgctccatacgggtacgagccctgcctagtgtctgtctcctgtgtcacggacctgttcaacctcgtgctgctgccagcctttatcgcgactcagctgtccctggaacctgcccaggatcccctgggtcttctcatgagagcagagctgtgtggggggtgggcggtgaagggtactgcccaagtctcagcgtcccgggtatctgtggatcccgccatgcccagagccggtgtcggaggctggcaggagggagaagcccgccctttgccatgagaggctgtcttttctttggttgggctgcacttggagcctggatggagtggagggggccaccagtcattcctcatattccagccagtcgctggctctggtcccaggggccaaagaaaagggccagggtaaccgtaggatcccaccctttatttcttcctctggccgggctactcccgccagccgcagccccagcccgtttcctcctggaccctgcccgctcccctccgcccgtccccccttggctgtgcgcccctcacctggcgctgacccctctccctacgcaggctcttcagcagcctcggtgagctgagctccatttcagcgcagcgcagccccgggggcccgggcggcggggcctcgtactcggtgaggcccagtggccgctaccccgtggcgagacgcgccccgagcccggtgaagcccgcgtcgctggagcgggtggaggggctgggggcgggcgcggggggcacgaggcggcccttcggcctcacgccccccaccatcctcaagtcgtccagcctctccatcccgcacgagcccaaggaggtgcgcttcgtggtgcgcagcgtgagcgcgcgcagtcgctaccccctcgcagtcgcagctgccctcgcacgcgtccggccccggccccggcgcccccggcnccacgccgacccttccagcagaagccgctgcagctctggagcaagttcgacgtgggcgactggctggagagcatccacctaggcgagcaccgcgaccgcttcgaggaccatgagatagaaggcgcgcacctacccgcgcttaccaaggacgacttcgtggagctgggcgtcacgcgcgtgggccaccgcatgaacatcgagcgcgcgctcaggcagctggacggcagctgacgccccacccccactcccgccccggccgtgccctgccggcagggnnnnnnnnnnnnnnnnngggccgcgggctcggcctgccccttacgacggcgcccgggccaggaatgttgcatgaatcgtcctgtttgctgttgctcggagactcgccctgtacattgcttagtgccctcaccggccgcccagcccacccagcgcacagtcaggaagggcgtggaccagggaggctggggcgggaggtgccgggggtggggtgccctagcgtgaccacctccttcgcagctcctggtggccattctcccagagggggaacctagtccagcatgcgaggtcaggacccgccttggtgactcnnnnnnnnnnnnnnagacattgggattctcgatgggggccaaggagcccccctgttntgcatattttaatccactctatatttggaacgagaatagg

SEQ ID NO: 355701 - DNA, 926 bp, Homo Sapiens
  misc_feature (305)..(478): n is a, c, g, or t
  misc_feature (484)..(501): n is a, c, g, or t
  misc_feature (615)..(631): n is a, c, g, or t
aatttaacccttttagaaaaagcggcttagcgttgaagagaggtaagtataaaaaataccccccaaattatgtttgttgattttgccaaatccaccacttaaggtagtgaaaagcagacgctatttgagaattaagtggtataaggacccaccgaatgatttaggaaaattgaagaaacatatatttaaaataaaagtttgggggtgggcacaatggctcccacgtgtaatgccatcaatggggaaactgaggtgggcaaataaattgaggtcaggagttatagaccagactggtcaaaaaggcnnnnnnnnnnnnnnnnnnnnnnnnnnnnnnnnnnnnnnnnnnnnnnnnnnnnnnnnnnnnnnnnnnnnnnnnnnnnnnnnnnnnnnnnnnnnnnnnnnnnnnnnnnnnnnnnnnnnnnnnnnnnnnnnnnnnnnnnnnnnnnnnnnnnnnnnnnnnnnnnnnnnnnnnnnnnnntctccnnnnnnnnnnnnnnnnnntgttagtgaaggttccctgggacttttgatattttaaaaattgttcttatgactagtagataaattcattgccataatgaggctagctcccagataaacagtgtattttcttcnnnnnnnnnnnnnnnnnggtgagtggtccagagctttaagctacttttccagtagtttgccactttctccgaggtagtttggctgctctttcagtaatgctaattgtgtgtcaaattttgtctacaacagtaggcaacagatgaagataagttggttgaatgtctccagcactatgcatccctattttctatttattgtgtacactcactttcagtaatgtgtttcaaactggtattttttaaaaaacaaatcaatgtaaggactgaagttgaagtagcaatgtaataaaagttagatttgttatctttaga

SEQ ID NO: 355702 - DNA, 1392 bp, Homo Sapiens
  misc_feature (956)..(966): n is a, c, g, or t
  misc_feature (968)..(968): n is a, c, g, or t
  misc_feature (972)..(972): n is a, c, g, or t
  misc_feature (1001)..(1001): n is a, c, g, or t
  misc_feature (1025)..(1025): n is a, c, g, or t
  misc_feature (1027)..(1027): n is a, c, g, or t
  misc_feature (1031)..(1031): n is a, c, g, or t
  misc_feature (1036)..(1036): n is a, c, g, or t
  misc_feature (1064)..(1064): n is a, c, g, or t
  misc_feature (1067)..(1067): n is a, c, g, or t
  misc_feature (1069)..(1069): n is a, c, g, or t
  misc_feature (1072)..(1072): n is a, c, g, or t
  misc_feature (1075)..(1075): n is a, c, g, or t
  misc_feature (1078)..(1078): n is a, c, g, or t
  misc_feature (1103)..(1103): n is a, c, g, or t
  misc_feature (1111)..(1111): n is a, c, g, or t
  misc_feature (1117)..(1117): n is a, c, g, or t
  misc_feature (1122)..(1122): n is a, c, g, or t
  misc_feature (1131)..(1131): n is a, c, g, or t
  misc_feature (1135)..(1135): n is a, c, g, or t
  misc_feature (1163)..(1163): n is a, c, g, or t
  misc_feature (1174)..(1174): n is a, c, g, or t
  misc_feature (1181)..(1181): n is a, c, g, or t
  misc_feature (1195)..(1195): n is a, c, g, or t
  misc_feature (1200)..(1200): n is a, c, g, or t
  misc_feature (1203)..(1204): n is a, c, g, or t
  misc_feature (1206)..(1206): n is a, c, g, or t
  misc_feature (1209)..(1210): n is a, c, g, or t
  misc_feature (1212)..(1212): n is a, c, g, or t
  misc_feature (1215)..(1215): n is a, c, g, or t
  misc_feature (1221)..(1221): n is a, c, g, or t
  misc_feature (1228)..(1228): n is a, c, g, or t
  misc_feature (1244)..(1244): n is a, c, g, or t
  misc_feature (1249)..(1249): n is a, c, g, or t
  misc_feature (1252)..(1252): n is a, c, g, or t
  misc_feature (1257)..(1257): n is a, c, g, or t
  misc_feature (1259)..(1259): n is a, c, g, or t
  misc_feature (1263)..(1263): n is a, c, g, or t
  misc_feature (1289)..(1289): n is a, c, g, or t
  misc_feature (1300)..(1300): n is a, c, g, or t
  misc_feature (1304)..(1304): n is a, c, g, or t
  misc_feature (1306)..(1306): n is a, c, g, or t
  misc_feature (1311)..(1311): n is a, c, g, or t
  misc_feature (1332)..(1332): n is a, c, g, or t
  misc_feature (1343)..(1343): n is a, c, g, or t
  misc_feature (1367)..(1367): n is a, c, g, or t
taagatttcctgagaaatgtcagagccatgggactgagaaacatctcttgagattctggtgagctccctagcatctcgtcctcactcatttcgtcccctagcagtggcaaggtagactttctaggcctggagggcatgtgcttagtgacgggtgacaatggttgatgacagttgtgccgccccgtgcctggttcactgctccacatccttctacttaatccatctgagatagaaataacacttctcaaactctcaaaccactcccatccagtcggaggactttcaggaacacttgggtgggtccagcatctgagcccgggtgggccatcagcccaggctgccagagatgccagtgggctaaagtggggcagggcagacactggccagctgtccacccaacccatttccagttcatcctgagcacacggctagactgcattcttgcagctgagtgtggccaagcaacctaattctgatcaatgaaaagtgatagacgtgtgctcttctcaggcctgatggataaaacccttccacactccttctccttctggttaactccttctggttaacggtgctctccagcatgactttggaggcccaatttaaaagttggcatgcctgccatcagccaaaatctctgaaccactgcatggagaaggatgccctcacgctcaccatgtctgaccccaaactagaacagccctgcagtgttaaatgaggcatgacataaacttgcattatgtttgggtctgtttgttacaacagcaatactcactaatatagaagagcagggatcccctgcctgaggaggaccaatgcaggaaaggccaaagagcagttagaaatcagcatcccgagagaatgcaagatgttgtgaccaaggtgtctaaatatcaaacgcaaggcaggcggtaaggacgtcgcggagggggctggcgtcggcgcaggccatgccnnnnnnnnnnngngganacggaagacaaaacggggcggcgcggaangggcgaaggcgaaaaagaaagacngngggngccgngggaggggcggcagggaggcggggcggnggngnganggnacngagccaggccgaggggcgggagggnggcaaccngacgangaaangcgggcaanggangccgtcgccggacacgagccgcatcccnacaagagcagngcggtcngcggcggagaaagnggggnggnngnggnngnggnggaganacggaangcggggcgcaaatcgnggaanacnagaangngganggaggggggcggggagcgggaaatgncagaaaggggngcgncnggcanggggggagccagggaggcaangaggtcaccanggatccgtggctggagggccggcngtcggcgggccagggaagcacgggg

SEQ ID NO: 355703 - DNA, 1740 bp, Homo Sapiens
  misc_feature (5)..(5): n is a, c, g, or t
  misc_feature (60)..(60): n is a, c, g, or t
  misc_feature (104)..(104): n is a, c, g, or t
  misc_feature (787)..(787): n is a, c, g, or t
  misc_feature (1663)..(1700): n is a, c, g, or t
caatntaggaacacattcccccattaacaccaacgacaaagctcttttaaagcatgtgcntgttgaatgggacggggatttcataaaattcactaaaaaaaatnatgcagtgagtttcatcacagctaatatccttatacaatctagttgtgaaatgaatgtttataatgcttcaaacagtttcaacctgaagtttgataccacaccttcatgtttgtacagttctcagtaagattatctacagtttttgcaaccattcaaagaacaaaccattgaataaaaccacattgattaaggctcaagcaagttatatagagccccaaactaaatggttaaatatatgcgctacttgtacggacatctattatttgattctcttatgactattgaaagttggttctcagcaaataaaccctttaaaggcaaaaagttcaacaacaatcatgaagtccacagttttattggcaaaactgatacacagtgtctctaagtgactatgctcaaggttaagagcgatgcatattccgtttttacattttactggaattttacatgttcaattcatgatttaaaatctctaggttttcattccttcaaactgtctgaagacacagtgtgccagagacttaagagttctgtttctccctctattttcttcaaacagaaacatttctcaagtgtctacatgttctagaaggggaatttttcggaggtggccacttcttcggaatagtccgacgccatcaggcctctgaagccaggggaaggggaaaagaaaaaagctganacacaaggttcatctggtaagttttacattaaccattacaagctggacagtgtaagaatgtggcttttttttggctcaaaaagtctgagtcttggtgtggaaacgagtacttggctgtcccaccacagctttctcgtagtgggactgtcagggaagtcttgactggggagtatgatttgtttacctatcaggcgtaaacttccaggcactcagttcattttgggcttgttccagtttgtctttagtctgttccagttcacctttcatttttaggaaaaacaagttgatcgctgggtctaccattgttgatctcagttgggcaacgctcggctgctggacttgcttgaggtactggatttgagtagtacactcttgcatctcttgttccttggttgctagtcgcattacaaggatgttttccctgcgtgcagactcctgctgttgttgctttagtttttcttcagactctcttaggccagttacatcattagagttaagatctgtgtacttgccctccaaagcttgtacatatgcttcatattgtttccatcttagaattaactcatctcttgccataactttgaagtctgtttcactcaatcgaaccttcttgggaagaggttcttcgttggtcatcttgaatcctctccaggcagaagccgcgccggcgccaccggtcgcataggccgaggccgcgctgcttgccctgccgcccgggccccccgggccaccgcgcagccggacagctctgccgccggccccgccgcgctcctagtcccgccgcaacccctgcgctcccctttatttgtgggtctcgctgccacaaaatggcactccgctctcgacgaattcgagctcggccgatttggcctgatnnnnnnnnnnnnnnnnnnnnnnnnnnnnnnnnnnnnnncgccgccccgcgtgaactccaggccccatatatcatctcg

SEQ ID NO: 355704 - DNA, 1469 bp, Homo Sapiens
  misc_feature (1042)..(1082): n is a, c, g, or t
ccccgctccgccatgttcgccttctggcccactcacaggagagtcgcctttcaggcgtggccgcagtcactcgcccgccgccgaaccccgccaggagaggaaaggtgaagggagggaggccgtcggcctagcccgatcggggcctcgaggcacaatggagcagctgctccccggtaacactccccgtcctttcccaggagcctggcgcgagctccgcgggccccggagctcagcaagctcagtaagggaagcggccgaggggaggggcgggccagcgaggtcggaggtcagccccagggcatcacgggaagggacaggtggaagtactcgccggggccacctgcggctgcggggctgcctcgtgcggagggatctgggcgaaggcggcgcgtgattggccgctctgtgttcgtgacgctcatccgtgatgcttccgcgtgtcggaggaccaggtgccacctcaagagagaggccgtgggcggcgagccgcgggcgtttactcttagcagaagctcacctgtaagttttgagaacttagaaaccgatgccttccctctcatcagtcgtgaggcgcagtctcctggccgctgggttcgttcctccttgacatctctggagacgcatcgaggagctattgttctctggcgtcggaggttgcgctgtgtccgcggcgttgagggccccttgctaactggaacacgggggaaggcggccctgtgaggtttagtgaactcaatcaaagaggtcctgcaagtggagtagactccctgaagcaagactgccatctggaccgccgagtaatggcggtgttacctggagaacgtgaaacagtctctaaacacttactagaagagcacgtaattcttttgattggtctgtccttagccggctttatcaaacctgttcatccccaaaggagtgtcttgtagtaaggtgatttattaggataagattaaagtacattccagatggtcgtagtatatttccagtgaatcagatcggtctggagaaaatctttgcaactcgtatcacaagagctctnnnnnnnnnnnnnnnnnnnnnnnnnnnnnnnnnnnnnnnnntggggaaggacatgaacagatgattctcagaaaaaataccgtaatggtctttaaacatagaaagtcgctccacctcacttacaatggaaatacacgttgaaattacctttcctggtgggagtggaaaaatggttcaagttccacggagtacaaaattacttgtgtttattcttataccttgcagttatacttctaaccctaaccttattctgaaggtgcagctccacacatggaaacaataggtatacaaggttattgcagtgctatttgtcatagcaaaagttagggataacccaaatatccgttaatagggaactgattgggaatggtgcatccatacagtagaacacaatgcaaccattaaaaagattcaggaaataaaaaaaa

SEQ ID NO: 355705 - DNA, 1848 bp, Homo Sapiens
ggggcacgaggcagccccgcagccgcaggtggccccggcgagtacttccaccttcccttcccgtgatgccctggggctgacctccgacctcgctggcccgcccctcccctcggccgcttcccttactgagcttgctgagctccggggcccgcggagctcgcgccaggctcctgggaaaggacggggagtgttaccggggagcagctgctccattgtgcctcgaggccccgatcgggctaggccgacggcctccctcccttcacctttcctctcctggcggggttcggcggcgggcgagtgactgcggccacgcctgaaaggcgactctcctgattcaagatgaccaacgaagaacctcttcccaagaaggttcgattgagtgaaacagacttcaaagttatggcaagagatgagttaattctaagatggaaacaatatgaagcatatgtacaagctttggagggcaagtacacagatcttaactctaatgatgtaactggcctaagagagtctgaagaaaaactaaagcaacaacagcaggagtctgcacgcagggaaaacatccttgtaatgcgactagcaaccaaggaacaagagatgcaagagtgtactactcaaatccagtacctcaagcaagtccagcagccgagcgttgcccaactgagatcaacaatggtagacccagcgatcaacttgtttttcctaaaaatgaaaggtgaactggaacagactaaagacaaactggaacaagcccaaaatgaactgagtgcctggaagtttacgcctgataggtaaacaaatcatactccccagtcaagacttccctgacagtcccactacgagaaagctgtggtgggacagccaagtactcgtttccacaccaagactcagactttttgagccaaaaaaaagccacattcttacactgtccagcttgtaatggttaatgtaaaacttaccagatgaaccttgtgtttcagcttttttcttttccccttccccttgcttcagaggcctgatggcgtcggactattccgaagaagtggccacctccgaaaaattccccttctagaacatgtagacacttgagaaatgtttctgtttgaagaaaatagagggagaaacagaagtcttaagtctgtggcacactgtgtcttcagacagtttgaaggaatgaaaacctagagattttaaatcatgaattgaacatgtaaaattccagtaaaatgtaaaaacggaatatgcatcgctcttaaccttgagcatagtgacttagagacactgtgtatcagttttgccaataagactgtggacttcatgattgttgttgaacttctgggtcaaaactcaaatgaggtgaattttgcctttaaagggtttatttgctgagaaccaactttcaatagtcatgagagaatcaaataatagatgtccgtacaagtagcgcatatatttaaccatttagtttggggctctatattacttgcttgagccttaatcaatgtggttttattcaatggtttgttctttgaatggttgcaaaaactgtagataatcttactgaggactgtacaaacatgaaggtgtggtatcaaacttcaggttgaaactgtttgaagcattataaacattcatttcacaactagattgtataaggatattagctgtgatgagactcactgcattattttttttagtgaattttatgaaatccccgttccattcaacaggcacatgtttaaaagagctttgtcgttggtgttaatgggggaatgtgttccttcattgtatttgggccttttgtattgcactcttgatattaaattaaatgtgccttgaaataaaaaa

SEQ ID NO: 355706 - DNA, 519 bp, Homo Sapiens
  misc_feature (495)..(495): n is a, c, g, or t
agttcgacggagactctctaagcagtacacagatcttaactctaatgatgtaactggcctaagagagtctgaagaaaaactaaagcaacaacagcaggagtctgcacgcagggaaaacatccttgtaatgcgactagcaaccaaggaacaagagatgcaagagtgtactactcaaatccagtacctcaagcaagtccagcagcctagcgttgcccaactgagatcaagatgttagcctttatctgttccatatctagcttacttggttgtttttgggggatcacatgtctgtcctccaaactggaaacgtctaactctccaggagatgcagtagcattatttgttggacagtggcacctactggtagtttgtaatgtttatagcctagtgtgaaaggcattgtaaatgtatacctagcaaaaaggggagtagagcaaaatttccagagttttacaaatgaaatgaaggatgatatgggggagagtcctttggggncaaggagagtctccgtcgaactgg

SEQ ID NO: 355707 - DNA, 586 bp, Homo Sapiens
agttcgacggagactctcttaggcagtacacagatcttaactctaatgatgtaactggcctaagagagtctgaagaaaaactaaagcaacaacagcaggagtctgcacgcagggaaaacatccttgtaatgcgactagcaaccaaggaacaagagatgcaagagtgtactactcaaatccagtacctcaagcaagtccagcagcctagcgtggcccaactgagatcaacaatggtagacccagcgatcaacttgtttttcctaaaaatgaaaggtgaactggaacagactaaagacaaactggaacaagcccaaaatgaactgagtgcctggaagtttacgcctgatagccaaacagggaaaaagttaatggcgaagtgtcgaatgcttatccaggagaatcaagagcttggaaggcagctgtcccagggacgtatggcacaacttgaagcagagttggctttacagaagaaatacagtgaggagcttaaaagcagtcaggatgaactgaatgacttcatcatccagcttgatgaagaagtagagggtatgcagagtaccattctagttctgcagcagcagctgaa

SEQ ID NO: 355708 - DNA, 536 bp, Homo Sapiens
  misc_feature (502)..(502): n is a, c, g, or t
  misc_feature (509)..(509): n is a, c, g, or t
ctcgcagacttgtaatggttaatgtaaaacttaccagatgaaccttgtgtttcagcttttttcttttccccttccccttgcttcagaggcctgatggcgtcggactattccgaagaagtggccacctccgaaaaattccccttctagaacatgtagacacttgagaaatgtttctgtttgaagaaaatagagggagaaacagaagtcttaagtctgtggcacactgtgtcttcagacagtttgaaggaatgaaaacctagagattttaaatcatgaattgaacatgtaaaattccagtaaaatgtaaaaacggaatatgcatcgctcttaaccttgaggcatagtgacttaggagacactgtgtatccagttttgccaataaggactgtgggactttcatggattgttgttggaacttctggggtccaaaactcaaatgagggtgaatttttgccctttaaggggttttttttggtcgggggacccacctttcattgttccnggggggntccatattggtgtccctacagtggcgc

SEQ ID NO: 355709 - DNA, 1580 bp, Homo Sapiens
  misc_feature (1052)..(1052): n is a, c, g, or t
agcggagggccgcagttctcccgtgagagggccttcgcggtggaacaaacactcgcttagcagcggaagactccgagttctcggtactcttcagggatgagtcatgtggcagtggaaaatgcgctcgggctggaccagcagtttgctggcctagacctgaactcttcagataatcagagtggaggaagtacagccagcaaagggcgctatattcctcctcatttaaggaaccgagaagctactaaaggtttctacgataaagacagttcagggtggagttctagcaaagataaggatgcgtatagcagttttggatctcgtagtgattcaagagggaagtctagcttcttcagtgatcgtggaagtggatcaaggggaaggtttgatgatcgtggacggagtgattacgatggcattggcagccgtggtgacagaagtggctttggcaaatttgaacgtggtggaaacagtcgctggtgtgacaaatcagatgaagatgattggtcaaaaccactcccaccaagtgaacgcttggaacaggaactcttttctggaggcaacactgggattaattttgagaaatacgatgacattccagttgaggcaacaggcaacaactgtcctccacatattgaaagtttcagtgatgttgagatgggagaaattatcatgggaaacattgagcttactcgttatactcgcccaactccagtgcaaaagcatgctattcctattatcaaagagaaaagagacttgatggcttgtgcccaaacagggtctggaaaaactgcagcatttctgttgcccatcttgagtcagatttattcagatggtccaggcgaggctttgagggccatgaaggaaaatggaaggtatgggcgccgcaaacaatacccaatctccttggtattagcaccaacgagagagttggcagtacagatctacgaggaagccagaaaattttcataccgatctagagttcgtccttgcgtggtttatggtggtgccgatattggtcagcagattcgagacttggaacgtggatgccattntgttagtagccactccaggacgtctagtggatatgatggaaagaagaaagattggattagacttttgcaaatacttggtggtagaatgaagctgatccgatggtggatatggggtttgaggcttagaattgtagaataggcgaccagatcctatgccttcaaggtggtccgcacacttgaggttagagctccttttcttaagaaaacacatgctggttgcgaattttaaaaggaaattttttttggtgtttgaaaagtggcctacccttgaaacatccacccaaggtttttgggggaaatctacaaccggcattttgttacccttaaaggcagggagggttctgcccttagtttggggaccaaaggggtccattttggggagttttcccgaggggcctggtgcccatttgggaacattttaagggtaaaaaagcctcactttcttgagaaaccctttttgggcccggtttcggtgtgtttaagggagttatattcttcccgggtttgttcctcttgtgcccggggcgg

SEQ ID NO: 355710 - DNA, 2840 bp, Homo Sapiens
  misc_feature (403)..(434): n is a, c, g, or t
  misc_feature (2425)..(2425): n is a, c, g, or t
  misc_feature (2440)..(2440): n is a, c, g, or t
gcgtccggaattcccgggatcaaatgggggtggggacgtgcaagtttcagactccgactaactacgcggggactccgaggcgctcagaaaaatgaagccgacccggccctgccccgagggacgctccaagagggcggaggtgcagggagggccccgccacaattcgcggtaacgcaagccaggctcgggcggaagggcggccggagccgatcaaaggctggctccgggcaggggcagcgagggagcgagggggagctctccgcaggccggtgtcccggaggaggcataattggagcagggcttccaaggtcacggagagacgccgggcaagacctcttaaggatcctcttccgggcttgaaaggcaggcgtcctcccgaaccgcgcgacccagccaagaagannnnnnnnnnnnnnnnnnnnnnnnnnnnnnnncgactcgggaatcttcggccgaggctcggcaatccccccatcctccgtccggggcctccagcccggggccgatccggaaacagccgagcggatccggaaacagccgagaggacccggaaccggtgcgctccgtcaccagggagtgcgggaatccgccgtttgcgctgaggcaatggcggcagctgcgccggtggccgcggacgacgatgagcggcggcggcggccgggggctgcactggaggactcccggtcccaggaaggggcaaatggtgaggccgagtcaggtgagctcagccggcttcgggctgagctggcaggcgccctggcagaaatggaaaccatgaaggctgtggcagaggtgagcgagagcacgaaggccgaggctgtggctgcggtgcagcggcagtgccaagaggaggtggcctcgctgcaggccatcctgaaagactccatcagcagctatgaagcccagatcaccgccctgaagcaggagcgacagcagcagcagcaggactgtgaggagaaggagcgggagctgggccgcctgaagcagctgctgtcccgggcctaccccctggactccctggagaagcagatggaaaaggcccacgaggactcggagaagctgcgggagatcgtactgcccatggaaaaggagatcgaggagctgaaggcgaagctgctgagggccgaggagctgattcaggagatccagagacgtccccggcatgccccttccctgcacggctccacggagttgctgcccctgtcccgggatccatcgcccccgctggagcctctggaggagctgagcggagatgggggtccagccgctgaggccttcgctcacaactgcgatgacagcgcctccatctcctccttctcccttggcggtggggtcggcagcagctcctccctgccccaaagccgccagggcctgagccctgaacaggaagagacggcctcgctggtgtctacgggcaccctggttcccgagggcatctacctgccccctcctggctaccagctcgtcccagacactcagtgggagcagctgcagacagagggccgacagctgcagaaggacctggagagcgtcagtcgcgagcgggacgagctccaagagggcctgagacggagcaatgaggactgtgccaagcagatgcaggtgctcctggcccaggtccagaactcagagcagctgctgcggaccctgcaagggaccgtgagccaggcccaggagcgggtgcagctgcagatggcggagctggtcaccacccacaagtgcctgcaccatgaggtaaagcggttgaatgaggaaaaccaagggctccgggccgagcagctgccatcctcagccccccagggctcgcagcaggagcagggcgaggaggaatcactgcccagctctgtgccagagctgcagcagctgctgtgctgcacgcggcaagaggcgagggcccggctgcaggcccaggagcacggggccgagcgcctgcggatcgagatcgtgacgctgcgggaaggctctggaggaggagacagtggccagggccagcctggaggggcagctgagggtgcagcgggaggagacagaggtgctggaggcctccctgtgcagcctgaggacagagatggagcgggtgcagcaggaacagagcaaggcccagctcccagacctcctctcagaacagagggccaaggtgctgcggctgcaggcagagctggagacccagtgagcaggtgcagagggatttcgtgcgacttgtcccaggccctgcaggtgcgcctagagcgaatccgccaggctgagaccctggagcaagtgcgcagcatcatggatgaggcgccactcacggacgtcagggacatcaaggacacctgaggggtcaggatatccccacccccaccctgggaaagacccctttccccactcctgaaccatgaggcctcgctctggggtcttggatggcttttccaccgtccctganactggggttgagggnactgacgggggccaccaccgccccgccctccagcgcctcctcccagggtggctgggcctcctgttctcagggatcacacctgggtgaggggcccaagcccctcccggaaccaaaggtgcaggctcaggcctgcggctttctggctgctgtgctgcctcctgggctccagccctcccctgcccccagcccgtcccctgcccagggcacagcggagccatgggggctgggagtccccatcagaggcagtgaggtgggccccggccctgggacaggcagctgccttctggtctgcatgacactaagacgcttgtccacagcggcgacccaggcctccaagcttgcacagaggcaaggccagacttttccgtcgtttattttcaataaataagcagctcagcgc

SEQ ID NO: 355711 - DNA, 1834 bp, Homo Sapiens
  misc_feature (27)..(27): n is a, c, g, or t
  misc_feature (36)..(36): n is a, c, g, or t
  misc_feature (166)..(166): n is a, c, g, or t
  misc_feature (191)..(191): n is a, c, g, or t
tgtacaaaaaagcaggctggtacggtnccgaaattncccgggatcaagatcctaggaatatgagcaatagataggagagcaagcctcaccaatgggtcccttcatctatctgcaagcccacttttacactctgtctgggtggtccagcacataccgggaccctcgngaagggtgtgtatgtgccctacacncagggcaagtggaaggggagctgggcaccgacctggtaagcatcccccatggccccaacgtcactgtgcgtgccaacattgctgccatcactgaatcagacaagttcttcatcaacggctccaactgggaaggcatcctggggctggcctatgctgagattgccaggcctgacgactccctggagcctttctttgactctctggtaaagcagacccacgttcccaacctcttctccctgcagctttgtggtgctggcttccccctcaaccagtctgaagtgctggcctctgtcggagggagcatgatcattggaggtatcgaccactcgctgtacacaggcagtctctggtatacacccatccggcgggagtggtattatgaggtgatcattgtgcgggtggagatcaatggacaggatctgaaaatggactgcaaggagtacaactatgacaagagcattgtggacagtggcaccaccaaccttcgtttgcccaagaaagtgtttgaagctgcagtcaaatccatcaaggcagcctcctccacggagaagttccctgatggtttctggctaggagagcagctggtgtgctggcaagcaggcaccaccccttggaacattttcccagtcatctcactctacctaatgggtgaggttaccaaccagtccttccgcatcaccatccttccgcagcaatacctgcggccagtggaagatgtggccacgtcccaagacgactgttacaagtttgccatctcacagtcatccacgggcactgttatgggagctgttatcatggagggcttctacgttgtctttgatcgggcccgaaaacgaattggctttgctgtcagcgcttgccatgtgcacgatgagttcaggacggcagcggtggaaggcccttttgtcaccttggacatggaagactgtggctacaacattccacagacagatgagtcaaccctcatgaccatagcctatgtcatggctgccatctgcgccctcttcatgctgccactctgcctcatggtgtgtcagtggcgctgcctccgctgcctgcgccagcagcatgatgactttgctgatgacatctccctgctgaagtgaggaggcccatgggcagaagatagagattcccctggaccacacctccgtggttcactttggtcacaagtaggagacacagatggcacctgtggccagagcacctcaggaccctccccacccaccaaatgcctctgccttgatggagaaggaaaaggctggcaaggtgggttccagggactgtacctgtaggaaacagaaaagagaagaaagaagcactctgctggcgggaatactcttggtcacctcaaatttaagtcgggaaattctgctgcttgaaacttcagccctgaacctttgtccaccattcctttaaattctccaacccaaagtattcttcttttcttagtttcagaagtactggcatcacacgcaggttaccttggcgtgtgtccctgtggtaccctggcagagaagagaccaagcttgtttccctgctggccaaagtcagtaggagaggatgcacagtttgctatttgctttagagacagggactgtataaacaagcctaacattggtgcaaagattgcctcttgaatt

SEQ ID NO: 355712 - DNA, 1661 bp, Homo Sapiens
  misc_feature (31)..(31): n is a, c, g, or t
  misc_feature (85)..(85): n is a, c, g, or t
  misc_feature (407)..(408): n is a, c, g, or t
gcactctctcagaccgctgcgggccgccagngccgggaatgtcccctgaatgcgcgcgggcagcgggcgacgcgcccttgcgcanctggagcaagccaaccgcacccgctttcccttcttctccgacgtcaagggcgaccaccggctggtgctggccgcggtggagacaaccgtgctggtgctcatctttgcagtgtcgctgctgggcaacgtgtgcgccctggtgctggtggcgtgccgacgacgccgcggcgcgactgcctgcctggtactcaacctcttctgcgcggacctgctcttcatcagcgctatccctctggtgctggccgtgcgctggactgaggcctggctgctgggccccgttgcctgccacctgctcttctacgtgatgaccctgagcggcagcnncaccatcctcacgctggccgcggtcagcctggagcgcatggtgtgcatcgtgcacctgcagcgcggcgtgcggggtcctgggcggcgggcgcgggcagtgctgctggcgctcatctggggctattcggcggtcgccgctctgcctctctgcgtcttcttccgagtcgtcccgcaacggctccccggcgccgaacaggaaatttcgatttgcacactgatttggcccaccattcctggagagatctcgtgggatgtctcttttgttactttgaacttcttggtgccaggactggtcattgtgatcagttactccaaaattttacagggtccccactggtgactgactttatgtgaatgagagatgagcttccactggaagaagctactgagatttgagaggtaacctgtaacagaagttgctgttaccttaaccttcacagcatcaaacacatcactaactcctaaaaaagactgaaaagggttttaccataactcacagaactaatgcaagacatttgtgtccttaccctcatgaaaattaagcactagcaaccagctccattttatacaaagtaacatttatacccacatctggaccgaggccaagaaaaatgaaaaacaaggaagtggagcagcatttatcttctgactgcatttaaaagatgtcaaaataattggttgaaaaatggaaaggttagtcagtccatgttttcaggtacaaagagataaattaattttttcaatacggtgttctcagtggttgcagtcatcagaccatcacatcaatttggataaaaataatatggttttcaccaaccaaattgtctctgagatacctggttatacccccaattaagtgcaggcacagggctttcatgagagcaaatgtgcagatggaagggtcctgtgcagttggctgccagatgtgcctgaaattcctacctacagggggtcctttccatgatgggtaattataggaacagataatctggctaaggtggaactgaagagtgggttcagtataataatgtgaaatacacttaattagcccaggatattgttgatttctgtgttggtgcttctacctcgtaggcatatgttttggctattgtataagcataacttcctgtagaagtcattaactgcagcaaaaaatttaacaatgatggaattagaaattacgcgtgctcatttatgtagagtactactgaaaacttgtttaagcagaaagtttaaggaagttaaatcattct

SEQ ID NO: 355713 - DNA, 1692 bp, Homo Sapiens
  misc_feature (240)..(240): n is a, c, g, or t
  misc_feature (254)..(254): n is a, c, g, or t
  misc_feature (1597)..(1597): n is a, c, g, or t
  misc_feature (1634)..(1634): n is a, c, g, or t
ggatcgagagcgccccggggagctcggagcgcgtgcacgcgtggcagacggagaaggccagtgcccaggttagtgagcagtgcccggcgcccgcttccctcacctccttttccagcctttgcacagcttgaaggttctgtcaccttttgcagtggtccaaatgagaaaaaagtggaaaatgggaggcatgaaatacatcttttcgttgttgttctttcttttgctagaaggaggcaaaanagagcaagtaaaanattcagagacatattgcatgtttcaagacaagaagtacagagtgggtgagagatggcatccttacctggaaccttatgggttggtttactgcgtgaactgcatctgctcagagaatgggaatgtgctttgcagccgagtcagatgtccaaatgttcattgcctttctcctgtgcatattcctcatctgtgctgccctcgctgcccagaagactccttacccccagtgaacaataaggtgaccagcaagtcttgcgagtacaatgggacaacttaccaacatggagagctgttcgtagctgaagggctctttcagaatcggcaacccaatcaatgcacccagtgcagctgttcggagggaaacgtgtattgtggtctcaagacttgccccaaattaacctgtgccttcccagtctctgttccagattcctgctgccgggtatgcagaggagatggagaactgtcatgggaacattctgatggtgatatcttccggcaacctgccaacagagaagcaagacattcttaccaccgctctcactatgatcctccaccaagccgacaggcgggaggtctgtcccgctttcctggggccagaagtcaccggggagctcttatggattcccagcaagcatcaggaaccattgtgcaaattgtcatcaataacaaacacaagcatggacaagtgtgtgtttccaatggaaagacctattctcatggcgagtcctggcacccaaacctccgggcatttggcattgtggagtgtgtgctatgtacttgtaatgtcaccaagcaagagtgtaagaaaatccactgccccaatcgatacccctgcaagtatcctcaaaaaatagacggaaaatgctgcaaggtgtgtccaggtaaaaaagcaaaagaagaacttccaggccaaagctttgacaataaaggctacttctgcggggaagaaacgatgcctgtgtatgagtctgtattcatggaggatggggagacaaccagaaaaatagcactggagactgagagaccacctcaggtagaggtccacgtttggactattcgaaagggcattctccagcacttccatattgagaagatctccaagaggatgtttgaggagcttcctcacttcaagctggtgaccagaacaaccctgagccagtggaagatcttcaccgaaggagaagctcagatcagccagatgtgttcaagtcgtgtatgcagaacagagcttgaagatttagtcaaggttttgtacctggagagatctgaaaagggccactgttaggcaagacagacagtattggatagggtaaagcaagaaaactcaagctgcagctggactgcnagcttattttgcttaagtcaacagtgcccttaaactncaaaactcaatgcagtcaattatttacgccatgcacagcataatttgcttctttgtgt

SEQ ID NO: 355714 - DNA, 701 bp, Homo Sapiens
  misc_feature (11)..(11): n is a, c, g, or t
  misc_feature (16)..(16): n is a, c, g, or t
  misc_feature (44)..(45): n is a, c, g, or t
  misc_feature (50)..(51): n is a, c, g, or t
  misc_feature (122)..(122): n is a, c, g, or t
  misc_feature (133)..(133): n is a, c, g, or t
  misc_feature (145)..(146): n is a, c, g, or t
  misc_feature (158)..(158): n is a, c, g, or t
  misc_feature (163)..(163): n is a, c, g, or t
cgactggagcngggcnggagccggagccggagccggggccgggnncgggnncaggaccgcgaccgcgaccggagccgcgaccggagccgcgaccggagccggagccggggccggggctgganccaggaccggnactgggggcggnntggacgccgggnccggnaccgggacactaggcagctgctccggcgcctcctcgaggccgtcgagggactcagcggccggctcgaggggcgggctgacagccaccgcgaccgcgacgggccgcggcgccagcagcaggcggcagcgccccacctgcaccgtctcgcggtagaacgcgggcaccgagtcgctgtccacttcggtccactgcaggcgtccagggccccgcagcggcatgtcctgctggaagtcgtaatcccagcggttctggtcctcggcgttcagctcggccaggcgggcctgcagctcgcggctcagctcctcgtggtccaccggcccgaagaggctgcggcaggcgctggtgcgcactagtactgggaaggtcccacgggcgacaagacgctccatcgtggatgtgctggctgtccggtggtggactcttctgcgtcgggttcgcctgtctcgtccggacggcagccgcgccccctcgatgcctgctggctagctcgctcgctcaggcaatggccggcacccctcgagcacatccggagaattcc

SEQ ID NO: 355715 - DNA, 1292 bp, Homo Sapiens
  misc_feature (64)..(64): n is a, c, g, or t
  misc_feature (565)..(565): n is a, c, g, or t
  misc_feature (585)..(585): n is a, c, g, or t
  misc_feature (623)..(624): n is a, c, g, or t
  misc_feature (675)..(712): n is a, c, g, or t
ccggtccggaattcccgggatcgcgatggagctgggggagccgggcgctcggtagcgcggcggngcaaggcaggcgccatgaccctgattgaaggggtgggtgatgaggtgaccgtccttttctcggtgcttgcctgccttctggtgctggcccttgcctgggtctcaacgcacaccgctgagggcggggacccactgccccagccgtcaggaccccaacgccatcccagcccagcgcaccatggcagctaccgacagcatgagagggaaggccccaggggcagagacccccagcctgagacacagaggtcaagctgcacagccagagcccagcaccgggttcacagcaacaccgccagccccggactcccccgcaggagcccctcgtgctacggctgaaattcctcaatgattcagagcaggtggccagggcctggccccacgacaccattggctccttgaaaaggacccagtttcccggccgggaacagcaggtgcgactcatctaccaagggcagctgctaggcgacgacacccagaccctgggcagccttcacctccctcnccaactgcgttctccactgnccacgtgtcccacgagagtcggtcccccaaatcccccnnctgcccgccggggtgccgagcccggcccctccgggctggaaatcggcagcnnnnnnnnnnnnnnnnnnnnnnnnnnnnnnnnnnnnnnctggtactgccagatccagtaccggcccttctttcccctgaccgccactctgggcctggccggcttcaccctgctcctcagtctcctggcctttgccatgtaccgcccgtagtgcctccgcgggcgcttggcagcgtcgccggcccctccggaccttgctccccgcgccgcggcgggagctgctgcctgcccaggcccgcctctccggcctgcctcttcccgctgccctggagcccagccctgcgccgcagaggactcccgggactggcggaggccccgccctgcgaccgccggggctcggggccacctcccggggctgctgaccctcagcccgcactgggagtgggctcctcggggtcgggcatctgctgtcgctgcctcggccccgggcagagccgggccgccccgggggcccgtcttagtgttctgccggaggacccagccgcctccaatccctgacagctccttgggctgagttggggacgccaggtcggtgggaggctggtgaaggggagcggggaggggcagaggagttccccggaacccgtgcagattaaagtaactgtgaagttttaaaaaa

SEQ ID NO: 355716 - DNA, 811 bp, Homo Sapiens
  misc_feature (529)..(529): n is a, c, g, or t
  misc_feature (569)..(569): n is a, c, g, or t
  misc_feature (574)..(574): n is a, c, g, or t
  misc_feature (775)..(775): n is a, c, g, or t
caggctgtactggcccggaatttttgggatatcagtcgacccacgcgtctgcagagaagccggtaccctggggtgggtgaggggacggaggctgaggacggtgggagcgtcgcggtgtgggtgagggcaggaccctgtggaggttccagggctcctggccagggggcccgggcctcacgggctctttgtgcctctccagctcggtagcgcggcgggcaaggcaggcgccatgaccctgattgaaggggtgggtgatgaggtgaccgtccttttctcggtgcttgcctgccttctggtgctggcccttgcctgggtctcaacgcacaccgctgagggcggggacccactgccccagccgtcagggaccccaacgccatcccagcccagcgcagcatggcagctaccgacagcatgagaggggaggccccaggggaagagacccccagcctgagacacagaggttaagctgcacagccagagcccagcacgggggttcacagcaacaccgccagccccggactccccgcangagcccctcgtgctacggctgaaattcctcaatgattcanagcangtggccaggggcctggccccacgacaccattggctccttgaaaaggacccagtttcccggccgggaacagcaggtgcgactcatctaccaagggcagctgctaggcgacgacacccagaccctgggcagccttcacctccctccaactgcgttctcactgccacgtgtcacgaagatcggtccccaaaatccctggccccnccgggtccgaacccggccctccgggctggaaatcgg

SEQ ID NO: 355717 - DNA, 1105 bp, Homo Sapiens
  misc_feature (725)..(765): n is a, c, g, or t
  misc_feature (868)..(868): n is a, c, g, or t
  misc_feature (1052)..(1061): n is a, c, g, or t
cggtccggaattcccgggatggggtgcttcaggtgcctgcgacctccgcgcctcccgcccggaagtgcccgaggggccgcgatggagctgggggagccgggcgctcggtagcgcggcgggcaaggcaggcgccatgaccctgattgaaggggtgggtgatgaggtgaccgtccttttctcggtgcttgcctgccttctggtgctggcccttgcctgggtctcaacgcacaccgctgagggcggggacccactgccccagccgtcagggaccccaacgccatcccagcccagcgcagccatggcagctaccgacagcatgagaggggaggccccaggggcagagacccccagcctgagacacagaggtcaagctgcacagccagagcccagcacggggttcacagcaacaccgccagccccggactccccgcaggagcccctcgtgctacggctgaaattcctcaatgattcagagcaggtggccagggcctggccccacgacaccattggctccttgaaaaggacccagtttcccggccgggaacagcaggtgcgactcatctaccaagggcagctgctaggcgacgacacccagaccctgggcagccttcacctccctcccaactgcgttctccactgccacgtgtccacgagagtcggtcccccaaatcccccctgcccgccggggtccgagcccggcccctccgggctggaaatcggcagcnnnnnnnnnnnnnnnnnnnnnnnnnnnnnnnnnnnnnnnnngtactgccagatccagtaccggcccttctttcccctgaccgccactctgggcctggccggcttcaccctgctcctcagtctcctggcctttgccatgtaccgnccgtagtgcctccgcgggcgcttgggaagcgttccccggcccctcccggaccttggctccccgcgccgcggccgggaagctgctgcctggcccaggcccgcctttccgggcctggctctttccggttggcctggagcccagccccttgggccgaaaaggcatcctcgcggaactggcggaagannnnnnnnnngttcaacgtacccggtctccggcggccccctccccaggccaggc

SEQ ID NO: 355718 - DNA, 956 bp, Homo Sapiens
  misc_feature (866)..(866): n is a, c, g, or t
  misc_feature (879)..(879): n is a, c, g, or t
  misc_feature (929)..(929): n is a, c, g, or t
  misc_feature (953)..(953): n is a, c, g, or t
tccagattcagaaaagaacttgggatcattcagcagaatgtcacagcatccacattctttccgctggagcttctgctgatgcaaatcctgtgacctctgagttgagctgagtggtggaagtgagcttttataagggactggatctgagactcgtgcctgatgtttgtggctgtttctctttgcttgccttctgttttcagtggaacactcgcttgatgtattttgagaaacaaactctgggatcagtcctgttgagctagtggctggctccatagtttggggcctgaagaggttcccgcaccctcagggcttgtggcggtcatcaggcctctctcctgggtgtaagatcttcagtgtctattggatttttccaagagaaagtttgtaaaattccttacactgtagatgtggatcagatacgatgattcagtagaagagcacatgtcaggggcagtggaggctggctgctgaaggatgaacggagaggaagaattctttgatgccgtcacaggctttgattctgataactcttctggggaattttcagaggcaaatcagaaagtcacgggaatgattgacttagacaccagcaaaaataataggattgggaaaactggggagaggccctctcaagagaacggaattcagaaacacaggacatcgctgccggctcccatgttcagcagaagcgacttcagcgtgtggaccatcctgaagaagtgtgttggcctggagctgtccaagatcacgatgccaatcgccttcaacgagcctctgagcttcttgcagcggatcacggagtacatggagcacgtgtacctcatccacagggctcctgccagccccagccctggagaggatgcatntgtggctgctttnctgtttcggctgtggcttccagtgggagaggacggcaaccatttaatcantcttgggagaaagtatgaattatnagg

SEQ ID NO: 355719 - DNA, 807 bp, Homo Sapiens
cgggcctacggggcgggggcggggcggcagtgagctcggccggcaaccgagggacccgcgtccagatcttcagtgtctattggatttttccaagagaaagtttgtaaaattccttacactgtagatgtggatcagatacgatgattcagtagaagagcacatgtcaggggcagtggaggctggctgctgaaggatgaacggagaggaagaattctttgatgccgtcacaggctttgattctgataactcttctggggaattttcagaggcaaatcagaaagtcacgggaatgattgacttagacaccagcaaaaataataggattgggaaaactggggagaggccctctcaagagaacggaattcagaaacacaggacatcgctgccggctcccatgttcagcagaagcgacttcagcgtgtggaccatcctgaagaagtgtgttggcctggagctgtccaagatcacgatgccaatcgccttcaacgagcctctgagcttcttgcagcggatcacggagtacatggagcacgtgtacctcatccacagggcctcctgccagccccagcccctggagaggatgcagtctgtggctgcttttgctgtttcggctgtggcttcccagtgggagaggaccgggaaaccatttaatccactcttgggagaaacgtatgaattaatcagggaagatttaggattcagatctatatcggaacaggtcagtcaacaaccccccaatcagtgcgttccaattcgggaaggcttcaaccatggacttccctgtttccatggcctccattctacccc

SEQ ID NO: 355720 - DNA, 1044 bp, Homo Sapiens
  misc_feature (267)..(267): n is a, c, g, or t
  misc_feature (515)..(515): n is a, c, g, or t
  misc_feature (784)..(784): n is a, c, g, or t
  misc_feature (951)..(952): n is a, c, g, or t
  misc_feature (966)..(966): n is a, c, g, or t
  misc_feature (969)..(969): n is a, c, g, or t
  misc_feature (976)..(976): n is a, c, g, or t
  misc_feature (989)..(989): n is a, c, g, or t
  misc_feature (997)..(998): n is a, c, g, or t
  misc_feature (1006)..(1006): n is a, c, g, or t
  misc_feature (1012)..(1013): n is a, c, g, or t
  misc_feature (1017)..(1017): n is a, c, g, or t
  misc_feature (1019)..(1020): n is a, c, g, or t
  misc_feature (1022)..(1022): n is a, c, g, or t
  misc_feature (1028)..(1028): n is a, c, g, or t
  misc_feature (1032)..(1032): n is a, c, g, or t
  misc_feature (1034)..(1035): n is a, c, g, or t
  misc_feature (1039)..(1039): n is a, c, g, or t
tcccgggatcgcgatgaggagcgtatcgcgtgacggacctgcggcttcaagtgcgccggaatactaccgtccgcgtatccccaagccgcggctcctgactggcctggtctctctcccggcttgggctgggcgctggtcttcgcaggcctcccacgtgcttgggcgggagcgacaagctggcactgtcctgcccccctccacccgaggacgccctggccctgacaccgggtccagggcagggaacacttccccgaaagagtctaaaanggggaggcacccggaaaccccggggcccctctgacccgcctttttcggactcccggcgccgcggcagatgaggaggtgtggctgctgcgccgacgacaccaccactgaggccttagtaatactacaaactaattttttacgagcgttccttccatgccggtaaatatgacagatccgtcccccggattggaaagagaaatcggagcggtgcatgagaagacaagaagggaatgtgtggctttggaagngctacctcccagggttatatcggtttgtcgggaagaggcctccacttttaaagccactggcacacgcgagcgctctgaatgcagctgacccacactccgtgctgtattttttattagtgaactgtttactgtgctggcaaacgagtagggccctagagtcgtcaatgaatataaggactcttagaggaatgttaaatctgattttcaaatacaagctcttacagtatgaaaatgtggctgacgatacaaggcatgctgtaagcgccaanatactttgctgtatgagttctggaaagggagacagaaacttgcctgaaacgaagagggaaggaactttcccaccatacaccctatatttttaaagcacaagtacaaaacttttagcttgctctgccctgccaaaaaaaccggactcaccttttctgccccgatccanntcctaggaaaaganaanatttatngattatttcttangtgcatgnngtgttganaatcanngttnannangttgtnttgngnnaaangaatg

SEQ ID NO: 355721 - DNA, 1776 bp, Homo Sapiens
  misc_feature (347)..(347): n is a, c, g, or t
  misc_feature (364)..(364): n is a, c, g, or t
  misc_feature (1035)..(1045): n is a, c, g, or t
  misc_feature (1230)..(1230): n is a, c, g, or t
  misc_feature (1630)..(1630): n is a, c, g, or t
  misc_feature (1686)..(1686): n is a, c, g, or t
tacattccacagtgtgggagcggcccgaacataggggctcaaaggccccgttacagaatttttggaagtttaaatatcccctagatgattccattgtttacttcacttaccctctacgtaaatgcagaggatgaagtaaagttacaaagtcacttacagcatacgccctatggagtggatatttcctgttacagccgaagtgtgaattggccttatgttccctgcctcctgaccctattttcctgcctcaggctcactgctcaatgtacacggaagcaataccatggtactgcctttgagaaaagaaagactttattgcaagaccagccagcaaggagacaggaggnaggttcaaatcttcctncctgatttggggtctgggccaagtttctaaggaagcagagggcaaaggaaaggacctaaaaatgttggctgggcaggatctggttgaaggccttcaaatttggccatttatggtacggtatgttgaggtggatttaagcccctatcttctgggccaagagacccttcccttctgagagttcgaatgtccgggttccagtcatgtcccagtcttcttcgttccaaggagacgaatagttggttctggatgtttgttagagatcaaatctttttctatggtgcatgcctgggctttgtgacttaagagtttttggctctgttatacctgcaaggtaactcaacattgttacaaacagagtaagccccgtttgggctggtactgtggttacaacggcacttattcccaccacctagagtcaagagctgctggcacactggctgtttacttccagttcccacggcccctattcccctatacaaaattacacaggaaacatatgcgttcatttaattagcaagtgtatataaaaacatcatagacaaagcaaaagtctctcttgacactctccatcttgacctgttcaccgccccagaccaggtgaggaaatttgaagctatgctatctgcaagtcactggcgcagtcggaataaaagttggtcgtggtggggccnnnnnnnnnnntggtcatctgggtcgggactgagtcgaggcaggtgggactgagtggtagggacctggggggacatctgggtcgggtctgagtccagacaggccacctgccttgggcctctaacatttccgcgcagcgctgggctttgaggctttccagagcgctgccggggcgggggcggggtgaggtgaggagntcaccctggctctcccacccctgctacgggctgtgaggtcactcgattcatttctggaactaacttgtaattctcaaacaagtgctattaattctcttccaactaggaacggcctcagtaacgcgccgctgagtcagttttcagggcgggcggtttccccaagtccactcctgaggcccctcaagagcacccaccgcgtccagcttcccagggcgctccttcccaggagaccttcttttcgccactgttttctcccctcttcccacttctccgagggctgccccgcggtctgtccggccgtgtcccaggccttggcgcggctgaggcatgaccggaatgcgcgggaggacgcggggcacggaggggacctgaggcacggagggaacccggggcgggccgnactggcctgggccctcgtcggggcggtgctcgacccggcccgcgccccccgccccnacactcgcagccccgcctccggaccccgggtagttgccatccctcgcgggccgggtggggcgcgcagctcctagccctgggaggtcccga

SEQ ID NO: 355722 - DNA, 1257 bp, Homo Sapiens
ggaattcccgggatctccccggcccagcccggccgctcgccctgtccggtctctccccggccccttgattctccgcgtcttcctcgcaggccagcctaagctcagcctgcattgcgccctcccggcctagggtgtcgctgtaccggcctccgagctccacatagacaagtccggacctcgggcgggggcaggagacggagctgagcggcggggggcagtgtcgcctcggtctagggacggcggcggagtcggtggtccctgcgcgatggccacctcggtgttgtgctgcctgcggtgctgcagagacggggggactggccacatccctctgaaggagatgccggccgtgcagctggacacgcagcacatgggaacagatgttgttattgtaaagaatggaagaagaatatgtggaacaggaggttgtttagccagcgcacctttacatcaaaacaaaagctattttgaattcaaaatccagtccacaggaatctggggtattggtgttgcaactcagaaggttaacttgaatcagattcctcttggccgagatatgcacagtctggtgatgagaaatgatggagccctttaccacaacaatgaagagaaaaataggctgccagcaaacagtcttccgcaggaaggagatgtggtgggtattacttatgaccatgtcgaattaaatgtatacttgaatggaaaaaacatgcattgtccagcatcaggtatacgagggacagtgtatccagttgtttatgttgatgacagtgcaattttggattgccagttcagtgagttttatcatacgcctccacctggttttgaaaaaatattatttgaacagcaaatcttctgaatgtatttgtttttaaaacttgtatttctgcactgttaaaaaatgttcatcatttaataaaactttacctggcctatagatgaaaatatattcttaaaaatatgcttgttgatgctgtctaaggaaccaatgtattcagtataccaccctgaagttgtgatttaaaatactttatgttttgtgaaatgaaaataagcatttgggcagtttatttaattcttatttaaataaatagaattatgggtttaattaacagtataacatgactaaaaaaacatatatatttaaagggaattctttcttacataatatatttgttttgatagagatgtagagttgggtgggtgtttttgtcactctgaagtttagacctcattaaatatttgacatctacagttggg

SEQ ID NO: 355723 - DNA, 1064 bp, Homo Sapiens
  misc_feature (8)..(8): n is a, c, g, or t
  misc_feature (17)..(17): n is a, c, g, or t
  misc_feature (21)..(21): n is a, c, g, or t
  misc_feature (26)..(26): n is a, c, g, or t
  misc_feature (28)..(29): n is a, c, g, or t
  misc_feature (33)..(33): n is a, c, g, or t
  misc_feature (47)..(47): n is a, c, g, or t
  misc_feature (56)..(56): n is a, c, g, or t
  misc_feature (66)..(66): n is a, c, g, or t
  misc_feature (101)..(101): n is a, c, g, or t
  misc_feature (111)..(111): n is a, c, g, or t
  misc_feature (118)..(118): n is a, c, g, or t
  misc_feature (124)..(124): n is a, c, g, or t
  misc_feature (136)..(136): n is a, c, g, or t
  misc_feature (146)..(146): n is a, c, g, or t
  misc_feature (158)..(158): n is a, c, g, or t
  misc_feature (170)..(170): n is a, c, g, or t
  misc_feature (172)..(172): n is a, c, g, or t
  misc_feature (176)..(176): n is a, c, g, or t
  misc_feature (183)..(183): n is a, c, g, or t
  misc_feature (204)..(204): n is a, c, g, or t
  misc_feature (209)..(209): n is a, c, g, or t
  misc_feature (211)..(211): n is a, c, g, or t
  misc_feature (233)..(233): n is a, c, g, or t
aaactgancccctccanaacncatcngnnaaantaactggcatcacnagaaccacnccctgggaanagagtaaggaatcaaatggcagccgccgatgagangcgcaggccnaaggatngttgangcacccccaaanacagaacagnacgtggagcccnacaaaggcgagntntttntttcatnttcattggacggctatgatgntcacnancaggagaaagctttgatgcatntccacatatcattgactgtatcctgtaatatgcaacggcacagataattttcccgatttggataaaagttgatctgtataggcaaccatcttgaactatatataaaatgaatttaaatatcttttaaagaaaaaaacacctaaaaataaatcttaacagaaaattctgttctgattatatcaaggcaaatttttcctctcttgcaaaatgctttgtgtgttcaatgctaggtctgatagcgatagcttttagtagacagcggtaggtgcctgcagaacttgtgtttttctcatctttaaaatacaactacttatgctcttaaatcaaggctgtctgcttatttatactagcgtaggcaacacttggatttcccttcttagtatgcttcataactgctttacagagagcttttgcttgttctttctcatgtatctcgtgtttatgtgcacagtgccaaaagaagactgactgggtggaggctctgccttgcctcaagaaccatcccctgcagagcatccagggaggtttctcgccccaaaatcctcacggcacagtactcttgggcagtaactggacaccttttatttgaagaaacaaactgaagaaaaaatgcttccttaagtgctgacagcctttttaaccaatacatttaaaattgtacagaacaaaaaaataaaatcaaagactgatcttgtacagatattagtgttaccagcattcatgtggaaatcaagagcaaagacaaaataatgttaaacaattctgtaccataacattttctgtaatgatactgaaacttaatgaataaaaaaattccttgatcattattta

SEQ ID NO: 355724 - DNA, 853 bp, Homo Sapiens
  misc_feature (97)..(148): n is a, c, g, or t
  misc_feature (530)..(530): n is a, c, g, or t
  misc_feature (553)..(553): n is a, c, g, or t
  misc_feature (555)..(555): n is a, c, g, or t
  misc_feature (674)..(674): n is a, c, g, or t
  misc_feature (685)..(685): n is a, c, g, or t
  misc_feature (691)..(691): n is a, c, g, or t
  misc_feature (704)..(705): n is a, c, g, or t
  misc_feature (714)..(715): n is a, c, g, or t
  misc_feature (717)..(717): n is a, c, g, or t
  misc_feature (721)..(721): n is a, c, g, or t
  misc_feature (724)..(727): n is a, c, g, or t
  misc_feature (776)..(776): n is a, c, g, or t
  misc_feature (785)..(785): n is a, c, g, or t
  misc_feature (790)..(790): n is a, c, g, or t
  misc_feature (793)..(793): n is a, c, g, or t
  misc_feature (795)..(795): n is a, c, g, or t
  misc_feature (798)..(798): n is a, c, g, or t
  misc_feature (800)..(801): n is a, c, g, or t
  misc_feature (804)..(804): n is a, c, g, or t
  misc_feature (816)..(816): n is a, c, g, or t
ttttaatgaagcaggacagacaaaaatgttgttaactattgaaactaggcaatgggtacgtaggagttcattctctacctccatgttagaactttcnnnnnnnnnnnnnnnnnnnnnnnnnnnnnnnnnnnnnnnnnnnnnnnnnnnnttcaccttcactattactttgaaagttaagtaagactcttacctttccttctgttgctttctttgttgatgaaatttctttcataagcttgggaatttccctgtcaaattgtgagagaattctttaaatttctaagatgtaaatctttacagaactattttaaggttacaaaatgtactatcacatagtgtcttaaaaattatggaacaaaaattaaaatgagttcacatactctaacacaaccgcaatatgtcgatgtcgaattctaacccagaggtcatcttcttcttcaaggatgggcctccttttcttttccagcgtgtgttatatctacaagtagacagaagcactagaaactttttgattttttttccctccaaantcaaaagaaacagttttacaaancnataatttcaagacacaactcaagaaactgaaaagtaaaatccactattttagggggggtaatgaatccctactcaaaactaaggcacgctgctatccttacattaaaaataagtcctangcctaccaagncatttncaaatattcagtnnaggtgccannantagngtnnnnggtcagcaaaattgtactttataaaataaattcaacgtcctagccgttnactttaagnacaanacncnatntnntgncgctttgtgttntaattccctacaacattgtactgtgggttattagcac

SEQ ID NO: 355725 - DNA, 2595 bp, Homo Sapiens
  misc_feature (52)..(88): n is a, c, g, or t
  misc_feature (2128)..(2128): n is a, c, g, or t
  misc_feature (2140)..(2140): n is a, c, g, or t
  misc_feature (2578)..(2578): n is a, c, g, or t
gactgatacatcactatagggcgaattggagcttctaccgcggtggcggcgnnnnnnnnnnnnnnnnnnnnnnnnnnnnnnnnnnnnnatcaggccaaatcggccgagctcgaattcgtcgagagcggaggttgggagtggaaggtggtggctgctgctccgcagtgtcgggaagatggcgccgccggtggcagagagggggctaaagagcgtcgtgtggcagaagataaaagcaacagtgtttgatgactgcaagaaagaaggcgaatggaagataatgcttttagatgaatttaccactaagcttttggcatcgtgttgcaaaatgacagatcttctagaagaaggtattactgttgtagagaatatttataagaaccgtgaacctgtcagacaaatgaaagctctttatttcatcactccgacatcaaagtctgtagattgtttcttacatgattttgcaagtaaatcggagaacaagtataaagcagcatatatttacttcactgacttttgccctgataatctctttaacaaaattaaggcttcttgctccaagtcaataagaagatgtaaagaaataaatatttccttcattccacatgaatctcaggtgtatactcttgatgtaccagatgcattctattactgttatagtccagaccctggtaatgcaaagggaaaagatgccattatggaaacaatggctgaccagatagttacagtgtgtgccaccttggatgaaaatcccggagtaagatataaaagtaaacctctagataatgccagtaagcttgcacagcttgttgaaaaaaagcttgaagactactacaagattgatgaaaagagcctaataaagggtaaaactcattcacagctcttaataattgatcgtggctttgatcctgtgtccactgtcctgcatgaactgacctttcaggcaatggcatatgatctactaccaattgagaatgatacatacaaatataaaacagatggaaaagaaaaggaggccatccttgaagaagaagatgacctctgggttagaattcgacatcgacatattgcggttgtgttagaggaaattcccaagcttatgaaagaaatttcatcaacaaagaaagcaacagaaggaaagacatcacttagtgctcttacccagctgatgaaaaagatgccccatttccgaaaacagattactaagcaagttgtccatcttaacttagcagaagattgcatgaataagttcaagcttaatatagaaaagctctgcaaaactgaacaggacctcgcacttggaactgatgcagaaggacagaaggtgaaagattccatgcgagtactccttccagttctactcaacaaaaatcatgataattgtgataaaataagagcaattctactttatatcttcagtattaatggaactacggaagaaaatttggacaggttgatccagaatgtaaagatagaaaatgagagtgacatgattcgtaactggagttaccttggtgttcccattgttccccaatctcaacaaggcaaaccgttaagaaaggatcggtctgcagaagaaacttttcagctctctcggtggacaccttttatcaaagatattatggaggatgctattgataatagattagattcaaaagaatggccatattgttcccagtgtccagcagtatggaatggttcaggagctgtaagtgctcgccagaaacccagagctaattatttagaagaccgaaaaaatgggtcaaagctgattgtttttgtaattggagggatcacatactctgaagtgcgttgtgcttatgaagtttctcaggcacataaatcctgtgaagttattattggttctacacatgttttaacacccaaaaagctgttggatgatataaagatgctgaataaacccaaggataaagtctccttaattaaagatgaatagcatctctttttggagggtttagagactctaactaatatgttgaactaaaatagaaagaaaatgtcgctgtcatgtaatttaaacaatgtaaatattttatggaataatggcttctcaaatacatctcttaaggaactgtttatgattatcactggatttgccacccccgataanttaaatatcgcngctgctttgtagatgatgagaagaaatgttaaagtgctctctaaaaggaaattctttcacctttggaggagaatatataagagttgtgggaaaatcaacacagccaccaatgaacatacaaattacccattggaaacttatatctaaaagtctcatgctgaagtatagtttttgggaaagaatgattttaaataaagagattgtaaaagtaaaaaactggtaaatgtatatgtatgatagaattgtttcctctaagtgtagtttttctttcaactaaaattcagtttatgtgtaaaataattcagtcattaatagaaatggagtgatttcacagtgtgtactgttttgccacatacttctaaagaacacaattttatataattttgaaatcatgtatgtttaaattagaaaaccaaaaatcatgaacattctaagagnaaataaatatagaattt

SEQ ID NO: 355726 - DNA, 909 bp, Homo Sapiens
  misc_feature (262)..(305): n is a, c, g, or t
  misc_feature (564)..(564): n is a, c, g, or t
attatgaaacaagatacagataaatcttataagcagagttctgattacttaacacagtgaaattgcaattccaagttacagagacattcacataaagatattcttgcagctactaaataatggctaaatactgatgacaataagaattaatactttccacttatgacatttgtcaataacaactctgattaggtaaaaaataattaacatgatggtcatattataattctaaataaatacattattatgtttgccacaggannnnnnnnnnnnnnnnnnnnnnnnnnnnnnnnnnnnnnnnnnnntcagatggtactgaactcaagttggcttttaaaaaggaagagatcaggcatattactgtgcacttatgttatcagagtgatttatgtaatgctatgatgtcaaataaaacctagagtctagtcaattagagtaagcagagtacttgaatctgttgagtctgtttggtcatggaaaatgagttacctctaacaaaactggcttggttcccttcttccaatacgtaaacaacagagtgtgtctccatctgcttatttcccnagtaacttttagatccatgtttctaaactgaatgcaaggtaattcccaaagagcacaaagggagctctgagcttctggatcttttggcaaaccttcttaccttcaatgactgtctcctctcagcaaccacactgaagtgttcctatcacagagcttctccacagtcatccaatttatcttcttaattgattactcctggatgagctatagagagtcatactctcctatttcccatcctgccatgtttctcaccttccttccacattcttggggatgggataaaaggaaaacagagaaggagaatttctgctgagtgaaaacaaaatgcaagtgggtaacaaaatg

SEQ ID NO: 355727 - DNA, 930 bp, Homo Sapiens
  misc_feature (917)..(917): n is a, c, g, or t
ccggaattcccgggatcttccggctgtcaagctcccggccgggctgactcaagcggaggcgcgcggaacagtcgccgaggcgattcccgcccaggctcctgtaaccgccaggcagtggccccgccatgtcccagccccggaccccagagcaggcactggatacacctgggggactgccccccaggcaggagagacgaggacgctggggaggggatccagtgctcccaacgcatgctcagcttcagtgactgccctgctgtccatcatcgccaccgtcatgatcctgcctgtgacccacacggagatctccccagaacaggtaacggggcaggctgtgctctgcgtggtgtggccctgcgaagatatagggtccccgaggctcgacctggcacagggtgctgaccctgcacgcctcgaagcttctgaggcttaggaggcagaggcgggaggcgggggcctccttggaaagggagggagccaacaagtcctgctcagcctgtgctcaccccggcggaggtcctggcctcctgggagggtgggagactgggctcctagggctctgtttccgagttcagtggacaaaggcagcaccctggaagtgagccagaggacaggttggaagaggaaggttccgggcctgccccaaggacagaagtttcctctgcgggagggcagctgccccagcaggcaggccccttacgtagctgctctgagtaaacgcggccagcgccccgtctcagcggggacactcccaccccggctgctcctgcaggcctggagcagttcgacagaagtgtacagaggcttctggcaacacggattgccgtctacctgatgacctttctcatcgtgacagtggcctgggcagcacacacaaggttgttccaagttgttgggaaacagacgacacacttgcnctgctcaacctgg

SEQ ID NO: 355728 - DNA, 3301 bp, Homo Sapiens
caagctcccggccgggctgactcaagcggaggcgcgcggaacagtcgccgaggcgattcccgcccagcagttcgacagaagtgtacagaggcttctggcaacacggattgccgtctacctgatgacctttctcatcgtgacagtggcctgggcagcacacacaaggttgttccaagttgttgggaaaacagacgacacacttgccctgctcaacctggcctgcatgatgaccatcaccttcctgccttacacgttttcgttaatggtgaccttccctgatgtgcctctgggcatcttcttgttctgtgtgtgtgtgatcgccatcggggtcgtgcaggcactgattgtggggtacgcattccacttcccgcacctgctgagcccgcagatccagcgctctgcccacagggctctgtaccgacgacacgtcctgggcatcgtcctccaaggcccggccctgtgctttgcagcggccatcttctctctcttctttgtccccttgtcttacctgctgatggtgactgtcatcctcctcccctatgtcagcaaggtcaccggctggtgcagagacaggctcctgggccacagggagccctcggctcacccagtggaagtcttctcgtttgacctccacgagccactcagcaaggagcgcgtggaagccttcagcgacggagtctacgccatcgtggccacgcttctcatcctggacatctgcgaagacaacgtcccggaccccaaggatgtgaaggagaggttcagcggcagcctcgtggccgccctgagtgcgaccgggccgcgcttcctggcgtacttcggctccttcgccacaggtgggactgctgtggttcgcccaccactcactcttcctgcatgtgcgcaaggccacgcgggccatggggctgctgaacacgctctcgctggccttcgtgggtggcctcccactagcctaccagcagacctcggccttcgcccggcagccccgcgatgagctggagcgcgtgcgtgtcagctgcaccatcatcttcctggccagcatcttccagctggccacgtggaccacggcgctgctgcaccaggcggagacgctgcagccctcggtgtggtttggcggccgggagcatgtgctcatgttcgccaagctggcgctgtacccctgtgccagcctgctggccttcgcctccacctgcctgctgagcaggttcagtgtgggcatcttccacctcatgcagatcgccgtgccctgcgccttcctgttgctgcgcctgctcgtgggcctggccctggccaccctgcgggtcctgcggggcctcgcccggcccgaacaccccccgccagcccccacgggccaggacgacccacagtcccagctcctccctgccccctgctagcagccacagagcccactcccagccgtcctcaccagagatggaccagggaggacaggatgctgggcaggggaagccaagtcacgggcaggccgcagtggttcttgcgtggcctggttttattttcattgtgaaatatcatgctcttatttcagtcctcaaatgttctccactttttgcggagagaggagtttcacaggaactggaaatgtgctttatggcatttgcctatccactctctccaacctgaagacacgttgccaagctcacctacccgaggggcagcccactcccagcccctttgaggcctatacagagctggtggggtcgggggtgccaagccaggccctcccctcccctaagtttgttgacactaaagatgaggaagagatgctaggatagtgacgcccagactgtatttgtcctggatataaattactgttgcattcaggcagcgataaatacagaggggcccggtgtgcagggcacagaccccacctgggtacagactcacatacaggacaagcccctcaccacagttacacacgattcatacagaccacagtccacaccagggctcgcgaagaaaaactaatcacaaaggactggtcttgaagatgacaatgacgtaaacaagagtgcacgctggaggccacaagcggccttacaatgcgtgtgtctgtgcagtttggcagatgcggggggtcgggggattagtggcatcaagggccccccaggaggctgcagcaggctgggccaggccacactcctgaggccaaaccagagccacttctgaggtcaaagccatcacccaggaaagctccgcagaattggaaggcccaggccagctgtgccccacaaggaaaggggaagatccgcaccgtgggaccgtttctcgtgggggagtcggggcttcccacagagcgggctccatttttggtcagactcctcccggggccagtgcaccatctgaatccttgggcacgtggaggcagctttgtctttggctgggtgcaccccagcctggcccagatgcaggaccctccaccaagctgtctgggggcgtgggagcaggagggctgcaggagctgggtctccacacgctgacgagggataggactgagcagatgtcggctcacacaggcactgggaactgcacatcaacagcgggcaagcagcgtggaaagtgctagcgtggggtctggggctgaaagccagctcctcctccacgtgcatggggctgtttacacctcccaaactcctctgcaccgccatgccctgcttttggtcccttctgggtgctaagtgccccaccctgagggccgaggggcagacactcgggcccggcccacactctggtgctgccagggcagcacgtgagacctcctagcctccacgtggacagaggttctcctcccccagcagaggcactaggaaagggccaccaggtccagctgggcactgcctgcccctggagctgtacctgagatccaagctgccatctgtatataacaaggccagaaaacaagggaaggcaccttctcccttccctgaacacaaggaagtcaccagtcaccaccacccggcagcctcacacgctgcccacacatgctgcccagggcggggaggtgaggctggagggactggcagcctgtgtctgctggggcagggacacaccagggagcctgctgctctgaaggactggccagggggacggcccgaggggcacaaagtgagatcagacccacctggacggcctgcatccagcactgtccagctcaaggggctcagtggggagagggatgggtgcccacccctgaggagaggaccaggccaccacagggcagagggctcaccatccagagccccgacgcgtgggtcgacgatatcccgaaattccgggccagtaccag

SEQ ID NO: 355729 - DNA, 912 bp, Homo Sapiens
aagcgctggtacggccggaattacgggatatcgtcgacccacgcgtccgggcaacacggattgccgtctaccgtgatgacctttctcatcgggacagtggcctgggcagcacacacaaggttgttccaagatgttgggaaaacagacgacacacttgccctgctcaacctggcctgcatgatgaccatcaccttcctgccttacacgttttcgttaatggtgaccttccctgatgtgcctctgggcatcttcttgttctgtgtgtgtgtgatcgccatcggggtcgtgcaggcactgattgtggggtacgcattccacttcccgcacctgctgagcccgcagatccagcgctctgcccacagggctctgtaccgacgacacgtcctgggcatcgtcctccaaggcccggccctgtgctttgcagcggccatcttctctctcttctttgtccccttgtcttacctgctgatggtgactgtcatcctcctcccctatgtcagcaaggtcaccggctggtgcagagacaggctcctgggccacagggagccctcggctcacccagtggaagtcttctcgttttgacctccacgagccactcagcaaggagcgcgtggaagccttcagcgacggagtctacgccatcgtggccacgcttctcatcctggacatctgcgaaagacaacgtcccggaccccaaggatgtgaaggagacggttcagcggcagcctcgtggccgccctgagtgcgaccgggccgcgcttcctgggcgtacttcgggtccttcgcaccagtgggactgctgtggttcggcccacaatcactcttccttgcatgtgcgcaggcaacgcgggcatgggggctggtgaacacgctccttcgcgtggccttcgtggggtggctcccatagcttaa

SEQ ID NO: 355730 - DNA, 1205 bp, Homo Sapiens
cggcaaagccgagttcctggtagctatgggggccacccacgaagccaccgagcgcggtttcacaaccccaaggcccgcgtgcctgggaacatgcaggaagactgattggtggcgacccacagaagtctcactggtggcgaaggagccgaagtacgccaggaagccggccggtcgcactcagggcgcaacgaggctccccctgaacgtgcgcccggtcacatcctggggtccggggacgtggtcttcgcagatgtccaggatgagaagcgtggccacgatggcgtagactccgtcgctgaaggcttccaacgcgctccttgctgagtggctcgtggaggtcaaacgagaagacttccactgggtgagccgagggctccctgtggcccaggagcctgtctctgcaccagccggtgaccttgctgacataggggaggaggatgacagtcaccatcagcaggtaagacaaggggacaaagaagagagagaagatggccgctgcaaagcacagggccgggccttggaggacgatgcccaggacgtgtcgtcggtacagagccctgtgggcagagcgctggatctgcgggctcagcaggtgcgggaagtggaatgcgtaccccacaatcagtgcctgcacgaccccgatggcgatcacacacacacagaacaagaagatgcccagaggcacatcagggaaggtcaccattaacgaaaacgtgtaaggcaggaaggtgatggtcatcatgcaggccaggttgagcagggcaagtgtgtcgtctgttttcccaacaacttggaacaaccttgtgtgtgctgcccaggccactgtcacgatgagaaaggtcatcaggtagacggcaatccgtgttgccagaagcctctgtacacttctgtcgaactgctgttctggggagatctccgtgtgggtcacaggcaggatcatgacggtggcgatgatggacagcagggcgtcactgaagctgagcatgcgttgggagcactggatcccctccccagcgtcctcgtctctcctgcctggggggcagtcccccggtgtatccagtgcctgctctggggtccggggctggacatggcggggccgctgcctggcggttacaggagcctgggcgggaatcgcctcggcgactgttccgcgcgcctccgcttgagtcagcccggccgggagcttgacagccggaagttcatcg

SEQ ID NO: 355731 - DNA, 880 bp, Homo Sapiens
  misc_feature (650)..(650): n is a, c, g, or t
  misc_feature (657)..(657): n is a, c, g, or t
ctggaccggtccggaattccttgcatcacccggcctggctgactcaagctgacgcgcgcggaacagtcgccgaggcgattcccgcccaggctcctgtaaccgccaggcagcggccccgccatgtcccagccccggaccccagagcaggcactggatacaccgggggactgccccccaggcaggagagacgaggacgctggggaggggatccagtgctcccaacgcatgctcagcttcagtgacgccctgctgtccatcatcgccaccgtcatggtctgtacggggcccctgcttaggcctgccccaccccgagcctctcgaggcactgcccagcccacctcagacctgtctaggtcttgccagcatccttgggtcccccagctcctcaggcagcttaggggggcccagcactgccctcgagtccccagtactgccacacccaatccaacaagcgtctcttgctctcctgcttccttctgtctctttgccccctcagatcctgcctgtgacccacacggagatctccccagaacaggtaacggggcaggctgtgctctgcgtggtgtggccctgcgaagatatagggccccccgaggctcaacctggcacagggtgctgaccctgcacgcctcgaagcttctgaggcttangaggcanaagcgggaagccggggcctcctttggaaagggagggagccaacaagtcctgctcagcctgtgctcacccccggcggaggtcctggcctcctgggagggggggaaattgggctcctaagggctctgttttccgaagttcaatggaaaaaggcaggcacccccggaagggggcccaaaagaaagggttttaaaatagcaagggtcccccgcacttcccccaaggg

SEQ ID NO: 355732 - DNA, 827 bp, Homo Sapiens
gcaggcgcggaggtctgacggagacagcgcgtgcgcggcgtcgccgggcttgcgatgaacttccggctgtcaagctcccggccgggctgactcaagcggaggcgcgcggaacagtcgccgaggcgattcccgcccaggctcctgtaaccgccaggcagcggccccgccatgtcccagccccggaccccagagcaggcactggatacaccgggggactgccccccaggcaggagagacgaggacgctggggaggggatccagtgctcccaacgcatgctcagcttcagtgacgccctgctgtccatcatcgccaccgtcatgatcctgcctgtgacccacacggagatctccccagaacagtggacaaaggcagcaccctggaagtgagccagaggacaggttggaagaggaaggttccgggcctgccccaaggacagaagtttcctctgcgggagggcagctgccccagcaggcaggccccttacgtagctgctctgagtaaacgcggccagcgccccgtctcagcggggacactcccaccccggctgctcctgcaggcctggagcagttcgacagaagtgtacagaggcttctagcaacacggattgccgtctacctgatgacctttctcatcgtgacagtggcctgggcagcacacacaaggttgttccaagttgttgggaaaaacagacgacacacttgccctgctcaacctggcctgcatgatgaccatcaccttcctgccttacacgttgtacgctaactggtgaccttcccttgatgtgcctctgggcatcctcttgtactgggtgcgtgtcgatcgacca

SEQ ID NO: 355733 - DNA, 936 bp, Homo Sapiens
ccatggcccgcgtgccttgcggacaatgaaggaagagtgatgtgggccgaaccacagcagtcccaactgttgcgaaggagccgaagtacgccaggaaagcgcggcccggtcgcactcagggcgggccacgaggctgccgctgaacctctccttcacatccttggggtccgggacgttgtcttcgcagatgtccaggatgagaagcgtggccacgatggcgtagactccgtcgctgaaggcttccacgcgctccttgctgagtggctcgtggaggtcaaacgagaagacttccactgggtgagccgagggctccctgtggcccaggagcctgtctctgcaccagccggtgaccttgctgacataggggaggaggatgacagtcaccatcagcaggtaagacaaggggacaaagaagagagagaagatggccgctgcaaagcacagggccgggccttggaggacgatgcccaggacgtgtcgtcggtacagagccctgtgggcagagcgctggatctgcgggctcagcaggtgcgggaagtggaatgcgtaccccacaatcagtgcctgcacgaccccgatggcgatcacacacacacagaacaagaagatgcccagaggcacatcagggaaggtcaccattaacgaaaacgtgtaaggcaggaaggtgatggtcatcatgcaggccaggttgagcagggcaagtgtgtcgtctgttttcccaacaacttggaacaaccttgtgtgtgctgcccaggccactgtcacgatgagaaaggtcatcaggtagacggcaatccgtgttgccagaagcctctgtacacttctgtcgaactgctgggcgggaatcgcctcggcgactgttccgcgcgcctccgcttgagtcagcccggccgggagcttgacagccggaagttcatcgcaagcccggcgacgcca

SEQ ID NO: 355734 - DNA, 917 bp, Homo Sapiens
ggaattcccgggatcaagctcccggccgggctgactcaagcggaggcgcgcggaacagtcgccgaggcgattcccgcccagcagttcgacagaagtgtacagaggcttctggcaacacggattgccgtctacctgatgacctttctcatcgtgacagtggcctgggcagcacacacaaggttgttccaagttgttgggaaaacagacgacacacttgccctgctcaacctggccgcatcatggctgtgatgccctccctccctccaggcctgcatgatgaccatcaccttcctgccttacacgttttcgttaatggtgaccttccctgatgtgcctctgggcatcttcttgttctgtgtgtgtgtgatcgccatcggggtcgtgcaggcactgattgtggggtacgcattccacttcccgcacctgctgagcccgcagatccagcgctctgcccacagggctctgtaccgacgacacgtcctgggcatcgtcctccaaggcccggccctgtgctttgcagcggccatcttctctctcttctttgtccccttgtcttacctgctgatggtgactgtcatcctcctcccctatgtcagcaaggtcaccggctggtgcagagacaggctcctgggccacagggagccctcggctcacccagtggaagtcttctcgtttgacctccacgagccactcagcaaggagcgcgtggaagccttcagcgacggagtctacgccatcgtggccacgcttctcatcctggacatctgcgaagacaacgtcccggaccccaaggatgtgaaaggaaagttcagcggcagcctcgtgggcgcccctgagtgcgaccgggccgcgccttcctggcgttactttcggcctccttcccccacagttggggactgcctggtggtttcgcccac

SEQ ID NO: 355735 - DNA, 1027 bp, Homo Sapiens
  misc_feature (6)..(6): n is a, c, g, or t
  misc_feature (14)..(14): n is a, c, g, or t
  misc_feature (19)..(19): n is a, c, g, or t
  misc_feature (38)..(39): n is a, c, g, or t
  misc_feature (46)..(46): n is a, c, g, or t
  misc_feature (50)..(50): n is a, c, g, or t
  misc_feature (57)..(57): n is a, c, g, or t
  misc_feature (72)..(72): n is a, c, g, or t
  misc_feature (77)..(77): n is a, c, g, or t
  misc_feature (81)..(81): n is a, c, g, or t
  misc_feature (86)..(86): n is a, c, g, or t
  misc_feature (96)..(96): n is a, c, g, or t
  misc_feature (102)..(102): n is a, c, g, or t
  misc_feature (108)..(108): n is a, c, g, or t
  misc_feature (111)..(121): n is a, c, g, or t
  misc_feature (123)..(123): n is a, c, g, or t
  misc_feature (125)..(125): n is a, c, g, or t
  misc_feature (127)..(127): n is a, c, g, or t
  misc_feature (130)..(132): n is a, c, g, or t
  misc_feature (136)..(136): n is a, c, g, or t
  misc_feature (139)..(139): n is a, c, g, or t
  misc_feature (144)..(146): n is a, c, g, or t
  misc_feature (150)..(150): n is a, c, g, or t
  misc_feature (176)..(176): n is a, c, g, or t
  misc_feature (185)..(185): n is a, c, g, or t
  misc_feature (189)..(189): n is a, c, g, or t
  misc_feature (202)..(202): n is a, c, g, or t
  misc_feature (232)..(232): n is a, c, g, or t
  misc_feature (247)..(247): n is a, c, g, or t
  misc_feature (264)..(264): n is a, c, g, or t
  misc_feature (270)..(271): n is a, c, g, or t
  misc_feature (273)..(273): n is a, c, g, or t
  misc_feature (275)..(276): n is a, c, g, or t
  misc_feature (279)..(279): n is a, c, g, or t
  misc_feature (295)..(295): n is a, c, g, or t
  misc_feature (298)..(299): n is a, c, g, or t
  misc_feature (303)..(303): n is a, c, g, or t
  misc_feature (308)..(308): n is a, c, g, or t
  misc_feature (317)..(317): n is a, c, g, or t
  misc_feature (331)..(331): n is a, c, g, or t
  misc_feature (336)..(336): n is a, c, g, or t
  misc_feature (338)..(338): n is a, c, g, or t
  misc_feature (351)..(352): n is a, c, g, or t
  misc_feature (358)..(358): n is a, c, g, or t
  misc_feature (361)..(361): n is a, c, g, or t
  misc_feature (365)..(377): n is a, c, g, or t
aactanacagagcnattanacaagatttgctggaaatnntgtaccnaaanatccctntaccaaatttccctntatancctnccatnaaaaccctcnaagaanaaaganccnnnnnnnnnnncntnanggnnngggngcncgggnnngganccatttaatggggtcccagcgctggntgggcccanacanactgtggtggccngcgcagcgagcaggcgtgtgcgtgtgtggngcagacaggatgtgntgcaggcaggttctatngttttnnantnnaantcaaaagaagtagggncgnnttgntgttnattttttgnatagaatggtctgnacttngnagatgggcggggnnaggggnccncccnnnnnnnnnnnnncctgctgtttataatgttgaatttctgtaaaataaactgtatttgcaaatccaacattgagcttctggactacgctgactccactgctgaatcctcaatggaaagggtcgactggttgcagttgaaatgacctgaaatgtagcctctgtccttgtaagtcagttgacttgccgcacatctctttgtgtacttgtacggtactggcagaaaagtcatttttcaaaagccataggcttttccttgcccttagctgtaataatgcatctgattttgatttcctccagagctgtgtttctgtccatcacctgtgtattggccctgtgtttaccactctggcccactcctcacccccttgctcccctggtcttctggagtttgtgacattgatttgaaatggatggtgttctcttgagagcaagtgagattgttagaattaagttccaactatacagttttctaacatagctataaggtccttgttgctgtttgtgataactgaaagataactcattggaaacgtgcatacatttatattcagatgaaattatgggtttgccctggtccattaaatatctccgattatttttcaaaacgagaacaaattctgcccaattactttgacctttacctaaaatatggcatctgtactg

SEQ ID NO: 355736 - DNA, 1644 bp, Homo Sapiens
  misc_feature (1030)..(1030): n is a, c, g, or t
  misc_feature (1034)..(1034): n is a, c, g, or t
  misc_feature (1039)..(1040): n is a, c, g, or t
gccgggcccagctgcggggcggaggcggaggcggaggagaggcctgcggcggcagggagcggcgggactgggagcgggcgcgggagccgacccgagccgagccgagccgagccgagccggagcgggcggcgaaggccggcgcggcgagcagcaaccatgtcggtgttcgggaagctgttcggggctggagggggtaaggccggcaagggcggcccgaccccccaggaggccatccagcggctgcgggacacggaagagatgttaagcaagaaacaggagttcctggagaagaaaatcgagcaggagctgacggccgccaagaagcacggcaccaaaaacaagcgcgcggccctccaggcactgaagcgtaagaagaggtatgagaagcagctggcgcagatcgacggcacattatcaaccatcgagttccagcgggaggccctggagaatgccaacaccaacaccgaggtgctcaagaacatgggctatgccgccaaggccatgaaggcggcccatgacaacatggacatcgataaagttgatgagttaatgcaggacattgctgaccagcaagaacttgcagaggagatttcaacagcaatttcgaaacctgtagggtttggagaagagtttgacgaggatgagctcatggcggaattagaagaactagaacaggaggaactagacaagaatttgctggaaatcagtggacccgaaacagtccctctaccaaatgttccctctatagccctaccatcaaaacccgccaagaagaaagaagaggaggacgacgacatgaaggaattggagaactgggctggatccatgtaatggggtccagcgctggctgggcccagacagactgtggtggcctgcgcagcgagcaggcgtgtgcgtgtgtggggcaggcaggatgtggtgcaggcaggttccatcgctttcgactctcactccaaagcagtagggccgcgttgctgctcactctctgcatagcatggtctgcacctgggagatgggcggggggaggggngcgngcggnntgggaagtgcctgctgtttataatgttgaatttctgtaaaataaactgtatttgcaaatccaacattgagcttctggactacgctgactccactgctgaatcctcaatggaaagggtcgactggttgcagttgaaatgacctgaaatgtagcctctgtccttgtaagtcagttgacttgccgcacatctctttgtgtacttgtacggtactggcagaaaagtcatttttcaaaagccataggcttttccttgcccttagctgtaataatgcatctgattttgatttcctccagagctgtgtttctgtccatcacctgtgtattggccctgtgtttaccactctggcccactcctcacccccttgctcccctggtcttctggagtttgtgacattgatttgaaatggatggtgttctcttgagagcaagtgagattgttagaattaagttccaactatacagttttctaacatagctataaggtccttgttgctgtttgtgataactgatagataactcattggaaacgtgcatacatttatattcagatgaaattatggtttgcactgtctattaaatatctcgattaattttcataaaaaaaa

SEQ ID NO: 355737 - DNA, 1081 bp, Homo Sapiens
  misc_feature (573)..(655): n is a, c, g, or t
cagaagcatagagaggaaagtaatcactagcaagtggaagaaccgggattcagatccagaacaggctgactccagagtcactggctgtcatgtagtttcctcaactactgcctcagctctacaatcccagagtaaagctcttctccaaatgaagagccaggaagaggtagaggtggcaggaattaaactttgtaaagccatgtccctgggttcagtgactttcacagatgtggccatagacttttcccaagatgaatgggagtggctgaatcttgctcagagaagtttgtacaagaaggtgatgttagaaaactacaggaacctagtttcagtgggtctttgcatttctaaaccagatgtgatctccttactggagcaagagaaagacccttgggtgataaaaggagggatgaacagaggcctgtgcccagatatcctgaaaatgccacatcagtaagttgaacaagaagaacgggagctttaagaacaagattcaagatgaaacaacacaagtgttgaatattttataaatagctaaaggcagaaaacgttgccaattatctcagacttccnnnnnnnnnnnnnnnnnnnnnnnnnnnnnnnnnnnnnnnnnnnnnnnnnnnnnnnnnnnnnnnnnnnnnnnnnnnnnnnnnnncatgttgagagtggggacaggtaagtaccagctggactcttaccctgggctgttggtcctgaggatgcggtataggttcagcctaggcactggctccaccccttgaaatagtttggatatttgtccctgcccaaaatctcatgttagattgtaatccccagtgctggagatggggcctggtgggaggtgtttggatcatggggcaggtccctcatggcacggggctgtcttctcgataatgagtgagtttttgtgagattaggtcctttaaaaatgtgtggcacatttcgccccttctgtctagctcatgtgtttttgccatgtgatgtgcggctcccctttcaccttttgccatgattgtaagcctcctgtggcctccccagaagtcaagcaaatgccaatgtcattttgcgtacagcctcagaa

SEQ ID NO: 355738 - DNA, 1860 bp, Homo Sapiens
  misc_feature (47)..(47): n is a, c, g, or t
  misc_feature (50)..(50): n is a, c, g, or t
  misc_feature (1109)..(1109): n is a, c, g, or t
  misc_feature (1518)..(1518): n is a, c, g, or t
  misc_feature (1839)..(1839): n is a, c, g, or t
tacagcagctccgccggcagccgcgggagcacggcgacgccagcggnggnaagggaaaaggccgaggcatcagcgtgtgaagaccgcaaagacgatcccgagtacagttgtgaacagcattgctgctaggctcctcctgcagatcatctgaaatgaacctctcttattgatttttattggcctagagccaggagtactgcattcagttgactttcagggtaaaaagaaaacagtcctggttgttgtcatcataaacatatggaccagtgtgatggtgaaatgagatgaggctccgcaatggaactgtagccactgctttagcatttatcacttccttccttactttgtcttggtatactacatggcaaaatgggaaagaaaaactgattgcttatcaacgagaattccttgctttgaaagaacgtcttcgaatagctgaacacagaatctcacagcgctcttctgaattaaatacgattgtgcaacagttcaagcgtgtaggagcagaaacaaatggaagtaaggatgcgttgaataagttctcagataataccctaaagctgttaaaggagttaacaagcaaaaaatctcttcaagtgccaagtatttattatcatttgcctcatttattgaaaaatgaaggaagtcttcaacctgctgtacagattggcaacggaagaacaggagtttcaatagtcatgggcattcccacagtgaagagagaagttaaatcttacctcatagaaactcttcattcccttattgataacctgtatcctgaagagaagttggactgtgttatagtagtcttcataggagagacagatattgattatgtacatggtgttgtagccaacctggagaaagaattttctaaagaaatcagttctggcttggtggaagtcatatcaccccctgaaagctattatcctgacttgacaaacctaaaggagacatttggagactccaaagaaagagtaagatggagaacaaagcaaaacctagattactgttttctaatgatgtatgctcaagaaaagggcatatattacattcagcttgaagatgatattattgtcaaacaaaattatgttaataccataaaaaanttttgcacttcaactttcttctgaggaatggatgattctagagttttcccagctgggcttcattggtaaaatgtttcaagcgccggatcttactctgattgtagaattcatattcatgttttacaaggagaaacccattgattggcccctggaccatattctctgggtgaaagtctgcaaccctgaaaaagatgcaaaacattgtgatagacagaaagcaaatctgcgaattcgcttcagaccttcccttttccaacatgttggtctgcactcatcactatcaggaaaaagccaaaaactcacggataaagattatatgaaaccattacttcttaaaatccatgtaaacccacctgcggaggtatctacttccttgaaggtctaccaagggcatacgctggaaaaaacntacatgggagaggatttcttctgggctatcacaccgatagctggagactacatcttgtttaaaattgataaaccagtcaatgtagaaaggtatttgttccatagcggcaacaaagaacatcctggagatattctgctaaacacaactgtggaagttttgccttttaagagtgaaggtttggaaataagcaaagaaaccaaagacaaacgattagaagatggctatttcagaataggaaaatttgagaatggtgttgcagaaggaatggtggatccaagtctcaatcccatttcagcctttcgactttcagttattcagaantctgctgtttgggccattctt

SEQ ID NO: 355739 - DNA, 1205 bp, Homo Sapiens
  misc_feature (200)..(200): n is a, c, g, or t
  misc_feature (1031)..(1031): n is a, c, g, or t
  misc_feature (1155)..(1155): n is a, c, g, or t
  misc_feature (1183)..(1183): n is a, c, g, or t
ctccttgaacctggtgacatccctttttgttaatccccaaatgagaattaagccccaggagttgctccattttgtcaacctcttgaaaccaaggctgcagcaatattaatggcatcagctagcgtccatgcaaaaataggagtggggcctggcagccaaaaagagagatatccagatagatattctttgttggccacganagctgtagcttgaaaatgctcacaaatgttgtactccacaggtaatgttgtacagatggtcaagtgaaataacaaggacagcccacaaactaagagcttctgaacaaccgcagtatttggagatggctctgttctttcatactgtgtctcttcttttccattttcaccagattgtgtgatatggtatgatctgccttcaatgaaagtaatgtagtctttgtaagagcaaagtgggcctgccaggatccccatgaagttacagttgtaactcaaatactccagtaagcttggcatgcgccttacagctaaatccctctgtgaggaagtcagttcttcatccttccgaaacatcccatcatgaatttcgcaagccaaactagtgatcttctgagtaatgatcatcattgggcctgaaaaatcagcagaatattgtccatagtcaaagatatagactcgagtaacttggcacactgtgaggtatcccagagcaaacacaaagcagtaattgtgcatgttctccactcctatgatgatcatgatacagtaggaaattccactttgtacaagaaagtgtaaggcataccatccaaagcaaaaaagtgcaagataaaggcccaaaagggtagcaactacatgtcttataaaagagcctagttttgcttgaatgtagataagttcgaaaccaaatggctgctagcaaggcaaagagttggcacactacaaagttgacctggtcgatgggcagctgcacggcgttgctgaggggctgcagcagggtggagcccgtggtgctggtggtggccatggccgggcctcggcgctccggccgcnccgcgccgctcgctcgctcgcgctgtgccgggcgacgacgaggatggggatgcagcggcgcgcccgcccctgggccgcccgcggtcggagctctgcgcggggaaggccggggtggggccggggncggtgcccggctcgctcctccccctccnccgccacctcctcccgcgcccg

SEQ ID NO: 355740 - DNA, 1181 bp, Homo Sapiens
  misc_feature (12)..(12): n is a, c, g, or t
  misc_feature (23)..(23): n is a, c, g, or t
  misc_feature (35)..(38): n is a, c, g, or t
  misc_feature (52)..(52): n is a, c, g, or t
  misc_feature (54)..(54): n is a, c, g, or t
  misc_feature (74)..(74): n is a, c, g, or t
  misc_feature (163)..(163): n is a, c, g, or t
  misc_feature (555)..(555): n is a, c, g, or t
  misc_feature (576)..(780): n is a, c, g, or t
  misc_feature (839)..(839): n is a, c, g, or t
aaagaaaacacncaacaaccaanagaaaagaacannnngtccacacagaacntntttttcacacaatgttcatntacctttttataatagctggaactgaaaacagcctggaactgaaaacagccccagtgtcccttaacagatgaagtcacaaaccacaganacattcaacaatatggatgaatctcaaaaacattatgttgagcaaaaagaaactttttacaacatataagtattgtatgactctacttacataaagttctgcgcaagctaaactaagatgaaaacaatctgaacaatgttaggttctaggggtggtgtggggggaaggaataactaggaagaggtgtaggttctataccctgatagaactttctggcaaaggtgtatacatttgtcacagctcatgaaatggtatatgtggtcaactgtattttccaaagatggtcacaatagaagccattccacatgctcttaacaatgtaacactgtcattttttcatcaggtggtggagtctatggcccttctccttgaatctgagtgaaattagtgantctttcaatccaaagactacnnnnnnnnnnnnnnnnnnnnnnnnnnnnnnnnnnnnnnnnnnnnnnnnnnnnnnnnnnnnnnnnnnnnnnnnnnnnnnnnnnnnnnnnnnnnnnnnnnnnnnnnnnnnnnnnnnnnnnnnnnnnnnnnnnnnnnnnnnnnnnnnnnnnnnnnnnnnnnnnnnnnnnnnnnnnnnnnnnnnnnnnnnnnnnnnnnnnnnnnnnnnncaaagacaagctctccttgccaatccctgaccaaatgagagattcatgagccaaaatanaatagttgctgatatttaaggcactaagtttggggcaatgtattacacagcaataaataactggaacagcatagtaaattctagttaaaaatactaaactactaagttttagttaacatacatgctcaagttaagggtgtggtatactaacaactgcaacttactttgaaaagcataaaaaaagacactagaagaagacaggatggatagatggacaagatagaagacaataacaaatagaacaaaatgttgtgaaattatattctacaattattttaaagtctgtgtggtttgaaaaattgtacgataaaatgaagagtgaaataaagacatttccatact

SEQ ID NO: 355741 - DNA, 607 bp, Homo Sapiens
  misc_feature (75)..(166): n is a, c, g, or t
  misc_feature (310)..(418): n is a, c, g, or t
tgggctcaagcaatcctcccaccttagcctgctgaatagctgggactacagacgtgcaccaccatgcctggctannnnnnnnnnnnnnnnnnnnnnnnnnnnnnnnnnnnnnnnnnnnnnnnnnnnnnnnnnnnnnnnnnnnnnnnnnnnnnnnnnnnnnnnnnnnatgagccactgtgcccggcccataaagtctttttgatgcacagataattaacagatatgaaggatcttaatcaattaatagttttgacctaatacagcttaacagcaacaagtgccaaaatttgaggtcttactatgtgcactnnnnnnnnnnnnnnnnnnnnnnnnnnnnnnnnnnnnnnnnnnnnnnnnnnnnnnnnnnnnnnnnnnnnnnnnnnnnnnnnnnnnnnnnnnnnnnnnnnnnnnnnnnnnnaggtttgacaccagtgcccactctcttcaccactaccatttgggagtactgtccttccaggacaaggaaggatagtcctctgcttttcccagaattagcaaaggttctgattgacttgataaggtagtctcaattgatacggatgataggactttgaggagggaaaggtaataaagcttacacttggtc

SEQ ID NO: 355742 - DNA, 1722 bp, Homo Sapiens
  misc_feature (33)..(33): n is a, c, g, or t
  misc_feature (44)..(44): n is a, c, g, or t
ccgccgtcggccgccgcaccccaagcgactgcncaaactaagcntccgtggctgggtacgggagcgctttggggacaaaaattctccctcaactgtggtctgcattccttcggcccgtgggctgatctggggcgggaagtattagcgtctcagttgcgctgcagcctggggaggaaggaggaggccgagcctggggcggagtttgggctgactggggctggaccgggcaagacgccgccgctgcccggatgttgcgatggctgatcgggggaggccgagaaccgcagggactggccgagaaatctcctttacagacaataggtgaagaacaaacccagaatccctacactgaactgctagtactgaaggctcatcatgatattgtacgatttctggtacagttagatgactacagatttgcatctgctggtgatgatggaattgtagttgtgtggaatgcccagacaggggaaaaacttttagaactgaatggacacactcaaaagataacagctattattacatttccttccttggaatcttgtgaagagaaaaatcaactcatcttgacagcctctgctgatagaacagttattgtgtgggatggtgatactaccagacaagttcagagaatatcatgcttccagtctactgtaaagtgtttaactgttcttcagagactagatgtttggctttctggtgggaatgacctgtgtgtgtggaaccgaaaattagatctcctgtgtaagactagccacctttctgatacaggtattagtgctttggttgaaatacctaagaactgtgttgtggcagcagttggcaaagaactgataattttcaggttggtagcacccacagaaggatcactagaatgggatattcttgaagttaagcgcctccttgatcaccaggataatattctctcattgattaatgtcaatgatttgagttttgtcaccggctcccacgtcggagagctgatcatctgggatgccctggactggaccatgcaggcctatgaacgcaacttctgggacccatctccacaactggacacccaacaagaaataaaactctgtcaaaaatcaaatgacatttctattcatcatttcacatgtgatgaagagaatgtatttgctgcagttggaaggggtttatacgtgtatagccttcaaatgaagcgtgtgattgcctgccagaaaactgcacatgactccaatgtcctgcacattgccagacttccaaacaggcagttaatctcatgctcagaagatggcagtgtacgcatttgggagttaagagaaaaacagcagcttgcagctgagcctgtaccaacaggtttttttaacatgtggggatttggaagagtcagcaaacaagccagccaacctgttaaaaagcagcaagaaaatgctacttcatgttcactggagcttattggagatttgattggacactcatcatctgtggagatgtttctatactttgaagatcatggactagtgacgtgctccgctgatcatctcattattttgtggaaaaatggagagcgagaatctggattgcgcagtttaagattatttcaaaaattagaggagaatggtgacttataccttgctgtctagtttaaggaattaaaaatacacatgcatgaaccttgaacatcaaatatcgggtactactctaaaaaccattaatatattgatcacttaaattggt

SEQ ID NO: 355743 - DNA, 1815 bp, Homo Sapiens
  misc_feature (991)..(991): n is a, c, g, or t
  misc_feature (1180)..(1180): n is a, c, g, or t
  misc_feature (1337)..(1468): n is a, c, g, or t
  misc_feature (1680)..(1689): n is a, c, g, or t
  misc_feature (1734)..(1734): n is a, c, g, or t
  misc_feature (1767)..(1769): n is a, c, g, or t
  misc_feature (1771)..(1771): n is a, c, g, or t
  misc_feature (1773)..(1773): n is a, c, g, or t
  misc_feature (1775)..(1775): n is a, c, g, or t
  misc_feature (1798)..(1798): n is a, c, g, or t
ggatggagcgggcgccatggcggttctactggagaccactttaggcgacgtcgtcatcgacttgtacaccgaagaacggccgcgtgcctgcttgaatttcttgaaactgtgcaaaataaaatattacaattattgccttattcacaatgtacagagggattttatcatacaaactggcgatcctacagggactggccgtggaggagagtctatctttggccaactgtatggtgatcaagcaagcttttttgaggcagaaaaagtcccaagaattaagcacaagaagaaaggcacagtgtccatggtgaataatggcagtgatcaacatggatctcagtttcttatcaccacaggagaaaatctagattatcttgatggtgtccatacggtgtttggtgaggtgacagaaggcatggacataattaagaaaattaatgagacctttgttgacaaggactttgtaccatatcaggatatcaggataaatcatacggtgattttagatgatccatttgatgaccctcctgagtaactgggactgtaaacatgacagccgcacttcacagttacactggggctggatgagtcaggacttttgctctcaaatctacaggtgggttaggagaaaactgacatgagctcagtcagagtttattgccaccttcctggtgccgtttcttctagccagctactgctctgggtttgaggagaaagggcctactcatttgcaatggctaagaagtgagatggtgctgccagagtgccgacccccgaatactccggggccctggcctctcctggcagcatccacccattctgattaccatgccagccccccagactatggctcatttgttcactagagggcttggtagcttggcagtttggggaaagcgggaggcacttcccaggggaagaccagagaagaccagcccccagccccacaaactgcctgtagcctgctggtgcagagggaactcttgccagtttnactaccagatttcatgagatgttggcaggcctggggggcacctcagggagagtgcgttcccaggcccttcattcatggtaaatgacacccctggggcatacagtgatgttaggtttttctctgaaacttctttgatcttttaaaaccagattcttagcatggattgagccagatctgttccttaccccntttttccaaagaggacggtgcacccacaattttaccataacatattgggatctcaggcctgaagatgacccattctttgtaaataagttggattttcctcataatatgtgtgggtttttttggtgggggaggagggggcagggctccgctctgtcannnnnnnnnnnnnnnnnnnnnnnnnnnnnnnnnnnnnnnnnnnnnnnnnnnnnnnnnnnnnnnnnnnnnnnnnnnnnnnnnnnnnnnnnnnnnnnnnnnnnnnnnnnnnnnnnnnnnnnnnnnnnnnnnnnnccgggcctttatttttatttttaaccttttgacaagacacgctttctattagagctgctttttgtctccctggttcgatttcctgatgtagaatcattgtgttgctgatttttcagttgaaaatgtttaaactgcttcctttgagaacaagtttgagttttagtaagctgtaaagctgttttatttgattcactgtgaataagacaagtacnnnnnnnnnngtgaaaacacagcacatttcaagtgtaatcccctttggaattttnccaaagtcttagtatatgtctttgtgacagaannncncngntgggacaggtaaatgaaatttcntagttgatactttacca

SEQ ID NO: 355744 - DNA, 626 bp, Homo Sapiens
actcctttctctttcataaagatctgtttggtattttgatttatgactattactataatggccatccctctctcgagatcggctacgacttcggttctgagttcggtctctcttttcactcttttgtttctcccaacagctttcttcttcttcatagtgaccaaaccccatttctctatagatatcctgtcaaaggaagggggaattacaagtgaatcagtaaaataatcattttgtgggcattttcaattaataaaacttagaaaagtctaccattagaaggctgttataacagcttaaatgtgaacactaccactaatgtcaagaatcttgtaaattacaaagcaataaaataattcagaaaaaggtttaacaacgtcattgatttgtatctactattttggctgaaacgaaggatcagcttcaaaaatatggaactgaaatagctcaactgaaatcagaacatgtctctagagcaatatgcaaaatcaaaaattctgattatgtatagtcttattcccagctccccacccttcactcccccaaaacgtggtcccattattgatctgcaatgaaactactaaaattcccataagaatcctataagaagatatcattgaaataac

SEQ ID NO: 355745 - DNA, 1759 bp, Homo Sapiens
  misc_feature (82)..(113): n is a, c, g, or t
cgcaggacgtttatcatcatatgggcgctactgttgaatcgaacgatcgagcgcagtgattcagtgagcgaggaagcggcgnnnnnnnnnnnnnnnnnnnnnnnnnnnnnnnnatcagtcgacgtgtacggacatatgcccgggaattcgggccattacggccggggtcctcccggggtttgtagcggaggaggagcgggcgccatggcggttctactggagaccactttaggcgacgtcgtcatcgacttgtacaccgaagaacggccgcgtgcctgcttgaatttcttgaaactgtgcaaaataaaatattacaattattgccttattcacaatgtacagagggattttatcatacaaactggcgatcctacagggactggccgtggaggagagtctatctttggccaactgtatggtgatcaagcaagcttttttgaggcagaaaaagtcccaagaattaagcacaagaagaaaggcacagtgtccatggtgaataatggcagtgatcaacatggatctcagtttcttatcaccacaggagaaaatctagattatcttgatggtgtccatacggtgtttggtgaggtgacagaaggcatggacataattaagaaaattaatgagacctttgttgacaaggactttgtaccatatcaggatatcaggataaatcatacggtgattttagatgatccatttgatgaccctcctgatttattaatccctgatcgatcaccagaacctacaagggaacaattagatagtggtcgaataggagcagatgaagaaattgatgatttcaaaggaagatcagctgaggaagtagaagaaataaaggcagaaaaagaggctaaaactcaggctatacttttggagatggtgggagacctacctgatgcagatattaaacctccagaaaatgtactgtttgtgtgtaaattgaacccagtgaccacagatgaggatctggaaataatattctctagatttgggccaataagaagttgtgaagttatccgagactggaagacaggagagtccctctgttacgcttttattgaatttgaaaaggaagaagattgtgagaaagcattcttcaaaatggacaatgtgcttatagatgacagaagaatacatgtggattttagccagtcggttgcaaaggttaaatggaaaggaaaaggtgggaaatacaccaagagtgatttcaaggagtatgaaaaagaacaggataaaccaccctaatttggttctgaaagataaagtaaagcccaaacaggatacaaaatacgatcttatatttagatgagcaggccgaaagactcaaaatcaagtcactcacacacaagtaaaaaacacaaggaagaaaacccatcactgtttctgaagaaaaaagaagaatgaggactacatgccaatcaaaaatactaatcaggatatctatagagaaatggggtttggtcactatgaagaagaagaaagctgttgggagaaacaaaagagtgaaaagagagaccgaactcagaaccgaagtcgtagccgatctcgagagagggatggccattatagtaatagtcataaatcaaaataccaaacagatctttatgaaagagaaaggagtaaaaagagagaccgaagcagaagtccaaagaagtccaaagataaagaaaaatctaagtatagatgaaagatgaagaggcagaattgagaggctaacatatttactcttgtctaacttaagagtgccagggaaagc

SEQ ID NO: 355746 - DNA, 2322 bp, Homo Sapiens
  misc_feature (2046)..(2046): n is a, c, g, or t
  misc_feature (2098)..(2098): n is a, c, g, or t
  misc_feature (2102)..(2102): n is a, c, g, or t
gtaccggtccggaattccgggatgcggtggacaccgagaagcccgccggcggcttgcaattccctcacccggcgcgcgcctttcgcagagggaaggagcaagagggcccctacctcatcgtgcgcgggtggggtcggcgcttgtcgcgtgtggcgcgcagtggggcgggcggcgggaggggggtggcagtggagggagcgagaggtgcaggggtgactttgttggcagcaggactagctggagagctagacctggaagcgcatccggggaggacttgcggggcagaggagggcgtgggcgtgtctggtatgggatgcagtggaaaggagggggccctcctgagtagatctgtgggtgattccttcgaggacgcctcgtcttcccgtctgcccttttatttgtcagcgagggagtccccatggtctctgttcaagttctggaaactttctctttgggtgggcttaatcacctgctactaaatcgtagaactgcccagggccctttctaatattggtcacaaacgtgaggagtatgtcagaaaacagaaaaccgctgctgggctttgtaagcaaactcactagtgggactgcacttgggaactcaggcaagactcactgccccctgtgcttggggcttttcaaagcccccaggctcttgccttgtttgcatacagtttgcaccacgtgtctggagcagctggagcccttctcagtagtggacatccgagggggagactctgacacaagctctgaggggtcaatattccaggaactcaagccacgaagtctgcagtcgcagatcggcatcctttgtcctgtatgtgatgctcaggtggacctgcccatgggtggagtgaaggctttaaccatagaccacctggccgtgaatgatgtgatgctggagagcctacgtggggaaggccagggcctggtgtgtgacctgtgcaacgacagggaagtagagaagaggtgtcagacctgcaaagccaacctctgccacttctgctgccaggctcataggcggcagaagaaaacgacttaccacaccatggtggacctaaaagacttgaaaggctacagccggattgggaagcccatcctgtgtcctgttcaccctgcagaggaactgaggctgttctgtgagttctgtgaccggcccgtgtgccaggattgtgtggtgggggagcatcgggaacacccctgtgacttcaccagcaatgtcatccacaagcatggggactctgtgtgggagctcctcaaaggtactcagccccacgtggaggccctggaggaagccctggctcagatccacataataaacagtgccctccagaagcgagtggaggcagtggcagctgatgtccggacattctcggagggctacattaaggccattgaggagcatcgggacaagctgctgaagcagctggaagacatacgggcccagaaggaaaattccctgcagctgcagaaggcccagctggaacagttactggcagacatgcggactggagtggagttcaccgagcacttgctgaccagcggctcagacttggagatcctcatcaccaagagggtggtggtagaacggctcaggaagctgaacaaagttcaatatagcacccgtcctggagtaaatgataagatacgcttctgtcctcaggagaaagcaggccagtgccgtggctatgaaatttatggtacgattaataccaaagaggttgatccagccaaatgtgtcctacaagagagaagacctccacagagcccgggagaaacagacggcctctttcacccctgctttgtaaggatgccgcaggagaaatcatgggcaggggaggagacaacgttcaagttgccgttgtccctaaagataagaaagacagcccagtcagaacaatggtccaggataacaaggatgggacatactacatttcctacacccccaaggaaactggcgtctatactgtgtgggtctgcatcaaagaacagcatgtgcagggctcgccattcactgtgatggtgaggagaaagcaccgcccacacncaggcgtgtttcactgctgcaccttctgctccagcgggggccagaaaaccgnctcntgcgcctgtggaggcaccatgccaggtgggtacctaggctgtggccatggacacaaaggccacccaggtcatccccactggtcatgctgtggaaaatttaatgagaaatctgaatgcacatggacaggtgggcagagcgcaccgaggagtctacttaggactgtggctctctgatgggtttgtgctcagccttttaaagctgcaggcagcaccacttgag

SEQ ID NO: 355747 - DNA, 2092 bp, Homo Sapiens
  misc_feature (1860)..(1980): n is a, c, g, or t
  misc_feature (1982)..(2015): n is a, c, g, or t
  misc_feature (2018)..(2018): n is a, c, g, or t
  misc_feature (2024)..(2038): n is a, c, g, or t
ggatccgggccgggcgggaagtcgggtcccgaggctccggctcggcagaccgggcggaaagcagccgagcggccatggagctgtgcgggctggggctgccccggccgcccatgctgctggcgctgctgttggcgacactgctggcggcgatgttggcgctgctgactcaggtggcgctggtggtgcaggtggcggaggcggctcgggccccgagcgtctcggccaagccggggccggcgctgtggcccctgccgctctcggtgaagatgaccccgaacctgctgcatctcgccccggagaacttctacatcagccacagccccaattccacggcgggcccctcctgcaccctgctggaggaagcgtttcgacgatatcatggctatatttttggtttctacaagtggcatcatgaacctgctgaattccaggctaaaacccaggttcagcaacttcttgtctcaatcacccttcagtcagagtgtgatgctttccccaacatatcttcagatgagtcttatactttacttgtgaaagaaccagtggctgtccttaaggccaacagagtttggggagcattacgaggtttagagacctttagccagttagtttatcaagattcttatggaactttcaccatcaatgaatccaccattattgattctccaaggttttctcacagaggaattttggttgatacatccagacattatctgccagttaagattattcttaaaactctggatgccatggcttttaataagtttaatgttcttcactggcacatagttgatgaccagtctttcccatatcagagcatcacttttcctgagttaagcaataaaggaagctattctttgtctcatgtttatacaccaaatgatgtccgtatggtgattgaatatgccagattacgaggaattcgagtcctgccagaatttgatacccctgggcatacactatcttggggaaaaggtcagaaagacctcctgactccatgttacagtagacaaaacaagttggactcttttggacctataaaccctactctgaatacaacatacagcttccttactacatttttcaaagaaattagtgaggtgtttccagatcaattcattcatttgggaggagatgaagtggaatttaaatgttgggaatcaaatccaaaaattcaagatttcatgaggcaaaaaggctttggcacagattttaagaaactagaatctttctacattcaaaaggttttggatattattgcaaccataaacaagggatccattgtctggcaggaggtttttgatgataaagcaaagcttgcgccgggcacaatagttgaagtatggaaagacagcgcatatcctgaggaactcagtagagtcacagcatctggcttccctgtaatcctttctgctccttggtacttagatttgattagctatggacaagattggaggaaatactataaagtggaacctcttgattttggcggtactcagaaacagaaacaacttttcattggtggagaagcttgtctatggggagaatatgtggatgcaactaacctcactccaagattatggcctcgggcaagtgctgttggtgagagactctggagttccaaagatgtcagagatatggatgacgcctatgacagactgacaaggcaccgctgcaggatggtcgaacgtggaatagctgcacaacctctttatgctggatattgtaaccatgagaacatgtaaaaaatggaggggaaaaaggccacagcaatctgtactacaatcaactttattttgaaatcatgtaaaataagatattagactgttttttgaataaaatatttttattgattgaaannnnnnnnnnnnnnnnnnnnnnnnnnnnnnnnnnnnnnnnnnnnnnnnnnnnnnnnnnnnnnnnnnnnnnnnnnnnnnnnnnnnnnnnnnnnnnnnnnnnnnnnnnnnnnnnnnnnnnnnngnnnnnnnnnnnnnnnnnnnnnnnnnnnnnnnnnnttngcccgnnnnnnnnnnnnnnnaaaaaattttttcaccccccctcttggtgggggcgggggcccaccccaagaaag

SEQ ID NO: 355748 - DNA, 1055 bp, Homo Sapiens
  misc_feature (13)..(13): n is a, c, g, or t
  misc_feature (36)..(36): n is a, c, g, or t
  misc_feature (44)..(44): n is a, c, g, or t
  misc_feature (51)..(51): n is a, c, g, or t
  misc_feature (59)..(59): n is a, c, g, or t
  misc_feature (73)..(73): n is a, c, g, or t
  misc_feature (78)..(78): n is a, c, g, or t
  misc_feature (88)..(88): n is a, c, g, or t
  misc_feature (94)..(94): n is a, c, g, or t
  misc_feature (103)..(103): n is a, c, g, or t
  misc_feature (107)..(107): n is a, c, g, or t
  misc_feature (109)..(109): n is a, c, g, or t
  misc_feature (117)..(117): n is a, c, g, or t
  misc_feature (123)..(123): n is a, c, g, or t
  misc_feature (125)..(125): n is a, c, g, or t
  misc_feature (127)..(127): n is a, c, g, or t
  misc_feature (138)..(138): n is a, c, g, or t
  misc_feature (149)..(149): n is a, c, g, or t
tcctccagcgaancttaccctttccaaaaagccagnttggcagngcttgcngttgcagnctggactgcttctnacgtngatggtgggnaggcgntagtgtggncctngnactggtgngctctnanangcacagttgtntcagaacaganacttgtgtccaggggcactcttccccgaagtcggttgcagggacattgttgataggtgcaaggcttgtgctccgtgcggagctggctcagcgccccaactcgaaggcgcccggaaaggccgtgcagcttcccagaccggctccggctcatggtgccccgacttgcagtggcagtgccacgggccccagggcatcagcaccagccgcagatcctcaggagatggcatggctgtgggtgagggtgacggccaccggctcggggtagacccaggtgtggaccactggctcaggtggcctgcgagcctggcaggtcctcagtagacctcccgggggagcgcggcaggcttgaagtcagcctgatttcaggctcctgactattggctataaacctcgtgctggaactccccgctgtattgggagtcgcactgggaagctctctgctggtgctatcctttccggcattaatcacaaccccctcttctgaagacccatcctcctcgttaatggcggacgaccggctaaagccggtggacaccgtggcggccaagagctcggcagccgctggtccagccaggcggtcggcgtcggccatggcatcattctcgtcctctaggattatccttgtcttccggggaagaccagtccgggcggtgctccggtagctgcgggtcatggggcccccaaagcgtaaactgacccgctgcatttcggtcggagtctgggtcaggccttgggcccccgccgcccggggacccagattcagcagcaggacccacagcagcgcgccggcggcggggaccatggggctgggctcttggggttgggagggtggccagtgaggcaagccctgcctcctaccttcgctccctcccttccgctgtagacccaccgggtcgtttgaaccgag

SEQ ID NO: 355749 - DNA, 2105 bp, Homo Sapiens
  misc_feature (423)..(423): n is a, c, g, or t
  misc_feature (599)..(599): n is a, c, g, or t
  misc_feature (2104)..(2104): n is a, c, g, or t
gattctagatgcggttgtcactgaaggtggggagaattttagcgttggacagagacagctattttgccttgccagggcccttgtccgcaaaagcagcattcttattatggatgaggcaacagcttccattgacatggccacagagaatattttgcaaaaagtagtaatgacagcctttgcagaccggaccgtggtgacaatagctcatcgagtacacactattctgacggcagacctggttattgtgatgaagcgaggaaatattttagaatatgacactccagaaagcctcttggctcaggaaaatggagtatttgcttcttttgttcgcgcagacatgtgaaggagtgtcttaaaacaatacatgtatttaaaataatgcagtcataacctaattaatggatcatcagcttgacctctgtnaagtggcatcttaaaacttttacagatttttgcacaaaaagtggacatttatttttcctgtttttaaaacagtttttcaagatattattgcttaatatgttcattattgatgtttttatagtgatccagccactctagctttaagaatagctaggttgtattaaaacatgtcagcnactttaagtgataaatcaatagctaaagttttctcctaactttaagtctggtaaatatctctcaggaatggaagtgtcaatgagtagtcagtattactatactcttgtttgtaagaatatattttccttattgttggagtctccagaggttattggaaggaataaaaaaggacatgttttctaacgaaactctcaaattcattatctacttcatgagaatttatttgtattcattaacattagtaatacctatttttcttaagagccttcttttttcccttttgtttcttgtcaccaagaagttatcacacttatacttattctataaggccaaagccttatctagaaagatcatgaagagtttggatatttttaaaactatactcgaattttcattttttcctgtcctgtaaagagagaattcttaagatatcaggcataatgtatgtaccttttccagactgaagttcaaagaatgattaggttcaatctttcagtggcaggccagctaaactttctatagtttaatgattagctgtggttatgatcttgagccctaacatgccacattactcaagatttacacaggcaagtgacttcatttggcactgctaataatggcaggtgaacattcctctcaggtgtgagatatttcctatgaaacagtccactggcaggctggagatatcttacactttgaagttatatatatataaaacaagtgtctatttctagctgaaagagtttacctcttctagacatttatgcccaatggtgtcacacatgatcatttgctcctgctctaattttaatgtgcatacaaaaaatataccaaaaatgttattgtaattttaatgagcatgtaaagagtgtatcaaaaattgatgggatattagtgttaggttttgcttaaatgaaaattaataaattcaaaaatactaaaagtcaccttctttgtcacgttagcaaccagtttctactattctgtgcccatccagtgtcaatatcattgatttctttttcatatgaagatccacatgcattgtaagattgtgaagatatataaaattgatgaattaagagaaattatgccactttcctatagtttctgtgttctgtttattgtatggtgtattcactcttggaaaatatgtaatagttgtgtatccagaatatgtgtcttcacctgaatatttaatctttatatttacaaaaaaataagttccacaagatggacaaaaatggtccatgatatttagcctaaattgtaaccttttgttgtgtatataaaacttccttggaagaaaataaccttattgttttcctaaagctaaacagaataggattggtactcattaattatgtctggcaaatatttttctaaaaattcaaccactctcctaaaatggtgtttaaatattttgtaaggcagaatatgcatattgcctgttagcaagtaataattcattctcatagagaaatgggtttttacccatggaagtaanc

SEQ ID NO: 355750 - DNA, 2370 bp, Homo Sapiens
  misc_feature (297)..(297): n is a, c, g, or t
  misc_feature (1990)..(1990): n is a, c, g, or t
  misc_feature (2014)..(2014): n is a, c, g, or t
  misc_feature (2285)..(2285): n is a, c, g, or t
  misc_feature (2302)..(2303): n is a, c, g, or t
  misc_feature (2305)..(2306): n is a, c, g, or t
  misc_feature (2310)..(2310): n is a, c, g, or t
  misc_feature (2332)..(2332): n is a, c, g, or t
caactggcaaggaatccagttagccatcacgctgcccagctttctcttcctcctttattactgggtggtccctgagtctccccgttggctgattactcggaagaaaggagataaagcattacagatcctgagacgcattgctaagtgcaatgggaaatacctctcatcaaattactcagagatcactgttacagatgaggaagttagttatccatcctttttagatctggtgagaactccccaaatgaggaaatgcacacttattcttatgtttgcttggttcacaagcgcagtggntgtatcaaggacttgtcatgcgcctgggaattatagggggcaacctctatatagactttttcatctcgggcgtggtggaactgccaggagctctcttgatcttactaaccattgagcgccttggacgacgcctcccctttgcagcaagcaatatagtggcaggggtggcatgccttgtcactgcgttcttaccagaaggaatagcatggttgaggaccacagtggctacattgggaagactagggataaccatggcctttgaaattgtttatttggtaaattcagaattgtacccaacaacattacgaaatttcggagtttcgctctgttcaggtctgtgtgattttgggggaatcatagccccatttctgctctttcggctagcagcgtgtggctagaactacctctgatcatctttggtatcctggcatccatctgtggtggccttgtgatgcttttgcctgaaaccaagggtattgccttgccagagacagtggatgatgtagaaaaacttggcagtccacattcctgtaaatgtggcaggaataagaaaaccccagtttcccgctctcacctttgagggccccgacaaagacagaaagaaggagctatccaggagctgatcctccttgcaaagctgtgtcttgcagagatgcacgtgtgcatttcagctacatcatgccgcgctgttgtaatactgtataaagacctcaatctatccagagtatttttatataatgttggatgagttaggatttgtaatgctgttgaagtttctgggaacacataatatgtagccagtttaacaaagaagctgtcaggtgcacagcccttcctgggtttttttcttgtgttccctgtggtctctgacccattaggctaaagagagacaagagaagcccccaacctgattctcatgacagctccatcaagaatgtgggatgtgccgaccaaggatttgagaaagttgtacagaaatgtgttcatcaaatctggtcaagggactaagctcctagctgaccattcattctgaagattgcatggaggatgaacatctgggaatcctgttaatgagaaggctaaatcacaggcacctgggccaaagggtgtgagcattcatgttctctgctcaccttggtttccacacaccttcgcaatgtgaacaggtcaggagtccctcccgtccacctcctctgtaacagctggggttccaggcatggtttaggccctgttccagcaataagaaccaatctgctgtacaatctgaggacttggctctgttatttacaaaatgatgctgtggttctgagattatttgggacatttttggctctcctttagtggacacctagagccacagattcccttctttactaaacaaatcccatggattctgatttctgggtcttaggattttaaaagtgaagggaaatttttcttatatttgtgagttcagttccgatggtgcccgtggtcaaaagcgaaaaacatggacaattcctattcattcttagcactttgacatgtcttggggaaaagctaacattttaatttaaaagaaagatcaattatatccatgcttaacaggatcagcaggagctttataaatgacttaacagagactaataagggatttgatctttcttttttttgttatcgaggcttttgaaatgtggaacttgtgtgttctgcnttatatgttatattcaatatcttntcagatgcagtctatattttatgctgagttttaaaaatgaaatactttatgcaaacaggcaaaattggtaccaaagggaaacattaaccatgaggaagagcatttttctaaggagaacaggtgacaataaacacatgtgcgctaatcgtaaaatgagcatcttagtctttaaaacacatcagaattgaatacgaataatctatttgtcgatgaaataaacacaactctttgaggatttgagactacattcacccttaattcacagtcactngcagttttgcatataanncnncatntctctgctgtaagatgactgtngcattgttgaattgtattttgagtggatatttttgttt

SEQ ID NO: 355751 - DNA, 347 bp, Homo Sapiens
aacatttggatatgaccagtggttataaagcaggtgtcggtccggaacttccgggatatcgtcgacccacgcgtcgctggggtcctcccggagtcctgggagaaaggcggcggcgtggccgctcccgcacgccaggcccgggctccaccgtgggtctcagacgccctgcggcaccggcaccgtctgctttagcatgggacccccatctgaggggtggcctggccttcggggtccccacgctcctttgcgaaggcactgtgggtgccatcatggtctccgggacctgggccagcgggaacgtgggggcactgggtgtgctgatataaagtcggcattactcaagctgc

SEQ ID NO: 355752 - DNA, 2461 bp, Homo Sapiens
  misc_feature (1837)..(1899): n is a, c, g, or t
gtacgaaagagaaaccggagggcgccggggactgggccggggtctgcagggctcagctgagcccatgagctcccagagctaacccctgaacacccaggcgggcaaagggctgatgtcggtagtccccatcctggaggggcaggctctgcgcatctgctcctggcatggcgctgcggcacctcgccctcctggctggccttctcgtgggagtcgccagcaagtccatggagaacacggcccagctgcccgagtgctgtgtggatgtggtgggcgtcaacgccagctgcccaggcgcaagtctgtgtggtccaggctgttacaggcgctggaacgcggacgggagcgccagctgcgtccgctgtgggaacggaaccctcccagcctacaacggctccgagtgtagaagctttgctggcccgggtgcgccattccccatgaacagaagctcagggacccccgggcggccacatcctggggctccgcgcgtggccgcctccctcttcctgggcacgttcttcattagctccggcctcatcctctccgtagctgggttcttctacctcaagcgctccagtaaactccccagggcctgctacagaagaaacaaagctccggccctgcagcctggcgaagccgctgcaatgatccccccgccacagtcctcagtacggaagccgcgctacgtcaggcgggagcggcccctggacagggccacggatcccgctgccttcccgggggaggcccgtatcagcaatgtctgacctggaggccgagaccacgccacgcacttggcggcagggacccggaggccgaccccttggcgggaaccagcacaaagtgttggcatcgcccggcgcccgggacagtcctgggcacagcctcggctctgggtccctccgcctcccagcgacggacgccaaagggtcccgggccgcctgaggctcctccccaccacagccatctcgtttatcggaccaggagcaggcatccatgagacctcagagcttcagatcgaggccttggggggtccgggcccccccaggaaacacggtgaggccccagcgcctgcagccaaagctggcacgatctatggggcaggtgccgctctgcctagaaaagccaggggctctgctgccgtgccctccagagcccacagcgggcaggactcctccagcaccaccacacccagtggcccgagacccctctgagaacagtgaggctggtcctcgtgccgttccagccggtgcccggccagtggggaggacacagcctaggaaccagctgcctgagaccagggtgcctctgggctgtcctcccgcgtggcggagaccccaagcacgcagccacccatttccggagctgcaggatagagcttcctcttgatctctgtttttaagcagaaattcattgtgcagaaaagtcctccagagctctgtggccccgctcggatccgctggacccccatgcctggctgatccctgcccacgtggggcaggcccacatctaacccccacaagtcactgcctcactgcacctgccaaggctgccctggcgctgagtcctggggtccctcccggagttcctgggagaaaggcgccgtcgtggccgcctcccgcacgccaggcccgggctccaccgtgggtctcagacgccctgcggcaccggcaccgtctgctttagcatgggacccccatctgaggggtggcctggccttcggggtccccacgctcctttgcgaagtccactgtgggtgccatcatggtctccgggacctgggccagcgggaacgtgggggcactgggtgtgctgatataaagtcggcattactcaagctgcnnnnnnnnnnnnnnnnnnnnnnnnnnnnnnnnnnnnnnnnnnnnnnnnnnnnnnnnnnnnnnncaaagaggaggggcgcgcaacaaaagaagaccaccccacgaagcccaccaacaaggagacaccccagaagatctgaacagcaagggcagcacaccaattagaagtggcagtaatgatataaaacaaaagataacacgagagagccgaataagacattaacaaggcataagcaatcagatggaagcacacaaccgtgacatagaggaacgctcatgtgttaacaacaaaacacgacataaaaatgagctggggaaagcaccaaaatatgtgacagcacaacaacactgcccaaagaaccggaaaaaggcaataataagggccacgcacggagacataggaaagccaaaaaacaaaatttaacagagcctaggagaattacacgtgagaggccaaagaacacacgaagcgcgcagaaaaattgcgagcacgcaaggatataagacgaaccaaaaacctgggccccaaaacaatagcgactaaactaacaatctacaaatagaacaatcatttaataaaaaccgagggacgaaaataaacaagaaaaaaacaaatgggaaagaga

SEQ ID NO: 355753 - DNA, 1598 bp, Homo Sapiens
  misc_feature (619)..(619): n is a, c, g, or t
  misc_feature (1245)..(1245): n is a, c, g, or t
atggcggctggccgggcccaggtcccttcctccgaacaagcctggcttgaggatgctcaggtcttcatccaaatagaccctgtgtacagctgtcaaggagcctaatgtacagttgactccattggtaactcgatagtgtgaagactgtctggttgtcccagggaaggaaccaaggttctacactgcccctcagctatagcttcgtctcagtacaggacctcaagactcaccagcgtctcccatgctgcagccacctgtcgtggagcagtagtgcataccaggcctgggcccaagaggctggaccaaatgggaaccccctgccccgagagcagctgttacttttagggacactaacagacctatcggcagacttggaacaagagtgcaggaacggaagcctctatgtgagagataacactggcgtcctgagctgtgcagctcatagacctggaccttacttggtcgggccatctttttctgttcccccgttggagttacctccctcctgccaggtggaattcctcaggggaagggcacttggagctgtgggatgcccctgtgccagtgtttcctttgaccatcagtcctggccccgtcacgcctatccctgtcctctacncagagagtgcttcctgcctgctcaggctcagaaacaagctcagaggtgtgcagcgaaacctggctgggagtctagttcgattgagtgctctggtgaaaagtaaacagaaagcttacttcatcctgtctcttggtagatcacacccagctgtcacccacgtgtccatcatcgtgcaggtccctgcccagctggtgtggcacagagcccttcggcctggtacagcctatgtgctgacagaactgcgagtgtccaagatccgtggtcagcgccagcatgtttggatgaccagtcagtcctcccgtctgttgctgctgaaaccagaatgtgtgcaggagctggaactggagctggaaggacccctcttagaggctgaccccaagccactccccatgcccagcaactcggaggacaagaaggatccagaaagtcttgtccggtattctagactcctatcctattcgggagcagtcactggcgtgttgaatgagcccgctggcctctatgagctggatgggcagctggggctctgccttgcctaccagcagttccgtggccttaggcgggtgatgcgacctggagtgtgtctgcagctccaggatgttcacctgctccagtcagtgggaggngggacaagaaggccagtgctcgccccctgcctccgtggcgccggtctgcttcaaagcttttctcgtcagaagcctgggcttactcatcccgtcaagcctacggggccctccctgtacgagcagcttgttgtgggaacggtcagttaggaccttcccctctaactgtgggccatccaggcccctggagggagctggccttgaggctgtgtccccaatgttgctggaacaccaccagttccttgaacatttcttctccttggggaccccaccctggaactggaaccccctgggttcctccccttggatttttttgttctcgccggggactccttgttttgaagaggaaccaatgg

SEQ ID NO: 355754 - DNA, 1458 bp, Homo Sapiens
  misc_feature (999)..(1251): n is a, c, g, or t
  misc_feature (1281)..(1281): n is a, c, g, or t
  misc_feature (1388)..(1404): n is a, c, g, or t
  misc_feature (1409)..(1409): n is a, c, g, or t
  misc_feature (1412)..(1412): n is a, c, g, or t
ggggtggcttcaggaagaggagggcaaggtgtctggctgcgcgtttggctgcaatgagctcggcctcggggctccgcagggggcacccggcaggtggggaagaaaacatgacagaaacagatgccttctataaaagagaaatgtttgatccggcagaaaagtacaaaatggaccacaggaggagaggaattgctttaatcttcaatcatgagaggttcttttggcacttaacactgccagaaaggcggggcacctgcgcagatagagacaatcttacccgcaggttttcagatctaggatttgaagtgaaatgctttaatgatcttaaagcagaagaactactgctcaaaattcatgaggtgtcaactgttagccacgcagatgccgattgctttgtgtgtgtcttcctgagccatggcgaaggcaatcacatttatgcatatgatgctaaaatcgaaattcagacattaactggcttgttcaaaggagacaagtgtcacagcctggttggaaaacccaagatatttatcattcaggcatgtcggggaaaccagcacgatgtgccagtcattcctttggatgtagtagataatcagacagagaagttggacaccaacataactgaggtggatgcagcctccgtttacacgctgcctgctggagctgacttcctcatgtgttactctgttgcagaaggatattattctcaccgggaaactgtgaacggctcatggtacattcaagatttgtgtgagatgttgggaaaatatggctcctccttagagttcacagaactcctcacactggtgaacaggaaagtttctcagcgccgagtggacttttgcaaagacccaagtgcaattggaaagaagcaggttccctgttttgcctcaatgctaactaaaaagctgcatttctttccaaaatctaattaattaatagaggctatctaattttacactctgtattgaaaatggctttctcagccaggcgtggtcnnnnnnnnnnnnnnnnnnnnnnnnnnnnnnnnnnnnnnnnnnnnnnnnnnnnnnnnnnnnnnnnnnnnnnnnnnnnnnnnnnnnnnnnnnnnnnnnnnnnnnnnnnnnnnnnnnnnnnnnnnnnnnnnnnnnnnnnnnnnnnnnnnnnnnnnnnnnnnnnnnnnnnnnnnnnnnnnnnnnnnnnnnnnnnnnnnnnnnnnnnnnnnnnnnnnnnnnnnnnnnnnnnnnnnnnnnnnnnnnnnnnnnnnnnnnnacgagtgaaactccgtctcaaaaaaaaganaatgtctttctcttccttttatataaatatcgttagggtgaagcattatggtccaatgattcaaatgttttaaagtttaatgcctcgcagagaagagaactgccctnnnnnnnnnnnnnnnnnaacangcnggccatggtgaaagggtttgatatggagaaacaaaatcctcaggaa

SEQ ID NO: 355755 - DNA, 1533 bp, Homo Sapiens
  misc_feature (1268)..(1298): n is a, c, g, or t
aaaataaatttcccaaaaatttcccagtgaagagctgggttggctaatgttttcctccttcccagcccccactaggaactagtatccggaatttgtcccctggaaagaaatcctgtactgatcccccataagttctgcttccggcatagtttacgaaaagctgaagcactgctggtgagtggtctgggcaatttttcccttggaaccaggggctggggtctggtagatcgagctagttctgctttggcacgatactgctgaagccgggcattgatccttgcctgtgcttctggtgatagttgcttctctctctcttgcaaagacatttaacaataggactgtagagccaagtagttttttctcttccactttctgtctaacctatctgcatgttgcttacaataagcaaagaatggatctgctatatcctcttccgccgctgcctctgaaagcagaccttccttttgagcacaggtcacatggaaataggctctgcacatccctgcatcacagctaatgcaaaccccagttctagcaaagcgagggtcttcacaaaagctacactccttggcaccatatttggaatagttcatttccgttagtgttactggtcgtaatttgtcaatatctccaaaggctactccaggaacatacagggcacaaacaatatgaacccatcttccagcatctgtctccttgaaaattccatcctgattaggacacagttcacagctaggagaaacaccacatttacaggcatcacaaaaccaaggttcagtggagttttcagaagctgaactcataatagagtcactctctccatcaactccataacaaccttcatggacctgtaatgccacaattgtcaccatctgaatttatttcagtcagcgtcactcactagtatctcccagacaaacacagcaaatcagaatatgggccagtttttgagagctccagttttgactcttctcaagaatcagcgagtcctgaggcatctccaactgtagaaatcactgtcatctgaactatcataatcaagagcttccagcagagaagctggtcctaaagcttcacctgcctcctctttggagctgcgatccataaggaatccgtgaggtggtcgtttggagaagacttagggagaggcttgcaggagcccaggtcagcgtccgagctcggggactggtggccgcgaagacaagtccgaaagatgctattgaaaaccggcgcgcagccagccggacaggggcgctcccaagagtagnnnnnnnnnnnnnnnnnnnnnnnnnnnnnnnggcctcgcctggccctggccgctcgagccccttcccacagcgctccctggccggagaagacctccggcccaggcagcgcagtcaacccggcggccccggggagttaatttctcccgttaaaactagaagaaccaaaattaaacgcattaaggtgataactattattagcctggaccagaagcatacgataagaccaagtaacttgcacatgcagcgagggcggctgcctcagaca

SEQ ID NO: 355756 - DNA, 667 bp, Homo Sapiens
  misc_feature (186)..(186): n is a, c, g, or t
  misc_feature (439)..(439): n is a, c, g, or t
  misc_feature (448)..(448): n is a, c, g, or t
  misc_feature (452)..(465): n is a, c, g, or t
  misc_feature (584)..(617): n is a, c, g, or t
gatgatagtacttcttcctctgcagaatttttaagttgttcttcttttactttaatatcttcattcagttcttcttctaaaatattttcttcagaatcactacaggaaccttctccactgtcccttgaagcatcttcacttccattaccactcccttcaagaatctgaggcatctccaactttaanaatcactgtcatctgaactatcataatcaagagcttccagcagagaagcggccaaaggcttcacctgcctcctcttggagctgcgatccataaggaatccgtgaggtggtcgtttggagaagacttagggagaggctgcaggagcccaggcagcgccgaggtcggggactggggccgcgaagacaagtccgaaagatgctatttaaaaccggcgcgcagccagccggacaggggcgctcccaagagtagcccngcggtcccntaannnnnnnnnnnnnnggcctcgcctggccctggccgctcgagccccttcccacagcgctccctggccggagaagacctccggcccaggcagcgcagtcaacccggcggccccggggagttaatttctcccgttnnnnnnnnnnnnnnnnnnnnnnnnnnnnnnnnnnctttattagcctggaccagaagcaacgaaagaccagaaattgcacagcgc

SEQ ID NO: 355757 - DNA, 1335 bp, Homo Sapiens
  misc_feature (351)..(351): n is a, c, g, or t
  misc_feature (381)..(381): n is a, c, g, or t
  misc_feature (395)..(395): n is a, c, g, or t
ctctgagcccttctcacttccccctcaggacggccaccccttggggctgggtgcagagcccccatccagccgcggtgagggtggctgtcatccggcgggtcctcaccctggtccctaggcttgccgcagctgatgggtctcatagtcctctgggatggtgtcattgcagcggtaacgcaggttggcccagatgatgttctcctgggagaagcagaagacccccaggcggccaccccgcatggttgtgtccaagaccacgttgctgtcggccaccagctcagggccctcatagaatcgcaccctgatgtagcccacttggggccggtgctgcaggaaccaacgataggactncttgtccttccaacccacgtttcgcgggtncttccacagcagcngcacctgggactctgtgtctcctgtatgcccacagagcgttccggcagctgttccccgggggcctgtggaagacttcacagccctggagttggatgccaggcttcggccacagcacggaaggggtttcgcctgccaatacgtttgctccatctgcttccacatgaccacgtagaagctggagctgtcctggtagccaaagatgaagcccgcatagtcgtcatccgtgaccgtgttcacatggaacgtgccctcgaagtccacgccatttaaggcagtgtaacccacagccaggcctgggtcgctgttcattgtctgcacgatctcccttccctggttgagcaccacccagttggggtcaatctgcgcgtcaccctccgggtccagcacgactgtctggaaggccctgaagtcggtgagcgtgacttcagcgttctccggacacacgtcgatcttgtctaccaccttgtctgcatcaaagtcgtcctggcacacgtcgcccacgccgtccctgtccgcgtcctcctggccggggttaggcaccaggcggcagttgtcccgactgtcagggactccgtaattgtcgtcgtcgtcgtcgcaggcatcaccctggccaacgtggtctgagtcctcctgggcactgttaggcaccgtgggacagttgtcccgagagtcctgatgtccgtctccatcctggtcttgatcgctgtcacaagcatctcccacaaagtcgtggtccaaatccgcctgatccgggttgctcttctggggacagttgtaaaaggcatcccctataccatcgccatcactgtccttctggtctgagttgggtaccctagggcagatagtcggcctggttgcggatccggtcgccgtcagatgtcgtcgtcgcacgcatcgccccggccgtcctggtctgtgtccttttggtcgtcgttcttc

SEQ ID NO: 355758 - DNA, 1922 bp, Homo Sapiens
  misc_feature (287)..(311): n is a, c, g, or t
aaggagcgaggcctgggtggcgaattcggcacgaggggggcgccccgggccgcaccaaccccgcccgcgcctccctgcagccaaggcggacaaggagagcttcgagaaggcgtaccaggtgggcgccgtgctgggtagcggcggcttcggcacggtctacgcgggtagccgcatcgccgacgggctcccggtggctgtgaagcacgtggtgaaggagcgggtgaccgagtggggcagcctgggcggcgcgaccgtgcccctggaggtggtgctgctgcgcaaggtgnnnnnnnnnnnnnnnnnnnnnnnnntcatccgcctgctggactggttcgagcggcccgacggcttcctgctggtgctggagcggcccgagccggcgcaggacctcttcgactttatcacggagcgcggcgccctggacgagccgctggcgcgccgcttcttcgcgcaggtgctggccgccgtgcgccactgccacagctgcggggtcgtgcaccgcgacattaaggacgaaaatctgcttgtggacctgcgctccggagagctcaagctcatcgacttcggttcgggtgcgctgctcaaggacacggtctacaccgacttcgacggcacccgagtgtacagccccccggagtggatccgctaccaccgctaccacgggcgctcggccaccgtgtggtcgctgggcgtgcttctctacgatatggtgtgtggggacatccccttcgagcaggacgaggagatcctccgaggccgcctgctcttccggaggagggtctctccagagtgccagcagctgatccggtggtgcctgtccctgcggccctcagagcggccgtcgctggatcagattgcggcccatccctggatgctgggggctgacgggggcgccccggagagctgtgacctgcggctgtgcaccctcgaccctgatgacgtggccagcaccacgtccagcagcgagagcttgtgaggagctgcacctgactgggagctaggggaccacctgccttggccagacctgggacgcccccagaccctgactttttcctgcgtgggccgtctcctcctgcggaagcagtgacctctgacccctggtgaccttcgctttgagtgccttttgaacgctggtcccgcgggacttggttttctcaagctctgtctgtccaaagacgctccggtcgaggtcccgcctgccctgggtggatacttgaaccccagacgcccctctgtgctgctgtgtccggaggcggccttcccatctgcctgcccacccggagctctttccgccggcgcagggtcccaagcccacctcccgccctcagtcctgcggtgtgcgtctgggcacgtcctgcacacacaatgcaagtcctggcctccgcgcccgcccgcccacgcgagccgtacccgccgccaactctgttatttatggtgtgaccccctggaggtgccctcggcccaccggggctatttattgtttaatttatttgttgaggttatttcctctgagcagtctgcctctcccaagccccaggggacagtggggaggcaggggagggggtggctgtggtccagggaccccaggccctgattcctgtgcctggcgtctgtcctggccccgcctgtcagaagatgaacatgtatagtggctaacttaaggggagtgggtgaccctgacacttccaggcactgtgcccagggtttgggttttaaattattgactttgtacagtctgcttgtgggctctgaaagctggggtggggccagagcctgagcgtttaatttattcagtacctgtgtttgtgtgaatgcggtgtgtgcaggcatcgcagatgggggttctttcagttcaaaagtgagatgtctggagatcatatttttttatacaggtatttcaattaaaatgtttttgtacatag

SEQ ID NO: 355759 - DNA, 1549 bp, Homo Sapiens
tcgacaaatattccttcactcccaaagcagcgaggcctgggtggcgaattccgcacgaggggggcgccccgggccgcaccaaccccgcccgcgcctccctgcagccaaggcggacaaggagagcttcgagaaggcgtaccacggtgggcgccgtgctgggtagcggcggcttcggcacggtctacgcgggtagccgcatcgccgacgggctcccggtggctgtgaagcacgtggtgaaggagcgggtgaccgagtggggcagcctgggcggcgcgaccgtgcccctggaggtggtgctgctgcgcaaggtgggcgcggcgggcggcgcgcgcggcgtcatccgcctgctggactggcaccaccggcccgacggattcatggtttttgttggcggccacccatcgccgtcgggagagcccagcccgggcgtctcggcacgcgaagcctacgacgtcgttctatgacggccccgcaggcctgcccgtctgccgcggtgggcgcgctcgcctccgttgccggcgcggggcgggcacagatgcacactccccccccgcgcagacgaaaccaggccgctgaaactcggggaagagccggtggggcggtggggcgcgacgctgagtccgcggtctgagccccccgctgcaccccccctaggtctggcgccctctgtccccgttgtgacggaacgcttgggcccaaggagaggttgcgcgaaatgtgcgaggttgggaatcaagaacaaaccttcgccgtgttggtattcgctgcgacgcgccaccgattttaacacgcccgccggcgggtggggacctgatcctcgcgcggcggtgatgtctcaatccaggccggtgcggccgtatccggtaagcgacttcactcagagattattcgtctacgtggctgccgcggcggcggctggagcccgggcagccaccccgcacctgctattctctcacgcgagcgtatcggacagtttcataaatcgtacgatgagcgcacttcgtcacagaacactcatattctagcatgtggaggggacggagtgggctaggagaacctatacgcggaaggagtgaggaaacgacctgtgggacagagggtaagagctgtgaaaaagtatccagtatatgtaacgaagtgagaaggcgtaatcaacaccgagaaatgcaggtgccatgatctcactgaccagaccaagtgtaaaaccgcgtcctccatgaaagacgttatgctaggtgaaagtagtttagagaggaacacctggcgcgcagtcccggcacccgtatgcgccccggaccgcgactccctcacagtgaagcagggcacctactctaacccctctatgagatcccgtttgctaggatagcccctcaactgttaagccgaccctaacccctttcccaagactgttctttttaatgattaacaccttaacggaaagtaggggttaatcactcgattgcgccaaaccgtcgcactttgatatgtctattggaaagggagggtccgcgggttgagccgtcccgggggcccggggtcgttaacctcc

SEQ ID NO: 355760 - DNA, 1370 bp, Homo Sapiens
  misc_feature (523)..(535): n is a, c, g, or t
aaacaaagcaaataacaaataaataccacagctaaatcagttttcaggcaatcaaacgatttcagacaacagtgtcctaaaacaataaccttattcatcattaaggcacacattctcatttcctgttaagcaccagaacacgtcagcattcatcttttggcagtccagttccaaggtgccattaaaaggtgttttcaccaatagccagagctctgcaggaacaatcattcacaaatatttacacttttcaattgttttgaactgtatttacatacatcatgttttatcaggtacccaccaactttatactttctgccttcagatagagtttctaacattttctagtttgtcagttttaaaatataaaattcttttatgtttttaaaccgtcaaccaagaagtcaagaccactgtcccctgctgagttaggcaatcacttaaaactccaaagaactccaggctgaggagttcttttggtgctgaacagtggtctgacaacaggtgctagaattaaggtgtgggnnnnnnnnnnnnncagccaggaaggacaagatctccaatttgtgaagcttatgatacagctgaaaccagtctgatcaattttatgctacctgtcaccaagaaattaactctaaatttttgaatgcttgttggcatctgtcaaatcaatactgaaaggatgcatttcggcttttaaccagtttggttctgatcattgcaacctctgtgcttttataattcaaagaacaaggatagctttcttcggtatcttttaatataagaacactgaattttggcttgaaatattgtgactaaattgcacaatctctggctattagcactgttcactacattaacatgcaagagagagagaagccttgttacatttcctgctatttaacaaactgtccaattaggtcagcaagcctgttagggccttcactgctacgcccctggccccaaaacagagagcaagacagttgtccagagaatttagatatgagttaagagctgccagatttattttaaggcatgtagagaatctcataatctatgtgaaagtcacttgccaaaaaggttttggttatgaaagtgaatgttatatatttaatattaagtgaacctcccgtgccttttaaaaaataccaacattatgaaatttaaaagcttaaatatatttgcctagttgataaagaggctgtggaacaactgaaggagaactttcagaccctaaaacagttatattacttagatgttaaaattttctagtgggctgtgcaattgctgggttgtccccccaaacatattttaatatgttatttaaaatgattttacccaagcctaagtattaaagtatatgtgcaaaaaca

SEQ ID NO: 355761 - DNA, 1380 bp, Homo Sapiens
  misc_feature (28)..(28): n is a, c, g, or t
  misc_feature (60)..(70): n is a, c, g, or t
  misc_feature (72)..(105): n is a, c, g, or t
  misc_feature (107)..(123): n is a, c, g, or t
  misc_feature (149)..(256): n is a, c, g, or t
  misc_feature (656)..(716): n is a, c, g, or t
  misc_feature (980)..(980): n is a, c, g, or t
  misc_feature (1029)..(1030): n is a, c, g, or t
  misc_feature (1056)..(1056): n is a, c, g, or t
  misc_feature (1060)..(1060): n is a, c, g, or t
  misc_feature (1065)..(1065): n is a, c, g, or t
  misc_feature (1076)..(1076): n is a, c, g, or t
  misc_feature (1154)..(1154): n is a, c, g, or t
  misc_feature (1160)..(1160): n is a, c, g, or t
  misc_feature (1222)..(1222): n is a, c, g, or t
  misc_feature (1336)..(1337): n is a, c, g, or t
aggttagagagatggaggcgtgagtaanaacggaaagcaaaggaatgcacgtgggaactnnnnnnnnnnntnnnnnnnnnnnnnnnnnnnnnnnnnnnnnnnnnntnnnnnnnnnnnnnnnnncttagctgggcatgttggtgcatgcnnnnnnnnnnnnnnnnnnnnnnnnnnnnnnnnnnnnnnnnnnnnnnnnnnnnnnnnnnnnnnnnnnnnnnnnnnnnnnnnnnnnnnnnnnnnnnnnnnnnnnnnnnnnaagtgagcccctgtctctaaataaataaagagacaataagccactcattcattctttcattcatttatcagcttatgcttagtgagttataggccctggagacactgccttgaagaaaccttacattctggtgggcgtgcgggagcagatgctgaacaacaaacgggaaaatgtaaatatgagatttttccaggagtggtggggccgtgaagaaaacaagatcgtgtgagagtgaggcagggtgggggtgagagcaacattggcccgggtggcccaggaaggccttcctgaggtgacaactgagctgagactgaggatgagaggctgggttttgcaggtgaaggcaattgcaggtgcaaaggccctggggtgagactgaaggagggaagggccggcagtnnnnnnnnnnnnnnnnnnnnnnnnnnnnnnnnnnnnnnnnnnnnnnnnnnnnnnnnnnnnntggcgaggagtttggttttggggagcaaatgtgagaaaagggagcaagcagaggaaaggagggcccagtgctgcagtgggattggaaaaggaggaggaaggggcagacagtgagcatgcaggaggctgtccccttccctccaggaccccctgggtctagcaggactctgcccctctggccatctcctgggtgggggcaggtacggacgctgtccctgcagcaggaaaaggctgtcccactggagccaggtggtccgcggcggcncccacaacactgtctgcagagctggaatgctctatgcactgaccccacnnacagcagctgggtttgggatttcctncccnagagnagaggggaganctggccacctgggtcaccaggtgaaggattaagaggcctttaggaacattcctggctccctgtcctttgtcccttgtnacgganacaggcctccatgcccacaggcactcagcctcctttaatcacccctccctcgtcagttcttnacatagcaggggctttgacctgtgctttatccccattgctttgctttgtgacttagaccggggaaagatagttggcccctcccacctccctctccatcaccctcctttgccaanncagcgtgtggggaaatgtttttggctcagatggttgattatct

SEQ ID NO: 355762 - DNA, 1656 bp, Homo Sapiens
  misc_feature (6)..(6): n is a, c, g, or t
  misc_feature (33)..(33): n is a, c, g, or t
  misc_feature (132)..(132): n is a, c, g, or t
  misc_feature (268)..(268): n is a, c, g, or t
  misc_feature (295)..(297): n is a, c, g, or t
  misc_feature (444)..(444): n is a, c, g, or t
  misc_feature (449)..(449): n is a, c, g, or t
atcaanctgttttaaaaaataagctcaattganatctgtaaaatggaagattaaaattaggcaaaaaatataatccaggttgaagaataaataaaaatatgatcaacaagcacttaatacattctgaaagtnttagaacaaagaaaatgaaacgatagcatggtgattttatcatttcctcaaattgaaaaaataccaacatttctccatagagaatgctattaaaggttagtagatatcagtcctttattgactcagggtgggaganaaaagagctacagtctttttgacttannnggggaggatctacatatatcttcattttgctgtacttttcaatacacaaacacatatgaatgattataccctaatattttctgattacaaagaaatgcgtgactgtcataaaacatccaaaaacatcaaatgtctaacatgaaatanaaaanttgtgagtggttttagacctaaacgaaacacagtttccactttgaggatattgttcaaactcctttcccaagagtgcccccagttgtgtcatgtattaacacagtgtgtctaaaattgcctgagaagtagcaggtctttgttctcactcacacagctgtgtcctctgttgaatagggcctgggcgaccccagctaaagcctcatttgatccaccaacaggctcctttatctcctctccagggaaagggtggatccattttcttcctaggaggagttctgagcttctccaccctagggaccagggagtatggctgggatgagccagccctcagtgcgaaagacataggccacctgggtggccatggcacaggtttgtaccacagcacagaggcccctggagccaggtgagctcagacagctgctcccaggtcagcagagaataggcctactgttcccacacctgggctgtgttgtgataaatggcttcagatggagtgtgcagagaggtcaccaggcttttctgaagtggtagtgggtggtctcctagagactgagatctgggccgctcgctgtgcccggtgtgggcctctgggggtcccccacagcaggcatcatgggtctcctcatttcactgatgtgtacagtgtcagaggcctttggtttcttttccaaagtcaagcagtccttttgcacttttggctcatgtccttgatgctgtcctgctctatcttggcagctgtccatggaatggatttctctcttcctagagttcccccatctgagctggactctgattcttgccttgcatgtggctcttactggaatgagaagagagtgtcttatcttttcttctgatggtctttcctccttatccaagcccctttctgtaaaggagaccctcactttcccactctttccttaagtttaaattctgagggccacagctcccatatccatccaatatcactttttggaatgatgcttctataagcttctttcttaagaggccttgagtatcatgagaaaagatatcatttcccagcttccgggatgtcctggcgtctgagctacggatctcccggtgcctgccggtcacagagtaacagaggttctgtctattctcagaacgcgaagccgccttggcctcccagatggaaggactgggagcccctggtgaagagactgagctcttactgcagccaacaaa

SEQ ID NO: 355763 - DNA, 883 bp, Homo Sapiens
  misc_feature (584)..(781): n is a, c, g, or t
ttttttttctagcagcaaaaacctttaataaaacaaagccaaactcataagcacacgaatatgcacacagcgaagggtggaggccctgctgcgggcacccagggacccgtggtcgtaaggagcacatgtgaatctcaacccatccagccccacccagccagtgtggaggaccaaggtcccgcacccgaggcagagccaggacagggcctgaaacatggcacggctcccagtgtacacctactttccccgggcacacccaccccaggctggtcatgcagccatgaagaagacacagcctgccatcctggagcagaaatgaagccaggtccagcacagcctcaggccacagcatagctgcgggagctggggaggcttctctgagtccagcctgaggctgcacaggctttggccagccctccaagttgaggggatagcccctggtataggggatgatggaccccagcagttggggttggagtctggactgcttagcgggggctgggggagacaggcgaggccctggggactgtcttgggtatacagttgtccaggggggagggatcctaaagtggggcaaggagagnnnnnnnnnnnnnnnnnnnnnnnnnnnnnnnnnnnnnnnnnnnnnnnnnnnnnnnnnnnnnnnnnnnnnnnnnnnnnnnnnnnnnnnnnnnnnnnnnnnnnnnnnnnnnnnnnnnnnnnnnnnnnnnnnnnnnnnnnnnnnnnnnnnnnnnnnnnnnnnnnnnnnnnnnnnnnnnnnnnnnnnnnnnnnnnnnnnnnncgggtttgtccctgggaagaccggaccttgcaggtgaggtcaagatacgtgcccaattgctccttccagcctgtggccattagaagggaagacttccttttc

SEQ ID NO: 355764 - DNA, 1383 bp, Homo Sapiens
  misc_feature (969)..(980): n is a, c, g, or t
ggccctctttcctcttcctggtttccttacctgccctccccttactcttgtttctcctccgccgaggcactgtgcggtatttgtaaatattgggcgaggaaagtctcggaagaagaaataacgctgataataatactttattaatatttatagtaattattataatactaataacacaatccaagcgcatgacaaatcacataatttctaactgtcaatggaggatgcatcttcccattccaccccgcgctcccctcaattaggaggagaaaccgcacaagctaccaaatatataaaaggcattgattcccggagcaaagggaggggagggggcccggtaatgtacatagctgtcaagttaaggtttagtttccttccttcccctctgacccctaagctttcacttttcctttagcttccctttcctccccattcccaccctcagccgggctcaggcaatagtatattataaagaaaatgtctacattaagcaccaggactgcaagaggccatagagaatagtccccggaaagtgtttatgacaggtacccctcgccagtccgcccatttctcaccctttggttaaccattacattttccaggacagagcatttaatttactttttaaaatgaccctcgctggccgagcataagtacgttaaaatctttaaatgagttttttttaaaaagctaacgctttcattccctgccccgcccccacccgtacacctttgacttgtgacattttcaggatttacaaaggatctgggagctgtccagccaggtctggtgctgaagtcgcctcaccgttctgattacttcctctagttgtgaaggcagaggaggggctgttttggaaagtgactattctggcttttggttgggttctttcttctttttctacaatcgagttagcgtgtactattggttttcttattattaaacattgcataagttaccttttttgtnnnnnnnnnnnngtattaggtgatgtgcagtactgaaagtgcagtatctaaccaactagaacgtttgttttatttttagaacaagtgcacctttgttatatatttagtatattggtaccaaatacagaaaaaaactatagttctgtactatgtcctccaaactgtatattattgttcttaatttccagctgttgatataatggttaccactggatgagaaattcagtggtgcagacctggcttctgctgtttccagaagtgttcttttgtaccttattctgtagtagactgttataaaaagatgacacacacgctttattttttcttttgcaaataatagaaaaaacacaaccacagaaacgtaacaaataatggatgtgcaagaagtccatctattaaaaacaggttaatagtt

SEQ ID NO: 355765 - DNA, 478 bp, Homo Sapiens
  misc_feature (15)..(15): n is a, c, g, or t
  misc_feature (23)..(23): n is a, c, g, or t
  misc_feature (33)..(33): n is a, c, g, or t
  misc_feature (49)..(61): n is a, c, g, or t
  misc_feature (72)..(72): n is a, c, g, or t
gggtttcccctaatnattaaacnatggccaaangttccccctttttgtnnnnnnnnnnnnngtattaggtgnatgtgccagtaccggaaagtgccagtacctaaccccaactagaacgtttgttttatttttagaacaagtgcaccctttgttatatatttagtatattggtacccaaatacagaaaaaaactatagttctgtactatgtcctccaaactgtatattattgttcttaatttccagctgttgatataatggttaccactggatgagaaattcagtggtgcagacctggcttctgctgtttccagaagtgttcttttgtaccttattctgtagtagactgttataaaaagatgacacacacgctttattttttcttttgcaaataatagaaaaaacacaaccacagaaacaaacaaataatggatgtgcaagaatgccatctattaaaaacatggttaatatttaaaaaa

SEQ ID NO: 355766 - DNA, 1606 bp, Homo Sapiens
  misc_feature (976)..(976): n is a, c, g, or t
  misc_feature (1335)..(1335): n is a, c, g, or t
  misc_feature (1342)..(1377): n is a, c, g, or t
ccggtccggaattcccgggatccgcggacaagcccaaggccggagcggttccaggaggaccctggtctgcacctgtggttgccaggtaggtggatgtgagagaccctacccttctggttctctagaagccatcccatcgccgctagcatcatgctgtcccctcagagagctttactctgcaacctcaaccacatccacctccagcacgtctccctgggcctgcacttgtcccgccgtcctgagctacaggaggggcctttgagcacaccccctcctccaggagacactgggggcaaggagagcaggggcccctgcagtggcaccctggtggacgccaattccaacagcccagctgtgccctgccggtgctgccaggagcacggtccgggcctagaaaaccggcaggacccgtcacaggaggaagagggggctgcctctccctcagacccaggctgctcctcctcactcagctcctgctcagatcttagccccgatgagtcccctgtctcagtctacttgcgggacctccctggtgatgaggatgcccaccctcagcccagtatcatccccctggagcagggctccccactggcttcagcaggccctggcacctgctcaccggacagcttctgctgctctcctgattcctgctccggagcttcttcttcacccgatcctggcctggactcgaactgcaacgccctgaccacctgccaggacgtcccttccccaggcttggaggaagaggacgagagggcggagaaggatctccctacctctgagctcttagaggcggatgatgggaaaatcgacgctgggaaaacggagcccagttggaagattaacccaatttggaaaattgacacagagaaaactaaagctgaatggaaaaccactgaaaacaataacactggttggaaaaacaacgggaatgttaactctagctggaaaagtgaacctgaaaaattcgactctnggttggaaaaccaacacaagaataactgattctggctcgaaaacagatgcagggaaaattgatggaggatggagaagtgacgtcagcgaggagccggtgccccaccggacaatcacgtccttccacgagctggcccagaagcgcaagcggggcccagggctgccccttgtcccgcaggcgaagaaagatcgcagtgactggctcatagtcttctcgcccgacaccgagctccccccctcggggtcgccgggcggctcctcggcacctcctcgggaagtcaccaccttcaaggaactccggtcccgaagccgggccccagccccgccagtcccgcctcgagaccccccagttggctgggnctttggnnnnnnnnnnnnnnnnnnnnnnnnnnnnnnnnnnnngaaggaagaagaaccgacctggactgcagcccatagcggaggggcagttcgaggagggccgtcctgtcagcccagcggctgtcgaggaggccccagccgcgaaggagccggtcgcgcaggccgtcctggaggtccccagttcgtggttcttccccgtgtccccggatcccatcgggttgcgatgtcataagccaaagtggaactgaccatctggggagcatattaaggt

SEQ ID NO: 355767 - DNA, 1147 bp, Homo Sapiens
  misc_feature (1011)..(1011): n is a, c, g, or t
  misc_feature (1019)..(1019): n is a, c, g, or t
  misc_feature (1021)..(1021): n is a, c, g, or t
  misc_feature (1024)..(1024): n is a, c, g, or t
  misc_feature (1027)..(1027): n is a, c, g, or t
  misc_feature (1034)..(1034): n is a, c, g, or t
  misc_feature (1040)..(1040): n is a, c, g, or t
  misc_feature (1054)..(1054): n is a, c, g, or t
  misc_feature (1071)..(1072): n is a, c, g, or t
  misc_feature (1074)..(1074): n is a, c, g, or t
  misc_feature (1086)..(1087): n is a, c, g, or t
  misc_feature (1091)..(1091): n is a, c, g, or t
  misc_feature (1099)..(1099): n is a, c, g, or t
  misc_feature (1120)..(1120): n is a, c, g, or t
  misc_feature (1132)..(1132): n is a, c, g, or t
  misc_feature (1136)..(1137): n is a, c, g, or t
  misc_feature (1143)..(1143): n is a, c, g, or t
  misc_feature (1147)..(1147): n is a, c, g, or t
aggctggtaccggtccggaattcccgggatgcagggacctggaggtccattctgggcccggacctcttccaggcccccgccccccttcggagatccagagcgcaccgcgttctctgaccctcccggctccattcccggggggttacattcgactccatctgcaaacactgcagtggaaactaatggtcagtcgattgcgatttgcatctcattgaaatatcttccaaagcagccagagccttcaggcctgctgctgccgtcaagtcacctcggtgtccttccccgcagctcttgtcctcactggccgggcttcaccacctctgtcttctaggtctgcacctgtggttgccaggtaggtggatgtgagagaccctacccttctggttctctagaagccatcccatcgccgctagcatcatgctgtcccctcagagagctttactctgcaacctcaaccacatccacctccagcacgtctccctgggcctgcacttgtcccgccgtcctgagctacaggaggggcctttgagcacaccccctcctccaggagacactgggggcaaggagagcaggggcccctgcagtggcaccctggtggacgccaattccaacagcccagctgtgccctgccggtgctgccaggagcacggtccgggcctagaaaaccggcaggacccgtcacaggaggaagagggggctgcctctccctcagacccaggctgctcctcctcactcagctcctgctcagatcttagccccgatgagtcccctgtctcagtctacttgcgggacctccctggtgatgaggatgcccaccctcagcccagtatcatccccctggagcagggctccccactggcttcagcaggccctggcacctgctcaccggacagcttctgctgctctcctgattcctgctccggagcttcttcttcacccgatcctggcctggactcgaactgcaacgccctgaacacctgccaagacgtcccttcccaggcttggaggaanaggacgananggnggnaaggatntcctanctctgagctcttanaggggatgatggaaaannangctggaaaaggnnccanttggaaantaaccaattttgaaattgaanaaaaaaataaantganngaaacnatgn

SEQ ID NO: 355768 - DNA, 1798 bp, Homo Sapiens
  misc_feature (22)..(22): n is a, c, g, or t
tgcaggaggaggctgctgcctnttgctctccaagatcttaggttcggatgtaggagaagcccatggggtctctgagtcttttctgactgtcccaggtcaccccactccctgtagggtcctttcagcctcactatctcccatgcatagcgctttctaactgcagcttgggccgtgtgcccctcggggttgcccagagctcactgcagggcctgagggcacaggcaggcccgcggcaggcctggcccatagtcgctaaagaagttctgggtggcctggtgtctctgcagccaggccagtagggtaaccctctccttccacgcctctttcttcccagaacctgaatatccaggtggaggacattcggattcgagccatcctctcaacctaccgcaagcgcaccccagtgatggagggctacgtgaaggtgaaggagggcaagacctggaagcagatctgtgacaagcactggacggccaagaattcccgcgtggtctgcggcatgtttggcttccctttaagacctcctcacccacgctgggaagctcctgaagacacgcctttcaccttgatggtgagaagtaaatatatgaaaggagctccagcctccttgaggagctgtgatcactcttctctgaaggccagacctcacagcaggaacagcagccactgaaccagtaacctgaatgcgaccggagtaattggctccagggtggcgggggccccgtggctgtagtactaccaaaggcaaggtggacgtgctgaccctattggacagtggagtcaaagcagaaatcagtctgactgctgcagacctgtggtgttggctggttgatcatgatgttcctcgaagtgaaatagacaggaagcctactaagttcgtacttaatctgtataagcagaaaacttctaggtcaagcaaacaaaagtctatcccaaatcataaaagcagagtagagtcatgacccctcaatccattcccgtacttgagccagttttatcagactggaagctcttgaatgagggaaaggctggtaccctcaaggaagcaccctcgtagcctgccagaaatctatactgtattctttctcccagttctccaaagacacctttcaccaggatgagcgtgcattggagaaaaggaaataatcagatcttttggactactggccactggttctgagctgacagtaattctaggagacccagaacatcaaagtgggggcttatgggtttttagcttacgtccatctgaaacccattctgtgctatttccccacttccggaaagcatcatggaaatagatgtactcagcagctggcagaatcccacggcatctgccttcactcttggcaaggggagcaccggtcggtaggactcttggttgaatcagtccagctccgtgttcttcctacagtccagctattggcctagctgcctctttcacaggcaggcttcccgctccactccactcaaggctgcctcactcactccagtcactcctccagtctccaggtctggagcggggtgggctgtcttccaccctccgtgggcctccgtctgcagctcagaggcctgtccccagtgaaacactgggatggaggaggggaggggagggtatcccctgggaggcctgaacgtgctagagggtctgcagcacattcctgggggctgatgtcagagggatccgggctgctggggacagttgtttgctgtgggctctgcactcttcatttagaacgcaggacatctgttcctggagaggatcccgggaattccggaccggtaccagcctgctttt

SEQ ID NO: 355769 - DNA, 1344 bp, Homo Sapiens
ctcccgcgcgcggctacctacgcttggtgcttgctttctccagccatcggagaccagagccgccccctctgctcgagaaaggggctcagcggcggcggaagcggagggggaccaccgtggagagcgcggtcccagcccggccactgcggatccctgaaaccaaaaagctcctgctgcttctgtaccccgcctgtccctcccagctgcgcagggccccttcgtgggatcatcagcccgaagacagggatggagaggcctctgtgctcccacctctgcagctgcctggctatgctggccctcctgtcccccctgagcctggcacagtatgacagctggccccattaccccgagtacttccagcaaccggctcctgagtatcaccagccccaggcccccgccaacgtggccaagattcagctgcgcctggctgggcagaagaggaagcacagcgagggccgggtggaggtgtactatgatggccagtggggcaccgtgtgcgatgacgacttctccatccacgctgcccacgtcgtctgccgggagctgggctacgtggaggccaagtcctggactgccagctcctcctacggcaagggagaagggcccatctggttagacaatctccactgtactggcaacgaggcgacccttgcagcatgcacctccaatggctggggcgtcactgactgcaagcacacggaggatgtccggtgtggtgtgcagcgacaaaaggattcctgggttcaaatttgacaattcgttgatcaaccagatagagaacctgaatatccaggtggaggacattcggattcgagccatcctctcaacctaccgcaagcgcaccccagtgatggagggctacgtggaggtgaaggagggcaagacctggaagcagatctgtgacaagcactggacggccaagaattcccgcgtggtctgcggcatgtttggcttccctggggagaggacatacaataccaaagtgtacaaaatgtttgcctcacggaggaagcagcgctactggccattctccatggactgcaccggcacagaggcccacatctccagctgcaagctggggcccccaggtgtcactggaccccatgaagaatgtcacctgccgagaatgggctacccgcccgtggtgagttgtgtgccctggggcaggtcttcagccctgacggaccctcgaagattccggaaagcgtacaaagccaagagcaaccccttggtgcgactgaagaggcggtgcttacatcgggggaaggggccgccgtggaaggttgctcaaaaaatggaagagttgggggaccgtctgcgacgaacaaagtgggaacttggtgt

SEQ ID NO: 355770 - DNA, 2133 bp, Homo Sapiens
  misc_feature (278)..(278): n is a, c, g, or t
  misc_feature (353)..(353): n is a, c, g, or t
  misc_feature (544)..(611): n is a, c, g, or t
  misc_feature (1871)..(1913): n is a, c, g, or t
ttattagagtgtgaaaaggcaatacaccgggaacacattccatatgcctttagacacttattctataacactattcttaacggttgtcttatattctagaacccgacaaaactacaatggcatttttaaccagtcccctgttgttggacatttaggttccttcggatgtttcattcttggaaacagtgttacagtgagcaccctgcatcatacatctcagtgctcacctctgactgtttcttcaggaccaattccctctctggacaaagctgggagtnaaatccaggctggtgaaggaggcagcggtcctgttttgttccttctgctctgagcagtgcttagtggtcctcaanggtcccccgcacattcccctctcctcatcacagccttgcccaagacctgcacttttcaaaagtagagcatcccatgtgggcaagtttggacatcctcagaaagtcctttttgtggattcacatgcgtttgtccaaaaggaacatgtagtgtttcacattttattcatgcatatatcaatgtggtgtctagnnnnnnnnnnnnnnnnnnnnnnnnnnnnnnnnnnnnnnnnnnnnnnnnnnnnnnnnnnnnnnnnnnnntggatgagatggcctcagagtccctttctgccccatcctaccagggaatctccagaagtgctgcatgatatagaaggggtctcggtgtgggatctgccagcctggctttgaataccagcttgcgaaatactaactatatgatcttcagcagcttccttgagctctctgtgcctcagtttccccttctatgtaatggggtaacaataatgtccgcatcccacatcacaggcgtgtggggaagaatcaacgagattcacctgagccacctcttgacacagtgcctggctcaggacatggtgctcagtaaatctacttttattatgacaacaagacttgatctttcaaatcctttatctcattgaccacactgatgttgtccctgttttatcaatgaagtaacaggcttggagatagtgagacttgtctcaggtcacatggccagttcaggggcatagccaggcttatccatgctctgactcccactccagtgctgtctgcatctggaatgcagacccccaacagtggcccagccccgcagtggttccagggaccgtgggagaccttgtggctgagggtcgagcctgggttctttcattccccctccccatacttgaccttcagcctccgcactgaggcgcctttttcacagggcaagcatgggcagctaagaggagtgggtggcagcacatggcacatcagatggtcagaaaacaatgccaggtgctgctgagctggaagagccagagtggccaataggcttttgtcaaaattttttaaaaagtgaaactcagaggaacattttcctccccagaagaaaaggtgtgcagcccacctggtaggtaggtccaggcatggacccagcaacagaggcaagtggaggacctgccctccctggtgactctgggtgagcctcagctggtgggttgcagagctgccctggccccagaagactcaaggctgccttaagactctgctccaaaacaccatggagtctgtgctccactggctcagggaatgctggggcccttccacctccctgagctttaccctggggatggtgatacaagtcttctctgttcccaggccctccagacctccttggatgaggagcagagaaggatccgggcaggtacatggcccatctgcaaagcccacccagcaacagcccaacccctcaccatcaccctgtcttcccccagcccaggaaataaccctgcgccttccaaatctttgggttttcacctggttctttctatcctnnnnnnnnnnnnnnnnnnnnnnnnnnnnnnnnnnnnnnnnnnntttgagcttcagttttgacactcaaaagacaagaactgactactgacttccactgagtcatccctaccctgcagcagtgaatttcctgagcccaactgccctataaagaaagaggaaatgccagagaaagaagaaagattaatatttcaaaaaagaaaaccatctggccatataattttacatttattcttatgatcagttaatctctatctcccttaga

SEQ ID NO: 355771 - DNA, 1526 bp, Homo Sapiens
  misc_feature (61)..(61): n is a, c, g, or t
  misc_feature (71)..(71): n is a, c, g, or t
  misc_feature (203)..(203): n is a, c, g, or t
  misc_feature (461)..(461): n is a, c, g, or t
  misc_feature (579)..(579): n is a, c, g, or t
  misc_feature (661)..(661): n is a, c, g, or t
  misc_feature (1335)..(1336): n is a, c, g, or t
tcccgggatccctacccctgtgtttttatttctaaaacaatttgtgatactaggaagatgnagatatcaantaaatgcaggtttattgaactataactattctagatgtaatattttgacagtcttattagaaaacccccttttttaaaaaaaatgtatgaaaccgataattaggacatttgaaggagcagtagttttttttnagtcctttaaaaaataacatctgtgactaataatttgagattaaaagatttgaagtcttaatttatgtatgtttattccaaaaacagtttttgagtgtatgttctacaaagttctgcactagatactgttcaggaaatagacaagtaagatgtgtctatcctctaagacttccagtttggtagcttagtatagaaattctgtaacagaggtgcaggtgaaatgctgggggaacagaagggataagaccatttattttntctcaggaaggattgtggaagacttcatagagtaagtggcatgggagattaccttgaagtgaaggaagacaaataagtaaaagagatgaggcattaagtgtatgaaaccatgcataanaaagtgtacggtgtgttctgggacaaagaatgtactgctactgtcgaataatggggactatagctggcttgttctggggaanagctcatataagtatggaatttattcctcaactagtagggatacccaatactggtattgaaactttggggaaaataactggagataccagtgcagctatttaaagctgtagcaagggctgcaatcttgcggagattttaaagagaagtcttaaagtttctaatactgatgcctctttttggtaaatacaagttttaaaaatcctgccctgggatcctgattccccattaatcaagatttgtcagacttcaccttctataattagaaaacacagttataagaacagtcaattttttaaattttccaaattaaaaaattgcaccatgattttgaacaagcacttccaattacattacccatcttgtatgccataggtgggagtataattgtcacagcctttaggaatgtagttttctgggatttattgaaactttgaaccttttggcctactaagttcattcctaggaaactgcctaatgggaatgatctgacaagtgtacacaagcaaagtcattgcacctttgttctttaatacttaaaactagcccaaatgccctgtcagtaagggactggtttaatagatggtacctttatgcaatttgtttctaagtattcgttaagagagtgaggaatgtctggattattagggcaagatttctaaacttgggtaaaaannaaagttgtgcaagcatttttgtggacaacttgatgctctaaaatataagtaacaccacattactaacagtggctttgttaggaagcagaattatggaagaactttcatgggtggctttacatatttctataatgttttaattttctataagcatgtatttcgtaaacttaaataaagaaaaaagaacact

SEQ ID NO: 355772 - DNA, 1616 bp, Homo Sapiens
  misc_feature (1242)..(1242): n is a, c, g, or t
ggtccgaattcttcggatcgcacctgctgcaggtgctcccggccgccccggaccagcgagcgcgggcactgcggcggggaggatgctgcgcgagcggaccgtgcggctgcagtacgggagccgcgtggaggcggtgtacgtgctgggcacctacctctggaccgatgtctacagcgcggccccagccggggcccaaaccttcagcctgaagcactcggaacacgtgtgggtggaggtggtgcgtgatggggaggctgaggaggtggccaccaatggcaagcagcgctggcttctctcgcccagcaccaccctgcgggtcaccatgagccaggcgagcaccgaggccagcagtgacaaggtcaccgtcaactactatgacgaggaagggagcattcccatcgaccaggcggggctcttcctcacagccattgagatctccctggatgtggacgcagaccgggatggtgtggtggagaagaacaacccaaagaaggcatcctggacctggggccccgagggccagggggccatcctgctggtgaactgtgaccgagagacaccctggttgcccaaggaggactgccgtgatgagaaggtctacagcaaggaagatcttaaggacatgtcccagatgatcctgcggaccaaaggccccgaccgcctccccgccggatacgagatagttctgtacatttccatgtcagactcagacaaagtgggcgtgttctacgtggagaacccgttcttcggccaacgctatatccacatcctgggccggcggaagctctaccatgtggtcaagtacacggggggctccgcggagctgcctgttcttcgtggaaggcctctgtttccccgaagagggcttctcaggcctggtctccatccatgtcagcctgctggagtacatggcccaagacattcccctgactcccatcttcacggacaccgtgatattccggattgctccgtggatcatgacccccaacatcctgcctcccgtgtcggtgtttgtgtgctgcatgaaggataattacctgttcctgaaagaggtgaagaaccttgtggagaaaaccaactgtgagctgaaggtctgcttccagtacctaaaccgaggcgatcgctggatccaggatgaaattgagtttggctacatcgaggccccccataaaggcttccccgtggtgctggactctccccgagatggaaacctaaaggacttccctgtgaaggagctcctgngcccagattttggctacgtgacccgggagcccctctttgagtctgtcaccagccttgactcatttggaaacctggaggtcagtcccccagtgaccgtgaacggcaagacatacccgcttggccgcatcctcatcgggagcagctttcctctgtctggcggtcggaggatgaccaaggtggtgcgtgacttcctgaaggccagcaggtccaggcccccggggagctctactcagcactgctgcctgtggccccgtggatggtttatgttctttggccccatccccggacaaagaaattcctgcttctcagggccagcccttggcctctttcagctttttccggagaacctaaagcacccccattgagagagccat

SEQ ID NO: 355773 - DNA, 843 bp, Homo Sapiens
ggctgcaggtccacgcatgtcattcaccctcggtccctgggtgactgcgacggctgcaggcagcccattctggccctcgttcccggcatgggtccaattacccctgtctccccagcccgcttctgtcgcccccggttatgaggaaggacttcgtacaccaggaagctgccccccaggggcgtcttcaggaactcaggcctcccgggtctgcgtccaatgtcctggtgctcgtctggggcctcggctatggtttgcagctcctggtcttcgaccctttgctcgctttcttggcccgaggcctggtgagagtcaggggacccggacccctgcggtagagcaaactatccacgcctcggagcagcgtgtccacttggctcccagggccgtcctgcccagcctgcagcgtctccacggccttctcctgctgccgccgggcttccaggccctccatatcggtctggtgccagtgcccacgcatcacagtcacccgctgtccctgggtgatggcccggctccggcagccgtgcagcgcgtggtcccggcaggtccaatacaccttgtccccgacagccttctcccgcttgtagaggaacgactcgtgtaccaggaagctgccccacgtagcacagtcctcaggaactcgaggggccgggcactgtccacagccccaggatcgagcgcttcttgggcggcaggctcagcagtgacagggctcggggtgcctcctcctcctccagggccggcttgctcagcaccagcccaggagtgggctcgggctcctcagggcactgccacggcccgacgcgtggtcgacgatatccaaaacgtccggaccgtaccagc

SEQ ID NO: 355774 - DNA, 1480 bp, Homo Sapiens
  misc_feature (1403)..(1439): n is a, c, g, or t
tttgagagttgaccatcaggtatattggggaagggagagatggaggcaccttcatgagtgcctcccaagggcagtagcctctgcaacttgctgggggttcaggggaagcagggagttcatggggctcctccagcaaagatgagctccagggctgcttggatgtccccaccggtggcctgcagggcccgcaggctcagctcatcgtcctggatgcccatgtcacgtagctgctgcagctggggctgccactggctctgaaggctgggctgcccagaggcctgaagggcatgctgtagggcttggctgaagagatcattggtgatgggcgtccctgactggacaccagaggacattggtgaggtccctgaggaatgaccctgggtgccaggagtcggtgtgtgagagctgctctccggagtgctggccagggccaaggcggtggccagctcactctgggtgatgggccggggcccagcagctccactgtaccccagggaggctgggcgggagctgggagtactgctagagggtgtggacctggtgtttgggtgaaagtcatcctcatcatctgagagcccttcaaacaggaagccacctggcatatcccggtatgagctggagggcatgctccgggaagaggagtcagtcccaggcattggggcactgcctgctacggagtgcagaaccaggacaatggcattgacgagggctgggtgagcaggcaccaacgtatcaagcatattgggatcagcgaagacagagaagaggtccttgtcctggagaaccccaagagcaatagggtcactgctgaggcctggggtggccacaatgatctgatccagagactccttattgctgagcatcttaaagaccgcctccctgtaagaggagctgctgtgcagggcagtgtgcaacacccggaactctctcatggcagccactttgtccacaggttccggtttctgatcaggttcaggccaggactttcgcagaacatggacagtggacccaggttgaatgccatagaagtcaagtgtctggtcatcttttagcttccgaccacagtagatcagatcaatcagctcagggtctggaacagactcctggagtttgccagcaataagctgcttcagaaatgaaatactatagccccctagcgagtattctcccagttctgtctctggcaaccgaagaatagactttggagtaagtggctggtcagccagcttcaccgccaggtgccagtctgagagagacatcctctctctttcgcgctctctctttctccccgtcccgcggaaggaacccggccgcactgccgccggtgtaaacactcactctggccctctcgccggaagccgccgctctcgacgaattcgagcttcggccgatttggcctgatnnnnnnnnnnnnnnnnnnnnnnnnnnnnnnnnnnnnncgccgcccccgcggtgagctccattcgcccaagtaggcata

SEQ ID NO: 355775 - DNA, 947 bp, Homo Sapiens
tacagcggctggtacggcccggagtgtttgggatcggccgggttccttccgcgggacgggtgagggcgctggggccctgggcagcgcgggctcgatgtgtgtcagccaagtagctggtcccactggagcgggagaaagagagagcgcgaaagagagaggatgtctctctcagactggcacctggcggtgaagctggctgaccagccacttactccaaagtctattcttcggttgccagagacagaactgggagaatactcgctagggggctatagtatttcatttctgaagcagcttattgctggcaaactccaggagtctgttccagaccctgagctgattgatctgatctactgtggtcggaagctaaaagatgaccagacacttgacttctatggcattcaacctgggtccactgtccatgttctgcgaaagtcctggcctgaacctgatcagaaaccggaacctgtggacaaagtggctgccatgagagagttccgggtgttgcacactgccctgcacagcagctcctcttacagggaggcggtctttaagatgctcagcaataaggagtctctggatcagatcattgtggccaccccaggcctcagcagtgaccctattgctcttggggttctccaggacaaggacctcttctctgtcttcgctgatcccaatatgcttgatacgttggtgcctgctcacccagccctcgtcaatgccattgtcctggttctgcactccgtagcaggcagtgccccaatgcctgggactgactcctcttcccggagcatggcctccagctcataccgggatatgccaggtggcttcctgtctgaagggctctcagatgatgaggatgactttcaccaaacacaggtccacacctctagcagtactcccaggctccgcccagctccctgggtacagtggagcttgtggccccg

SEQ ID NO: 355776 - DNA, 1067 bp, Homo Sapiens
  misc_feature (18)..(18): n is a, c, g, or t
  misc_feature (900)..(971): n is a, c, g, or t
gaatttttcaataagcgngttaaccggcggattcccgccgggttccttccgcgggacggggagaaagagagagcgcgaaagagagatgatgtctctctcagactggcacctggcggtgaagctggctgaccagccacttactccaaagtctattcttcggttgccagagacagaactgggagaatactcgctagggggctatagtatttcatttctgaagcagcttattgctggcaaactccaggagtctgttccagaccctgagctgattgatctgatctactgtggtcggaagctaaaagatgaccagacacttgacttctatggcattcaacctgggtccactgtccatgttctgcgaaagtcctggcctgaacctgatcagaaaccggaacctgtggacaaagtggctgccatgagagagttccgggtgttgcacactgccctgcacagcagctcctcttacagggaggcggtctttaagatgctcagcaataaggagtctctggatcagatcattgtggccaccccaggcctcagcagtgaccctattgctcttggggctctccaggacaaggacctcttctctgtcttcgctgatcccaatatgcttgatacgctggtgcctgctcacccagccctcgtcaatgccattgtcctggttctgcactcccgtaacaggcagtgcccccaatgcctggggactgactcctcctccccgaagcatgccccccagctcatacccgggatatgccagggggccttccctggttgaaggggctccccaaaggaagaaggatgaactttcaccccaaacaccaagggcccccaccccctctagcaggaattcccaagttcccggcccagccttcctggggggtaccgggggaacttggttgnnnnnnnnnnnnnnnnnnnnnnnnnnnnnnnnnnnnnnnnnnnnnnnnnnnnnnnnnnnnnnnnnnnnnnnnggagaaacatatttctcttccccaccgggattcccgtgggcccccaggggccctttcccctgccgggggaccttcccacaaagggccctcttgggg

SEQ ID NO: 355777 - DNA, 456 bp, Homo Sapiens
  misc_feature (83)..(83): n is a, c, g, or t
tctacaggatctctgcaggagagagactgtagagggtgtgactggtgtatgggtgaagtcatctcatcatctgagagcctttnaacaggaagcacctggcatatccggtatgagctggaggcatgctccgggaagaggagtcagtcccaggcattggggcactggctgctacggagtgcagaaacaggacaatggcattgacgagggctgggtgagcaggcaccaacgtatcaagcatattgggatcagcgaagacagagaagaggtccttgtcctggagaaacccaagagcaatagggtcactgctgaggcctggggtggccacaatgatctgatccagagactccttattgctgagcatcttaaagaccgcctccctgtaagaggagctgctgtgcagggcagtgtgcaacacccggaactctctcatggcagccactttgtccacaggttccg

SEQ ID NO: 355778 - DNA, 482 bp, Homo Sapiens
  misc_feature (15)..(15): n is a, c, g, or t
  misc_feature (463)..(463): n is a, c, g, or t
ttccttccgcgggangggagaaagagagagcgcgaaagatgagaggatgtctctctcagactggcacctggcggtgaagctggctgaccagcacttactccaaagtctattcttcggttgccagagacagaactgggagaatactcgctagggggctatagtatttcatttctgaagcagcttattgctggcaaactccaggagtctgttccagaccctgagctgattgatctgatctactgtggtcggaagctaaaagatgaccagacacttgacttctatggcattcaacctggggtccactgtccatgttctgcgaaagtcctgggcctgaacctgatcagaaaccggaacctgtgggacaaagtgggcttgccattgaggagagtttccgggtgtttgcacattgccctggcacagcagcttcctctttacaggggagggcggtctttttaaggatggntcaggcaattaagggagtt

SEQ ID NO: 355779 - DNA, 458 bp, Homo Sapiens
  misc_feature (17)..(17): n is a, c, g, or t
  misc_feature (42)..(42): n is a, c, g, or t
  misc_feature (60)..(60): n is a, c, g, or t
  misc_feature (68)..(68): n is a, c, g, or t
  misc_feature (75)..(75): n is a, c, g, or t
  misc_feature (84)..(84): n is a, c, g, or t
  misc_feature (138)..(138): n is a, c, g, or t
  misc_feature (167)..(167): n is a, c, g, or t
  misc_feature (193)..(193): n is a, c, g, or t
tggccaaccgcctttgnccttggccaaaaattccggaaaaanaactctcaaaaaaccganttcctggnaccccanggtcaattncctcagggacctcacccaaatgtcctctggtgtcccagtcagggacgccccatnacccaatgatctcttcagccaaaccctanagcatgcccttcaggcctctgggcancccagccttcagagccagtggagccccagctgcagcagcctacgtgacatgggcatcccaggacgatgagctgaagcctgtcggccctgcaggccaccggtggggacatccaagcagccctggagctcatctttgctggaggagccccatgaactccctgcttcccctgaacccccagcaagttgcagaggctactgcccttgggaggcactcatgaaggtgcctccatctctcccctccccaatatacctgatggtcaactctc

SEQ ID NO: 355780 - DNA, 2032 bp, Homo Sapiens
  misc_feature (982)..(982): n is a, c, g, or t
  misc_feature (1447)..(1448): n is a, c, g, or t
  misc_feature (1493)..(1508): n is a, c, g, or t
  misc_feature (1511)..(1794): n is a, c, g, or t
  misc_feature (1806)..(1903): n is a, c, g, or t
  misc_feature (2020)..(2020): n is a, c, g, or t
  misc_feature (2023)..(2023): n is a, c, g, or t
  misc_feature (2027)..(2027): n is a, c, g, or t
  misc_feature (2029)..(2029): n is a, c, g, or t
agcgggggggcgcgaggcctcacggagctcgtagtttcccggacgggccgctcccggcctcgcggcctcgcctacccacactacaactcccacggggcagcgggcgcggctccccgtacccaccagctggccgggcagggcagccacttcgcggtcgggcccgccggctgcgggcacccgcgcgacgggcgggaagatggcggacgtggtcgtgggtaaagacaagggcggggagcagcggctcatctcgctgcctctatcccgcatccgggtcatcatgaagagctcccccgaggtgtccagcatcaaccaggaggcgttggtgctcacggccaaggccacggagctctttgttcaatgcctagccacctattcctacagacacggcagtggaaaggaaaagaaagtactgacttacagtgatttagcaaacactgcacagcaatcagaaacttttcagtttcttgcagatatattaccaaagaagattttagctagtaaatacctgaaaatgcttaaagaggaaaagagggaagaagatgaggagaatgacaatgataatgaaagtgaccatgatgaagctgactcctaaaccaaaagtgctttaaaaaccagcctggcgaggacagccctggacccactccactgtctctaagtaaacacagcactgcccgcttttagcgtcttcacttcttcacagagttccagtgcgtggtattctttcgaggtattctttccaggccgagattgagcacctcatgtacctacgccacagacagccagagggaaagcgaccagacagcagcccctcctcgacaggcccaccctgcagctcaggcaccaagaaaacagccgatactggcagccattgcagctccaaactgcagaggcaaggccaattttaacttttcaatttacagtcgattttgaagaacttctacatatcggttatgtaaattcatatatgtatattgtggaatcnagttcttataaacagctcgattcagtgttagctaaatttatagtttaggtagtatgttacatttgaatttgtgtcttaagaaaagttgactgttcagatatttttctactgtaaagaaatatacttttctattaaagatctgtacatatttttacagtaaaatgctttatggaactagttttagagccctctatggctttaaggccttgcttactgcctgcaaattttgagaaatttaaaaataagcattctaacacttttattcccacagaaaaattccaagtcaaattatcaaatcaaatacaaaaataagtcttacctcttgtataagcatgttgtactagaaaaacattttgaaacattttgtatattggagatctctctcatcttactgttctttgctttaaattcctggcacttctttttactgtctataagagaaaacctatcataagcccaattttnnttttccacttagggtaaatgtttggctcctctcatttcattatcnnnnnnnnnnnnnnnnaannnnnnnnnnnnnnnnnnnnnnnnnnnnnnnnnnnnnnnnnnnnnnnnnnnnnnnnnnnnnnnnnnnnnnnnnnnnnnnnnnnnnnnnnnnnnnnnnnnnnnnnnnnnnnnnnnnnnnnnnnnnnnnnnnnnnnnnnnnnnnnnnnnnnnnnnnnnnnnnnnnnnnnnnnnnnnnnnnnnnnnnnnnnnnnnnnnnnnnnnnnnnnnnnnnnnnnnnnnnnnnnnnnnnnnnnnnnnnnnnnnnnnnnnnnnnnnnnnnnnnnnnnnnnnnnnnnnnnnnnnnnttcattatctcnnnnnnnnnnnnnnnnnnnnnnnnnnnnnnnnnnnnnnnnnnnnnnnnnnnnnnnnnnnnnnnnnnnnnnnnnnnnnnnnnnnnnnnnnnnnnnnnnnatcgataggacagttctgccacccaggacattcccctctgttcctctgttcctctcttctcctgccccctagcaaccactggtgttttctgtccctcttgttcattgacattttttnaanatanantat

SEQ ID NO: 355781 - DNA, 224 bp, Homo Sapiens
ggttagtgtctaatctgtgaattttgacaaatgcatggttttgtaaccaatcgataggacagttctgccacccaggacattcccctctgttcctctgttcctctcttctcctgccccctagcaaccactggtgttttctgtccctcttgttcattgacatttattttaaaataaaatattttaaaatccgcctaactgaaacacaacatggaaaaaaaccttgt

SEQ ID NO: 355782 - DNA, 926 bp, Homo Sapiens
  misc_feature (50)..(86): n is a, c, g, or t
tgatgatagaatcactatacgggacccggcgttcatcgcggtggcggcgnnnnnnnnnnnnnnnnnnnnnnnnnnnnnnnnnnnnnatcaggccaaatcggccgagctcgaattcgtcgagagcggagcggcgcgacgggcgggaagatggcggacgtggtcgtgggtaaagacaagggcggggagcagcggctcatctcgctgcctctatcccgcatcagggtcatcatgaagagctcccccgaggtgtccagcatcaaccaggaggcgttggtgctcacggccaaggccacggtagctctttgttcaatgcctagtccacctattcctacagacacggcagtggaaaggaaaaccgaaagtactgacttacagtgatttagcaaacactgcacagcaatcagaaacgttttcacgtttcttgcagatatattaccaaagaagattttagctagtaaatacctgaaaatgcttaaagaggaaaagagggaagaagatgaggagaatgacaatgataatgaaagtgaccatgatgaagctgactcctaaaccaaaagtgctttaaaaaccagcctggcgaggacagccctggacccactccactgtctctaagtaaacacagcactgcccgcttttagcgtcttcacttcttcacagagttccagtgcgtggtattctttcgaggtattctttccaggccgagattgagcacctcatgtacctacgccacagacagccagagggaaagcgaccagaaaagcagccccccctcgacaggcccacccggcagctcaggcaccaagaaaacaggcgatactggcagccattgcagctccaaactgcagaggcaaagccaatttgaacttttccaatttacagtcgattttgaagagcttctacatatcggttatgtagatccctatatg

SEQ ID NO: 355783 - DNA, 1920 bp, Homo Sapiens
  misc_feature (97)..(176): n is a, c, g, or t
  misc_feature (193)..(248): n is a, c, g, or t
aaaggccgggaagctaaagacaagtcaaaccagacctggagagctccttggaaagtttagtttttgatttaaggacaaagaaacgaatttctgaagnnnnnnnnnnnnnnnnnnnnnnnnnnnnnnnnnnnnnnnnnnnnnnnnnnnnnnnnnnnnnnnnnnnnnnnnnnnnnnnnggtgaaataagagattnnnnnnnnnnnnnnnnnnnnnnnnnnnnnnnnnnnnnnnnnnnnnnnnnnnnnnnntttgtcgaatcccaggtggaatctgaatcaagtgtacttaatgattctccctttccagaggatgacagtgaagggctacattccgacagcagagaagagaaacaaaacactaaaagtgcaagagagagagcagggcaggacatggggctggagcatggctttgagaagcccctagacagtgccatgagtgctgaggaggataccgatgtcagaggcaggaggaaaaagaagaccccgagaaaggctgaggacactagagagaacaggaagctagagaacaagaacgctttcttagagaagaaaactgtgcctaaaaagcagaggaatcaagacagaagcaaaagtgctgcagagttagagaagctgatgcctgtatctgcccaaacgccaaagggccggaggttgagcggggaagagagaggcctctggtccacggactcagccgaggaggacaaagaaaccaaaagaaatgaatccaaagaaaaatatcagaaaaggcatgattctgacaaggaagaaaaaggcagaaaagagccaaaaggattaaagacacttaaggaaatcagaaatgcatttgatttatttaaattaactccagaagaaaaaaatgatgttttctgagaataatcggaaaagggaagaaataccactgggattttaaaaccatagacgatcaccaaaaccaaaggaaaacaaacagtcacttaaagaaaggagaaacaccagagacgaaacggatacttgggcatacattgctgcagaaggtgatcaggaggttttagacagcgtgtgccaagcagatgagaattcagatggcaggcagcagattctgagtttgggcatggacctgcagttggaatggatgaagttggaagatttccaaaagcaccttgatgggaaagatgagaattttgctgcaacagatgcaattccaagtaatgtgttaagggatgctgtgaaaaatggggattatattactgtaaaagttgcacttaattcaaatgaagaatataacctggaccaagaggattccagtggaatgacactggtgatgcttgccgccgccggagggcaggacgacctcctgcgactcctcatcacaaaaggcgcgaaagtgaacggtcggcagaagaacgggaccaccgccctcattcatgctgcagagaagaactttttaacaacagtggctattcttttggaagcaggagcttttgtaaatgtccagcaaagcaatggtgagactgcactgatgaaggcctgtaaaagaggaaattcagacatcgtacgactcgtaattgaatgtggagctgactgcaatattttgtcaaagcaccagaatagtgccctgcactttgcgaagcagtctaacaatgtgcttgtgtacgacttgctggagaaccatttagagacacctttccagaagtagcagaatgaggacaagtaagaggattacttttgaagctcgccttgactctgctagaaccaggtattccaatcggcatgctcatcgaactctgtgtaaggggtccagaatttttgcaagcagaatttcaatatacaagcccccaaaggatagcattccagaagggcacctgggagatccgtgctgtattgatctatcccggcaatactatgtggaggtaagaaaggtgttgcatgcgcgtctggtgac

SEQ ID NO: 355784 - DNA, 955 bp, Homo Sapiens
  misc_feature (626)..(651): n is a, c, g, or t
tcacccgcagtatattataacttataaatgctgaaatacaaagttatatttgaggggttattgtattttttctttaggcggccgaatggtgttttatttaaaaattaccccctgtggaacaaaccacccagggtaaacatgggagatttctaagcccatggtacatgacttacgaccacccccccactttggagtgcgggaaaaatcatttatttctgggtagagatctcggttggcccaggacaaggaggtaaaaagcggctctttccggaagggcccttggggaccccttgtgcctttttgcttcgccttcaaggtcacccagttgaaactgcgataggaaatatctgaatggaggaaacaaaacagccaaaacaaacattccccacccggccctgtgcatataaagtcgttcttcccccaactcttgaacgatgataatattcagaccaagcattgatgttatggaagaaagaaagaaacaaacaaaaaatatatatatatgtccaaaaacagacaaatccaagggttgtgaggtaaacgagtgtatgcatttagattccacaaaaccaaaatccatgttgaacaaagttaagtccgtacacagtgactttttgggtgaaccnnnnnnnnnnnnnnnnnnnnnnnnnncctcaagccctgttttcctgtgaagatactttgagtggcagccattctctccacgtgaaccacacgtctggagcacagacaggcctctcaaggtcattgatcttacgcatttactgtttaccgaacaaatgtctgactgtgtactcgggtggtactccgcagcattgtcgactgcagtcccctgtgtttgccagagatactgtgctcgaagtagaggttttactctactcatcactgcgatttgcacattgctccgtggacactcggaggcctgcgttctgttccctataaatgaaagcgtgct

SEQ ID NO: 355785 - DNA, 2099 bp, Homo Sapiens
  misc_feature (319)..(331): n is a, c, g, or t
  misc_feature (709)..(722): n is a, c, g, or t
  misc_feature (812)..(812): n is a, c, g, or t
  misc_feature (835)..(835): n is a, c, g, or t
  misc_feature (1486)..(1499): n is a, c, g, or t
agcggtttgagccagaagatgtctcgtgtgaaggctggggtggcggctgtcttggaacctctgtgagcaggaggccctaagccgcagcagtggatagaggtgcagctctctgcctctctgccctttggtctatgttcacaggtgacccgtgtcagcctgcatcgcaagcacacaccctgcgggccttcaagtctcactgttccgtatgaggaaacagacagcggactgaggaagcgatggccccagagaaagggcccctgtagcctggctctcacacagtattttatctttgattctgaataaatattttttgtggggnnnnnnnnnnnnngggtgggcagttggttggttttaaactgaccacttggaagaaacaccttggttatctgtggtttccttgccttgtccctgcctctacccccaccccttttgagtcgggtgactcattttcctgtgtagagactcggtggcccaggcaggaggtgaaagcggccatccggaaggccctggggacccttgtgcctgttgctcgccttcaggtcaccagctgagctgcgataggaaaatctgaatggaggcagcaaacagccaaaacaaatttccccacccggccctgtgcatatgaagtcgttcttcccccaactcttgaacgatgatgatattcagacgaagcattgatgttatggaagaaagaaagaaacaaacaaannnnnnnnnnnnnngtccaaaaacagacaaatccaagggtgtgaggtaaacgagtgtctgcattaagattccacaaaaccaaaatccatgttgaacaaagttanagtccagtacacagatgaccttnttgggtgaacccgtgtgtgtctgtctgttgtgtgtgtgcctcaagccctgttttcatgtgaagatactttgagtggcagccattctctccacgtgaaccacacgtctggagcacagacaggcctctcaaggtcattgatcttacgcatttactgtttaccgaacaaatgtctgactgtgtactcgggtgtactccgcagcattgtcgactgcagtcccctgtgtttgccagagatactgtgctcgaagtagaggttttactctactcatcactgcgatttgcacattgctccgtggacactcggaggcctgcgttctgttccctataaatggaagcgtgctctgagcctgtctgcctccctcggctgctgctggtcctcagtaccagcgcccgggggtgtccacaaccacttgggacagaagaaggtggaatttcagacagaagcttgactgggtcttcaatgacaggcttggactagctgtggcccagacatcggccctgcccagaattgccaggaggaggcttggcaggctctagaggagccgcagggcctgcctgcctctggtgagtccaacaggcacaagcaagctggcgtgtggccagaggtagccggagtgtgtcacagcccctcagatgcctttccttccaccnnnnnnnnnnnnnnaagaatcccaaataactcactgaagtgtctcaaaggcgaacaagttttaccaaaatgaatcctttttcagttaacagatcaaatggatgagttctgagcctctcaagttcctttccccagttagagtggggaactgggcaagtgttaactgtgggactcactgcagcgtcctatcctaaaggcacgagaagacggaaatgcaacctgcggagctgggcttggttcccaggtcacagtttggcccccgctacaggatgctgccctgctcagagagagatttaatagggagctgaaggaatcgttagggggccagggagatgtgactgaggctggctttccacgtgaatgagacggggtcggtggagggtttggtgctacagccagtcagaagatttgcaaatgcgaacacattcctgtgtgaggcacgttaccctttgtcagttattgtgaatatgtgtattttaagcaataagattcagctggtcagacttttctgggcagtctcagtgacgcatttcctgtgctgtgattgttctgaagacagagtggctctaaccactgtgagaagcccaaataaaaattgatcccaaaaatgctccc

SEQ ID NO: 355786 - DNA, 540 bp, Homo Sapiens
  misc_feature (47)..(47): n is a, c, g, or t
  misc_feature (105)..(105): n is a, c, g, or t
  misc_feature (117)..(117): n is a, c, g, or t
cctgaaccctcctcaaaatcccctttccccccaattaaaaatggggnaaactgggccaaatgttaaactgtgggaactcaactgccaacgtccctaaccctaaangccacgaaaaanacggaaaatgcaaacctgcggaaactgggccttggttcccccggtccacagtttggcccccccgcctacaggatgcctgcccctgcctcagagagagatttaaatagggagcctgaaggaatcgtttagggggcccagggagatgtgactgaggctggctttcccacgtgaatgagacggggtcggtggagggtttggtgctacagccagtcagaagatttgcaaatgcgaacacattcctgtgtgaggcacgttaccctttgtcagttattgtgaatatgtgtattttaagcaataagattcagctggtcagacttttctgggcagtctcagtgacgcatttcctgtgctgtgattgttctgaagacagagtggctctaaccactgtgagaagcccaaataaaaattgatcccaaaaatgct

SEQ ID NO: 355787 - DNA, 551 bp, Homo Sapiens
  misc_feature (37)..(37): n is a, c, g, or t
  misc_feature (66)..(66): n is a, c, g, or t
  misc_feature (72)..(72): n is a, c, g, or t
  misc_feature (79)..(79): n is a, c, g, or t
  misc_feature (105)..(105): n is a, c, g, or t
  misc_feature (127)..(127): n is a, c, g, or t
  misc_feature (134)..(134): n is a, c, g, or t
  misc_feature (428)..(453): n is a, c, g, or t
cttctgtctgaaaattcccaccttcttctgtcccccnaaggttttggaaaacccccgggccctggntacttnggacccnacaaccaaccccaggaggccaaacangcctccagagcacgccttcccnttaatangggaacaaggaacgcaggccctcccgagtgtcccacggagcaatgtgcaaatccgcagtgatgaagtagagtaaaacctcctacttcgagcacagtatctctggcaaacacaggagactgcagtcgacaatgctgcggagtacacccgagtacacagtcagacatttgttcggtaaacagtaaatgcgtaagatcaatgaccttgagaggcctgtctgtgctccagacgtgtggttcacgtggagagaatggctgccactcaaagtatcttcacaggaaaacagggcttgaggnnnnnnnnnnnnnnnnnnnnnnnnnnggctcacccaaaaagtcactgtgtacggacttaactttgttcaacatggattttggttttgtggaatctaaatgcagacactcgtttcatctgacgag

SEQ ID NO: 355788 - DNA, 1445 bp, Homo Sapiens
atgcgagagagcggatgacgcgggggcgagttggcctggcttccgttgctcgggcgggcttgccgcgggagcgtggtgggtggggaggggtggggggactcgaggcaaccccccagagcggcctctgagcgcctaggaggaacctgaaggcgggaagggggaagaacgtcaggtcaaaggcgggagtctcagggcttatggggtggggaaggagggtctgggtggaaaggtacctcagggagcctaggaggctgtcagcgtgagcggggtgtttcggtacaaatggaggccttcagacctactgagtggggggctccgagggttggggcggtcctcaggatggaaggatggggggtctcggtatagggagacctctgggtggagagggctgcggggagacttcagcaaaggcgaaggtgagacctcagatgtggagggtgtctgttggaccagaagagaaagctcaaaggcagagggggcctcgggggtccctgccgccgccgggtgggggccgcgctcaggcggccttgcactcgctctcgcgccgccgcttcttgcgctctgagtgctcccgcgcctggcgctcccagagcccgggcccgcacacgcccaccacgcagcaggccagccgccggcccgcgttcccgttctccacgctggcctggttgccgccgcggcccaggtcgtcctcgccagcgtggacgaccacggcccggcccacgatggagtgcgggcccgcgagcgaggcggccaggccggcgcggtacctccagaggctgccgtcgcggaccgcgaagttgccgaagtcgcccgggtgctgcgggtgcggcacggccagcgggttgtagtggggcccggtggactcgcagccctggctcaggtccccgaactggtgcacgtggatggcgcggctggagctgttcggctcggtcgggaagccctccagggcgaagaaggcgtcgagcttggcgcggggcgcaagctgccggaagaggacgacgccggtcacccggggctgcgcggcgtccaacgtggccgacggctgcacctggcaggcggcgtggagcgcgccgtcgtcgtcccgccgctgcatgacctcctgccagatctccgtgaccttggcgtacatgtctcggatccactccgccgagtcagagttgggctccgccgagtcctcgcccgtccaggcgtccgaggcaccggctgccaggagcaggcaggaacacagtagcgccagcatggctggagtcgggcacctttccagctcctccaagagagctttctctcctgaaaagagagctgcacccagccagcccaggaacgcaggctgtcctggagcctgggactgttagcgcgagtgcaggaggccagcccagaggagtggtcagcgtgagggagccagtcattgggccagttcagggaggaaaagcaggccagacctcccc

SEQ ID NO: 355789 - DNA, 1482 bp, Homo Sapiens
  misc_feature (23)..(23): n is a, c, g, or t
actcaccccaaacccaccctacncgaaaacccggtcgcccacacccgctggtaccggtccggaattcccgggatcggcgttagcgggtcgccgacccgcaatccccgccgcggctgcttgcctaccggagtgtgcgccggcacctgccgccggagacatgttgcaaaaaccgaggaaccggggccgctctggcggccaggccgagagggacagagactggagccatagcggaaaccccggggcttcgcgggccggggaagacgcccgggttctcagagacggctttgccgaggaggccccgagcacgtcccgcgggccgggcggctcgcaggggtcgcagggcccctcgcctcagggcgcccgccgggcccaggccgcccccgccgtggggcccaggagccagaagcagctggagctgaaagtgtccgagctggtgcagttcttgctgattaccagaccagaagaacattccgatcgagcgggccgacatactgaagcacgtcatcggggactacaaggacatcttccccgacctcttcaaacgggccgccgagcgcctccagtacgtcttcgggtataagctggtggaacttgaaccccagagcaacacttacatcctcatcaacaccctggagcctgtggaggaggatgccgagatgagggggtgaccaaggcacgcccactacgggcctcctgatgatcgtcttagggctcatctttatgaagggcaacaccatcaaggaaactgaagcctgggactttctgcggcgcttagggggtctaccccaccaagaagcatttaattttcggagatccaaagaaactcattactgaggactttgtgcgacagcgtttacctggaataccggcggataccccacaccgaccccgtcgactacgaattccagtggggcccgcgaaccaacctggaaaccagcaagatgaaagttcttaagtttgtggccaaggtccataatcaagaccccaaggactggccagcgcagtactgtgaggctttggcagatgaggagaacagggccagacctcagcctagtggcccagctccatcctcttgaaaggtggattcagagggacccccgggacaagggtctgagacccaaaggcacagtttagaggattgggggaagggagaacgaacccagggagcatattgctgtaaacgcttcaatgtgtgtagctttaggatgtgtttgcaaagttttgtttttttaatgttgtgttattttgctccagattttcatctataaacaaaggagcatttgttttgattttactctttttggtataaaaaattttgctagcttagtaaaacgaattggaaaacttgactatgatctggaacagataatgcaagaaggaacacataagtaagttgctttggtgccaagaaaataaaaaagctattatcaggtctcctaactaccccagtttgtaaggaaaaataaaagtttttataaaatt

SEQ ID NO: 355790 - DNA, 480 bp, Homo Sapiens
  misc_feature (27)..(27): n is a, c, g, or t
  misc_feature (49)..(49): n is a, c, g, or t
  misc_feature (218)..(249): n is a, c, g, or t
  misc_feature (412)..(412): n is a, c, g, or t
cggattttccatctataaaccaagggngccatttgttttggattttacncctttttggtataaaaaaaatttggctagccttagtaaaacggaattggaaaacttgactatgatctggaacagataatgccaagaaggaacacataagtaagttgctttggtgccaagaaaataaaaaagctattatcaggtctcctaactaccccagtttgtaaggnnnnnnnnnnnnnnnnnnnnnnnnnnnnnnnntaattgcctatatccttattatgttaacctattttatttttctatatttcgtacatatataagtattattcgatggttccaagcaatgagtgtaatgtattttctcccaatagtaattgtttatattcataattatatcagctctgctgctaaacacgtagtntaaccttcgtttttttcttcttgctactgtagttattacaataaatactgtatttttgaagcaaaaaa

SEQ ID NO: 355791 - DNA, 583 bp, Homo Sapiens
ttccacagtgcactgatggcgacactgatctttctgtcagaaaacatcagcaagttcactgggacttacacatggtggagctaacaggacatagtatctttgacttcactcatccctgcgaccatgtaggagattcgtgagaacctgagtctcaaaaatggctctggttttgggaaaaaaagcaaagacatgtccacagagcgggacttcttcatgaggatgaagtgcacggtcaccaacagaggccgtactgtcaacctcaagtcagccacctggaaggtcttgcactgcacgggccaggtgaaagtctacaacaactgccctcctcacaatagtctgtgtggctacaaggagcccctgctgtcctgcctcatcatcatgtgtgaaccaatccagcacccatcccacatggacatccccctggatagcaagaccttcctgagccgccacagcatggacatgaagatcacctactgtgatgacagaatcacagaactgattggctaccaccctgaggagctgcttggccgctcagcctatgaattctaccatgcgctagactccgagaacatgaccgagagtc

SEQ ID NO: 355792 - DNA, 1796 bp, Homo Sapiens
  misc_feature (444)..(458): n is a, c, g, or t
ttaaattcaaatgttcgctactcataatatgaaaaatgctacccatttttttaagtctaccaactccaccacaaactgtaaatctgtatgttacagtttaaatattataataaaatctgctatacaaagcaaaatatttttttaaaaagctgaaataactttaaaaacaaacagccttgaactaatggtaactatcatttgaaatggtatgatgcttaaaagatacctcagtcttaaagaaaaacagaaaacttcaataacagtgacttattacaatcattcatgaaaattttaaaagaaaagtagacattacatgcagggttacatgaaagcttctaaataaaggtatagaggcaaattacattaagtcaaagcactgcatacatagcaagtattgtatttaggaaataaaatacacagtttaaggtagttacacaaactgcnnnnnnnnnnnnnnntaagtacaaatctcaaatgccttcatttgtctttaacaatttgttcactaaaaatttcaaacacatttaatgaggagtagaatacaaaatacatgcaagagtataatacccacaactcaaatcgtctaatatatttatttcatttaaagcctgatattttcaagtacatttcatttcatctaaagcataggtgactgtttcattcttgttcttaagttaaaacacttacctgggtttcatacaaatgggcaatatgaaattgaatttcagcattggacaaagtacatggattacagtcaatcaaggctaactgaaaatgctttaaactagacttgtagtctgtgttcactttgaaacatgagcccaagtcgtaaatgaatttccttggctcgacaaaagctggggtcaacataaaggacatcttgaaatgctttaattgcccaatgaaatgcattgtagtagaagtagaccaaaccaaggccatataaaaacgcagcattcttccagtagtcagcctgtaaactgtaatatctctgatatgcagataatgcttttgaataatcttccaacaagaggttgaagtgacctaattggcaaaagaagtcagactccacttttccttcagcttttaagattaaagattcgtagcagcgaacagccttgcctagtagggtcttcgttctggcgccatcttcatgaagcctcacgaacccgaagagacggctgtagagagagagacacagagcttgttaatggtctgagaaagccagtgacttgctccttcccgagtccaagagcgacagcgacagattggtgagtgccaagctgaggatgaccccgtcatcaacgtgggcaagctgcgtccaggccttcccggagagtatcgccagccaaccaggcgggtgatggaggtgcgtacctgtccatgccaccaagcgcctccctttcctcgactgtcaggctaacagactcctcttcactctcgcggctcgcttttccttccgccattttctttgcctcacgacgatacccaaccttaatcgagtagttgaaaagacgccttcaatcgctgcttgagactgtgacgccaattttatcgcctcctcagcggccgcaaggaaaaaagctgaggcaaagacttaagctaccgaagcacgggcagcggaactcggctacctggatcacatctgggaaactacagggaaggcagaagctcgcagtgctggagagcacagcagaatttcttaaaatcacaaactttgccagcaccagcacaaagttgtaattgtgtcacgggcgaaccccacgcagaacgcgcctaatgtaccgagctcgatc

SEQ ID NO: 355793 - DNA, 1083 bp, Homo Sapiens
  misc_feature (1032)..(1032): n is a, c, g, or t
  misc_feature (1065)..(1065): n is a, c, g, or t
  misc_feature (1076)..(1076): n is a, c, g, or t
cttggtgctaggagtgtgcgtggcaggagaggcggggcaaatttgctgagctttctcgcgggcttgcagctgcggcaagtgctggcggcggctgctcgcgcaagtcagctggcgtgggaactaccctttgtagctgagaacggcttgtttattgctacaaagactctattgacattggtagcttcagcggcagcagcttcttacggtataaagctgttgcttcctgaagaggctacaagcatccttccctaggactgctgtaagctttgagcctctagcaggagacatgcctcggggacgaaagagtcggcgccgccgtaatgcgagagccgcagaagagaaccgcaacaatcgcaaaatccaggcctcagaggcctccgagacccctatggccgcctctgtggtagcgagcacccccgaagacgacctgagcggccccgaggaagacccgagcactccagaggaggcctctaccacccctgaagaagcctcgagcactgcccaagcacaaaagccttcagtgccccggagcaattttcagggcaccaagaaaagtctcctgatgtctatattagcgctcatcttcatcatgggcaacagcgccaaggaagctctggtctggaaagtgctggggaagttaggaatgcagcctggacgtcagcacagcatctttggagatccgaagaagatcgtcacagaagagtttgtgcgcagagggtacctgatttataaaccggtgccccgtagcagtccggtggagtatgagttcttctgggggccccgagcacacgtggaatcgagcaaactgaaagtcatgcattttgtggcaagggttcgtaaccgatgctctaaagactggccttgtaattatgactgggaattcggacgatgatgcacaggttgaagctatccctcaattcaggtgcctaggaggttattccgccccttaagtagatctgaggcagacccttgggggtgtaaaagagagtcacaggtaccccaaggagtagatgccagggtcctaagttgaanatgatgtcgattgggggcggggacactgtattnatatttgtgtnagtgtca

SEQ ID NO: 355794 - DNA, 1531 bp, Homo Sapiens
  misc_feature (23)..(23): n is a, c, g, or t
  misc_feature (45)..(81): n is a, c, g, or t
agactagtataggggaaccggangctctaccgcggtggcggccgnnnnnnnnnnnnnnnnnnnnnnnnnnnnnnnnnnnnnatcaggccaaatcggccgagctcgaattcgtcgagagcgggacgggtgctggcggcggctgctcgcgcaagtcagctggcgtgggaactaccctttgtagctgagaacggcttgtttattgctacaaagactctattgacattggtagcttcagcggcagcagcttcttacggtataaagctgttgcttcctgaagaggctacaagcatccttccctaggactgctgtaagctttgagcctctagcaggagacatgcctcggggacgaaagagtcggcgccgccgtaatgcgagagccgcagaagagaaccgcaacaatcgcaaaatccaggcctcagaggcctccgagacccctatggccgcctctgtggtagcgagcacccccgaagacgacctgagcggccccgaggaagacccgagcactccagaggaggcctctaccacccctgaagaagcctcgagcactgcccaagcacaaaagccttcagtgccccggagcaattttcagggcaccaagaaaagtctcctgatgtctatattagcgctcatcttcatcatgggcaacagcgccaaggaagctctggtctggaaagtgctggggaagttaggaatgcagcctggacgtcagcacagcatctttggagatccgaagaagatcgtcacagaagagtttgtgcgcagagggtacctgatttataaaccggtgccccgtagcagtccggtggagtatgagttcttctgggggccccgagcacacgtggaatcgagcaaactgaaagtcatgcattttgtggcaagggttcgtaaccgatgctctaaagactggccttgtaattatgactgggattcggacgatgatgcagaggttgaggctatcctcaattcaggtgctaggggttattccgccccttaagtagatctgaggcagacccttgggggtgtaaaagagagtcacaggtaccccaaggagtagatgccagggtcctaagttgaaaatgatgtcgattgggggcgggggacactgtatttgatatttgtgatcagtgatcattgttcaactgcgaaatagagtgtttgcttttgataatggaaaattgtattcgttttaaaattccgtttgttgagaataacaatatgtttaaaaatataattgaacaaatttttttctttgtttcctgtcattgacatttagtataacagttttgctaacgttctaaaatgaagtcgttccatcataatctatgatcttgtacagcacttatagaaataagctgttcttttgaagttgaaatacccagtaaaatgttgaagaaggatggaggatttcttcatatctgacgtttctgaaaccctttgtgtctgctgttgtgtgaagattgacatttaccatgattttccttagttactgcagaacatagagaaaaataaaagcctaacgaatagtaaaaaa

SEQ ID NO: 355795 - DNA, 484 bp, Homo Sapiens
  misc_feature (67)..(67): n is a, c, g, or t
  misc_feature (72)..(72): n is a, c, g, or t
  misc_feature (195)..(195): n is a, c, g, or t
ccctttgtagctgagaacggcttgtttattgctacaaagactctattgacattggtagcttcagcgncacangcttcttacggtataaagctgttgcttcctgaagaggctacaagcatccttccctaggactgctgtaagtttgagcctctagcaggagacatgcctcggggacgaaagagtcggcgccgctanatgcgagaccgcagaagagaaccgcaacaatcgcaaaatccaggcctcagaggcttccgagacccctatggccgcctctgtggtagcgagcacccccgaagacgacctgagcggccccgaggaagacccgagcactccagaggaggcctctaccacccctgaagaagcctcgagcactgcccaagcacaaaagcctttcagttgccccggagcaatttttcaggggcaccaagaaaagtcttcctggatgtctataattaggcgttcatctttcattcatggggcaaca

SEQ ID NO: 355796 - DNA, 2396 bp, Homo Sapiens
  misc_feature (1517)..(1525): n is a, c, g, or t
tgcctatcttgcgtgtgcgtgtgcgtgtgctcagcctagcgtgaggggcacctgctcgtctgggctcacagcgaaggcagcctcgccgcgagctgccgctgccgcttgctgcctgccactggtgttgccgctctcaggcgccaggctccccgtcgccgccgccgccgcctcgccagccagagttgggctccgtgggcttcccccctcgcagactcagtccttccccgctgcctgcaagtcagcctggctccgagtcacgtgtcagtgcctgaggcagagactgcgagaaaaaaacgcgcttcattccttcttccaccgccatactgtattttatactaaatctcatttttatcccaacattttactcccgctcggattaaagcaaggagagccaatcatgactggcaaaacacagaccagcaacgtcaccaataagaatgaccccaagtccatcaactcccgtgttttcatcggcaatctaaatacggcaattgtcaagaaagttgacattgaagccattttttcaaagtatggaaaaatagttggatgttccgttcacaaaggttatgcatttgtacagtacatgagtgagcgacatgcaagagctgcagtggctggagaaaatgccagagtcatcgccggccaaccacttgatatcaacatggcaggagagcccaaaccatacagaccaaaacctggaaacaagaggcccctttctgcactttacagacttgaatcaaaggaacctttcctgtctgttggcggttatgtctttgactatgattactacagagatgatttctacaatcggttatttgattaccacgggcgtgtgcctccaactccccgtgcagtaattccgctgaagcgtcccagagtggcagtcacaacgactcgcagggggaaaggagtcttttccatgaaaggtggatcgagatctactgccagtgggtcaacaggttctaaattgaaatcagatgagttacagaccatcaagaaagaattaacccagatcaaaactaaaattgactccttgctagggcgcctggagaagattgagaaacagcagaaggcggaggcagaagctcagaagaagcaattggaagagagtctagtgctgatccaagaggaatgtgtgtcagagattgcagatcactctacagaggagcctgctgaaggagggccagatgccgatggagaagagatgacagatgggatagaggaggacttcgatgaagatgggggtcatgagctgtttctacagataaagtgatctgaaataacgcatgatgccacaaagcagaaaagagaaactgtgacaacccccagaaatgtgaaaggaggtttcttactggacagcagcatctttggttcaatttatataaaaacccaaataaataaaatggacagtattgctcagttttagaaattccatttcttctatgttttaagctgtacaattgtcaggtttttatggtttaaattgtaaatgtgttttcccctttgctaattatggnnnnnnnnncagtcttaaaatgtgaaaggcatttatgaatggtaaggggagacactatatacaaatgtatatttgtaaaagctatttttatgattagcatgtttcactgttgatcatatataaagtcaggtgatattgcaattctgtatttaaagcttatttccaacaatgtcatgtaagaaaagatgcatcttatgctagtttttataatttatttataatttatagtttaaagtacttcagatcataatgataaaatacttgaaaaagttatatttctgccctgtataagcaccctttttattaataaagaatgcagatatttcagatgtgatataatagttaaagaactgttggtttgatctgtgattaagttgagcatgctccgctctactgaactaaatgatccaattattacttcagtctgggtatgagattccatggacaagtaaggactagattgccaaggaaaagactgtcttgcccttggatccaaaagtttaaattagtgcatacatcatgtcatttcacctcctgttcctaggaactctccattcccaagcattgccagtgttttccagataatcttagctgttgtcttgtgctgtggaaatggaagaaaccatcttcacagactgtaggagaattcaacatataatttcttaataaatactgtttcttttaaaacaaaataaaaattaaacccccaaatccgttaattctttaaaaaccggtttcccatttttccaattttcaaaaggttattatcaatggtttgcagaaaactctaattaagttgatttaattttagacggagcagagcatttcaccggccccattatcgtgagctactttatttttccccgggcagggggccttg

SEQ ID NO: 355797 - DNA, 473 bp, Homo Sapiens
  misc_feature (449)..(449): n is a, c, g, or t
  misc_feature (454)..(454): n is a, c, g, or t
atgagttacagaccatcaagaaagaattaacccagatcaaaactaaaattgactccttgctagggcgcctggagaagattgagaaacagcagaaggcggaggcagaagctcagaagaagcaattggaagagagtctagtgctgatccaagaggaatgtgtgtcagagattgcagatcactctacagaggagcctgctgaaggagggccagatgccgatggagaagagatgacagatgggatagaggaggacttcgatgaagatgggggtcatgagctgtttctacagataaagtgatcttgaaataacgcatgatgccacaaagcaggaaaagagaaactgtggacaacccccagaaatgtggaaagggaggttttctttactgggacagcagcatcttttggtttcaattttattattaaaaaccccaattaattaaattgggacatntttgntcagttttttaggaatttt

SEQ ID NO: 355798 - DNA, 972 bp, Homo Sapiens
  misc_feature (952)..(952): n is a, c, g, or t
aactgtcattaaaatggactctagaagggctcgaggacctaacttgcctgatgagcaaaatccagaaatataccacggcaggcccagacagccccagctagttcttctacacttaagcagaaaataatccaaaaccaatagatgattgtagaatatagaggtttttgttttataatatttcttcctttaagtcagcataaagttaaatctggacaaaaaacacataaaagcaagatgtagaatgatgaatcttaattataaatattgataaccaaagtcatgatactaataagtaaagaacatctcaggaatacaataatgatttggtcttaagtattctattaatataattaaacatactactagagcaaaggaaaagaccttctgataatccctctggacactgagaaggctttgacaaaaatctaacatctacattttccccagagagtcttaatagtttgagaacacacagatacttttttattatggcaaggaaaatacatgtcttcatacaagttaaacgctgagacattaaaacgtcccactgatgtcacgaacaagataagcatgccacctgaatcactgtgactcaacactgatctcaaatcaactagatacaagaaagaaataagagacacattggaaaggagaagtcaaaagtataccttagaaacaagtaggaatcacaatttgtggttgattataacattcatacataaaaaccaactactttcttatacaatgggataaaatagaaaataaagtggaataaatcattctattgaaaatgatagccaaatgataaaacatctagaaataaactataaattcaaagcaccttagtgaacaaaatcataaaacactactaagttacataaaattagacttaaacacaagatttcatgcttttgaataggaagactcaatctgtaaattcattgtgactctnaattgaaaaaagattcatat

SEQ ID NO: 355799 - DNA, 1517 bp, Homo Sapiens
  misc_feature (95)..(154): n is a, c, g, or t
  misc_feature (500)..(535): n is a, c, g, or t
aggaatgtgcagtacagaccaaaatatataacaccttcagtgaaaaaggaggttcactatgttgggccgtagggacttgatctcatatcaacagnnnnnnnnnnnnnnnnnnnnnnnnnnnnnnnnnnnnnnnnnnnnnnnnnnnnnnnnnnnnaaactgcgatcttttagtggggcctcttctctcttttgacttaagcatgttgtcccttaagaaaacctgaaggctactactgtgatacactacttgagagatggattgttgcgctttcttctacagtctttacaaggagtagattataaagacagaagatgttaaccattgcattaatgtttggaagctgacagtcttctagatttctgctagcaaactgatatgaggtagagtcctgaaagatctttcagcaatttcattttcttgggataagtgagtcactttcagaacagtgtgtgttgtagaattttttggttgtggctgctctactcagattgcatagagnnnnnnnnnnnnnnnnnnnnnnnnnnnnnnnnnnnngtcagattttttgaaacatcttcatagtgtatcatcctgaaaactgaatagtcactttgaggttattgctttttctttccaggtcagttagccaactaaaaaggccccgaaaaaactggcttcatggtccatgtctatcaagtgctcatttgttacagaaacaaaaattctgtcattttccttaagctcaaatattcccccttgatagatggaatagagtccatattctgcatctttagaccaacaactatttctagcacttttcatcaacaatatagggtcaggataacttgtgtatttgtaaatatattggaccatttgtttgtcgttctttgtgttttcttttatttcctcctgaaatcgaaagtatgtttgggaatagatgtagtaaaaccctttttcatggatgaccagttcaccattcctcaagtgcaagttgctcaggaatgaatgcccactccttgatgattcccaggagtttattttgcggcccagagccttttcattcttggagtttggagaagacaatgtgttgcttcttcctctggtcccagttatgtgagctgctactctctgaggacctctttctctcactaggggagaaatattttgttgcttttcttgaactgtagaaatggtttcctcagaggttctcaaaatcatctttctaacgagctgacggagttgccacttgacttgccagcaggggctgttcatactctcttcgtcattggggtcccaataactgtcatcttcttttaagaaacaagcaatgccacttttggagtacttgtcctgcatctgcttcagctcgttggtaaagtacacgtaagttacagccacacagagagactgcaggagcactgtgaagatcacgatcagcacgcaggtctgtcccaggctgggtcccccctggacctccatcatagccatgatcctgtcagagtctgactgctgtaagtcagccaggcagccggtcccc

SEQ ID NO: 355800 - DNA, 1326 bp, Homo Sapiens
  misc_feature (211)..(211): n is a, c, g, or t
  misc_feature (261)..(261): n is a, c, g, or t
  misc_feature (264)..(264): n is a, c, g, or t
  misc_feature (294)..(294): n is a, c, g, or t
  misc_feature (1280)..(1280): n is a, c, g, or t
gttcttcgccctatggggctggtggctgatgttgaccctgacgtcccgccggatgcgttcgtttaggtttcgcacactctcggccgccacgtcccctttcggaggttgctgctccttcccgcgccacaggactctgaggtcggcgaggatgcctccggcgtcgcagcggcggcgggcagcgctcgttgtaggcggagcagttctccttgtncgcatccaccacggccacgtcgaaggtgccggcctcgcccgccgccagcngcncgtccagggtctccaaggcgggcttcagcnggaggtcgatcttgtgccccgcctcggcctgcggagggagcgggttagccgttgcgcccccgcctggggctgcagagctaggcgcgggcgctcacctgcctccacaggggccgtcccagccccgggggctgcgcgtccacctcgcaggtcaccacgcgcccgtccgcgggcagcgccagggccagggccagggcggagtagcccgtgaaggtgcccaggtccagcgccttcttggcctggatgagccgcgccagggtggccaagagctgggcctgcacgcaggtcatcatagaatccccctgcggctgctccagggtcagctgcgtgaaaggagagggtggcaccagccatgcaggtcacccaccttcgccctgggggtcccaagccccaggggcgcggttctgggcgtggcctgggggactggcccttcggaacgcccaccgcacccggcccagggaagccggaagcctcagggagggccagggcccagcccaaggtcacacagccacgtgggacccgcaggggtctgagagggacgcccgtttccgtcccgcgccctgctgaacagcctcaggttcgcagcgccgggtgctcccgcatggagcggctcagaagaaactgccacaggcggctgtcctcggggggaagcaggcactgctctcgccggcctcgccatggggggcaccgcctcctgacggggagagggtgttggattaacctgagccacgccgcgccctactctgcgcccgcccacccgcccgccgggaccaggtcctgctcacccaggaagaggccagtggcgaaggcggcgcccagtgcggctgagcccagggccagcgcggcggggacggagagccggggcaccggctgggtcatggcgcgggcaggaggcggcgggaggcagtgacaggtcacgtgagctggagctcctgggacaggtctcggactcgcgggcccgccgggctccaccttgtcggggcactacnccgcggagccgcggtcatcccgggaattccggaccggtaccagcct

SEQ ID NO: 355801 - DNA, 988 bp, Homo Sapiens
acgtgacctgtcactgcctcccgccgcctcctgcccgcgccatgacccagccggtgccccggctctccgtgcccgccgcgctggccctgggctcagccgcactgggcgccgccttcgccactggcctcttcctggggaggcggtgccccccatggcgaggccggcgagagcagtgcctgcttccccccgaggacagccgcctgtggcagtatcttctgagccgctccatgcgggagcacccggcgctgcgaagcctgaggctgctgaccctggagcagccgcagggggattctatgatgacctgcgagcaggcccagctcttggccaacctggcgcggctcatccaggccaagaaggcgctggacctgggcaccttcacgggctactccgccctggccctggccctggcgctgcccgcggacgggcgcgtggtgacctgcgaggtggacgcgcagcccccggagctgggacggcccctgtggaggcaggccgaggcggagcacaagatcgacctccggctgaagcccgccttggagaccctggacgagctgctggcggcgggcgaggccggcaccttcgacgtggccgtggtggatgcggacaaggagaactgctccgcctactacgagcgctgcctgcagctgctgcgacccggaggcatcctcgccgtcctcagagtcctgtggcgcgggaaggtgctgcaacctccgaaaggggacgtggcggccgagtgtgtgcgaaacctaaacgaacgcatccggcgggacgtcagggtctacatcagcctcctgcccctgggcgatggactcaccttggccttcaagatctagggctggcccctagtgagtgggctcgagggagggttgcctgggaaccccaggaattgaccctgagttttaaattcgaaaataaagtgcgggctgggaaaaacacacaaacaggggcgccgctcaaaaatatcctacagaggggccaagtatagggtcca

SEQ ID NO: 355802 - DNA, 1051 bp, Homo Sapiens
  misc_feature (795)..(867): n is a, c, g, or t
cgcgggatgagacttgtctctctcagggcctttcagggaagggttgcggcctgtctgcaagccttagcctctgccggagagagcccccacagctccgaacacctaacaaaggaaacgtaagtgcagctccagtgattggagggggctcctctaagggccaggagaggacttggcaaaaggatcatctctctcccctgaactatggagcatgactgcgaatacaaaataccaaagagccagcgctgagtcagagcctgccggcaattactcttaagcgccatctactggtttgccgccgaaattacaatttcaaaatattctgccagtatagagcacctgtaaaacccagagcaagaatctagccacaaagatcccatacagagccttggccctctgaaagtatccagaaatgaagccaattgactatactcaacatataccacagttaagccctcaaggtaaatgaataatataaaaacaagacgacaaaggaacaccagccctctcaaaagagtcagcacaagaactctggcaattcaaaacgtcaaataagcatactagcccctcagcaaggactgaaatgtccggaatgacagacatagaattcagaatctggataccaaagaagctcatcaagattcaagaggaagtagaaacccaatccaaggaatccagtaaaaatgacccaaaaattgaaagacaaaatagccatttttaaaaagaaccaaactgaactggaatttaaaaattcactacaaaattttcataatagtgttggaagcattaacagaggannnnnnnnnnnnnnnnnnnnnnnnnnnnnnnnnnnnnnnnnnnnnnnnnnnnnnnnnnnnnnnnnnnnnnnnnttttaaatatacaaatcttcagagaggatactcaatctgtatccactgaacaatttctcatttcctgcttcctccagtccggagtaaccaccattctactttttgtttctaagaatttgatcactgtagataacctcatttaagtggaattgtgtagtatttatctttttgtgattggcttatt

SEQ ID NO: 355803 - DNA, 611 bp, Homo Sapiens
  misc_feature (173)..(348): n is a, c, g, or t
  misc_feature (452)..(468): n is a, c, g, or t
tgaactggaatttaaaaattcactacaaaattttcataatagtgttggaagcattaacagaggaatagatcaagctgtggaatctcagagctcaaaaactgattcttcaaatcaactcaatcagataaagaaaaaaattttaaatatacaaatcttcagagaggatactcaannnnnnnnnnnnnnnnnnnnnnnnnnnnnnnnnnnnnnnnnnnnnnnnnnnnnnnnnnnnnnnnnnnnnnnnnnnnnnnnnnnnnnnnnnnnnnnnnnnnnnnnnnnnnnnnnnnnnnnnnnnnnnnnnnnnnnnnnnnnnnnnnnnnnnnnnnnnnnnnnnnnnnnnnnnnnnnntgaagctaacaaatattttattaaaactaaacattaatgtgtttcatgccactgaactgtacacttaaccatggctaaaatggtaatcatattttatcacagtnnnnnnnnnnnnnnnnncactctcaacgctaactgtaacactaactgtaacaattagaccagttagaacaaaaaattatttcttatgggaaggtgttctatcattgacatagtttaggattgctggcacatggtaataataaaaagcacactacatgtaa

SEQ ID NO: 355804 - DNA, 1050 bp, Homo Sapiens
  misc_feature (949)..(979): n is a, c, g, or t
  misc_feature (990)..(990): n is a, c, g, or t
  misc_feature (994)..(994): n is a, c, g, or t
  misc_feature (1003)..(1003): n is a, c, g, or t
  misc_feature (1015)..(1015): n is a, c, g, or t
  misc_feature (1035)..(1035): n is a, c, g, or t
  misc_feature (1038)..(1038): n is a, c, g, or t
  misc_feature (1046)..(1046): n is a, c, g, or t
agcaggctggtaccggtccggaattcccgggatctgtggtttcctgagttgctgctgctgcggcggcggcagcggcgtctgtgcttgtggaggtgtcggcctctgggcggatgttgacattgtgttgttgttattgctgatggtaatggcggcggcggtggcggcgacggtccagaccccatcccctctgtagccggagccgagacagccgacagcgaactccgcggcctcggagccggcggcagcggcgactcccctcagcctccgccgcctcgcccgccggtaccccggcgccaaccccgggagtcaggccctttgggcaggggagctcggaggctcaggatggggatttcgacgaaatctatgaggaagaggaggacgaggagcgggccctggaggagcagctgctcaagtactcgccggacccggtggtcgtccgcggctccggtcacgtcaccgtatttggactgagcaacaaatttgaatctgaattcccttcttcattaactggaaaagtagctcctgaagaatttaaagccagcatcaacagagttaacagttgtcttaagaagaaccttcctgttaatgtacgttggctactttgtggctgcctttgttgctgctgcacattaggttgcagtatgtggccagttatttgcctcagtaaaagaacacgaagatcgattgagaagttattagaatgggaaaacaataggttataccacaagctgtgcttgcattggagactgagcaaaaggaaatgtgaaacgaataacatgatggaatatgtcatcctcatagaatttttaccaaagacaccgatttttcgaccagattagcatttactttatttatagagactttccaagtatgtggtctttccaatggtgccttgcttggtgctctcctggtggtgacataacattggttctacagaatcgtgtggtgnnnnnnnnnnnnnnnnnnnnnnnnnnnnnnnaaataaccgcntgtnctaagtgtncattttgtcatntttgcaacattatttcatangangtttatantaaa

SEQ ID NO: 355805 - DNA, 603 bp, Homo Sapiens
  misc_feature (400)..(429): n is a, c, g, or t
agagttaacagttgtcttaagaagacttcctggttaatgtacgttggctactttgtggctgcctttgttgctgctgcacattaggtgccagtatgtggccagttatttgcctcagtaaaagaacacgaagatcgattgagaagttattagaatgggaaaacaataggttataccacaagctgtgcttgcattggagactgagcaaaaggaaatgtgaaacgaataacatgatggaatatgtcatcctcatagaatttttaccaaagacaccgatttttcgaccagattagcatttactttatttatagagactttccaagtatgttgtctttccaatggtgccttgcttggtgctctcctggtggtgacataacattggttctacagaatcgtgtggtgnnnnnnnnnnnnnnnnnnnnnnnnnnnnnnaaataaccgcatgttctaagtgtgcatttttgtcaatctttgcaacagttatttcatacagatgtttaatacttaagttattgtgctcttttctgttatgtattctgattttcaaggattacttttttgtattatcaaaaaaatacatttgaacttagcataaaaagtgaaaaa

SEQ ID NO: 355806 - DNA, 1482 bp, Homo Sapiens
gctcccgggacagccctcggagaaactgcatcatcctcactaatgatccacttcctcctcagggaataaaggctcagggaccggcagttctactctggagcccaccagcctctcagagcctccggtgactggcctgtgtctccccctggatggacatgtggacggcgctgctcatcctgcaagccttgttgctaccctccctggctgatggtgccacccctgccctgcgctttgtagccgtgggtgactggggaggggtccccaatgccccattccacacggcccgggaaatggccaatgccaaggagatcgctcggactgtgcagatcctgggtgcagacttcatcctgtctctaggggacaatttttactttactggtgtgcaagacatcaatgacaagaggttccaggagacctttgaggacgtattctctgaccgctcccttcgcaaagtgccctggtacgtgctagccggaaaccatgaccaccttggcaatgtctctgcccagattgcatactctaagatctccaagcgctggaacttccccagccctttctaccgcctgcacttcaagatcccacagaccaatatgtctgtggccatttttatgctggacacagtgacactatgtggcaactcagatgacttcctcagccagcagcctgagaggccccgagacgtgaagctggcccgcacacagctgtcctggctcaagaaacagctggcggcggccagggaggactacatgctggtggctggccactaccccgtgtggtccatagccgagcacgggcctacccactgcctggtcaagcagctacggccactgctggccacatacggggtcactgcctacctgtgcggccacgatcacaatctgcagtacctgcaagatgagaatggcgtgggctacgtgctgagtggggctgggaatttcatggacccctcaaagcggcaccagcgcaaggtccccaacggctatctgcgcttccactatgggactgaagactcactgggtggctttgcctatgtggagatcagctccaaagagatgactgtcacttacatcgaggcctcgggcaagtccctctttaagaccaggctgccgaggcgagccaggccctgaactcccatgactgcccagctctgaggcccgatctccactggtgggtgggtgggccctgccggggaccctgctcacagcgcaggcttttcctcgcaacctgtgggcgctgcagcagggcaggaaggggaaacacagctgatgaactgtggtgccaaatgacccttgtggcacagatgcccacgtatgtgaaacacacatggacatgtgtcccagccacagtgttatgctctgtggctggctcacctttgctgagttccggggtgcaatgggggagggcagggagggaaagcttcctcctaacatcaagcatctttctgttcactgatgttcaataaaagaatagttgccaaggact

SEQ ID NO: 355807 - DNA, 968 bp, Homo Sapiens
gagccctcgagcagggcggatcggccgctgcctgcttaaagctggggccgccaggagtgcgatcgcctgcggatctgcagctgggcaccggccgcaacgcccgccccgcgacggcagggaataaaggctcagggaccggcagttctactctagagcccaccagcctctcagagcctccggtgactggcctgtgtctccccctggatggacatgtggacggcgctgctcatcctgcaagccttgttgctaccctccctggctgatggtgccacccctgccctgcgctttgtagccgtgggtgactggggaggggtccccaatgccccattccacacggcccgggaaatggccaatgccaaggagatcgctcggactgtgcagatcctgggtgcagacttcatcctgtctctaggggacaatttttacttcactggtgtgcaagacatcaatgacaagaggttccaggagacctttgaggacgtattctctgaccgctcccttcgcaaagtgccctggtacgtgctagccggaaaccatgaccaccttggcaatgtctctgcccagattgcatactctaagatctccaagcgctggaacttccccagccctttctaccgcctgcacttcaagatcccacagaccaatgtgtctgtggccatttttatgctggacacagtgacactatgtggcaactcagatgacttcctcagccagcagcctgagaggccccgagacgtgaagctgggcccgcaacacagctgtcctggctcaagaaacagctggcggcggccagggaggactacgtgctggtggcttggcactacccccgtgtggtccattagccgagccacgggctacccactgcctggtcacgcagctacggccctggtggcccattacgggggtcctggctactgtgcgccacgaatcccaatctggcgtcctgcgatgaaatgggtgggacctct

SEQ ID NO: 355808 - DNA, 1116 bp, Homo Sapiens
  misc_feature (1066)..(1074): n is a, c, g, or t
ggaccggtccggaattcccgggatctcgagcagggcggatcggccgctgcctgcttaaagctggggccgccaggagtgcgatcgcctgcggatctgcagctgggcaccggccgcaacgcccgccccgcgacggcagggactgaagggactcctgaatgtccgcgggacgtgtcgcggcggcgcccagcacggaggaggcaggcagggagggaataaaggctcagggaccggcagttctactctggagcccaccagcctctcagagcctccggtgactggcctgtgtctccccctggatggacatgtggacggcgctgctcatcctgcaagccttgttgctaccctccctggctgatggtgccacccctgccctgcgctttgtagccgtgggtgactggggaggggtccccaatgccccattccacacggcccgggaaatggccaatgccaaggagatcgctcggactgtgcagatcctgggtgcagacttcatcctgtctctaggggacaatttttacttcactggtgtgcaagacatcaatgacaagaggttccaggagacctttgaggacgtattctctgaccgctcccttcgcaaagtgccctggtacgtgctagccggaaaccatgaccaccttggcaatgtctctgcccagattgcatactctaagatctccaagcgctggaacttccccagccctttctaccgcctgcacttcaagatcccacagaccaatgtgtctgtgggccattttttatgcttggacacagtgacactatgtgggcaactcaaatgactttcctcagccagcaagccttgagaggcccccgaggacgtggaagcctggccccgcacacaggctgttcctgggctccaagaaaccaacttgccggcgggcccaggggagggactaacctgcctgggggggctgggccacctacccccgtggtgggccccttaaccccgagacacggggcccctaccccactggccctgggtcaaaacaccccaaggggcccaccggcttgggccaacaccaccggggggttcacgtgcccaaacgtnnnnnnnnncccccgcaattcccatttttttgaaccaacctcgccaaaaaa

SEQ ID NO: 355809 - DNA, 783 bp, Homo Sapiens
gtgtgagccaccgtgcctggcctgaaggtcatttttataaagatctctccacgtcttagatttgattctccctttaaatatttttctcattgacatttgaaagcacctgaccttatataaaatgaacaattttcataactccataaaaggagaattatggcatcatctactatttctttctcttgtctcataaatctaaaccatcaacctgcttatttttgtatactgtcacactgtgtattccctgcattgaatgcctgtctattgacattatctataaaaattgtgggaagttttctgcaccctgaaatttctgttatgcggattaaatatccactatccatgtttttccaagtcttacagcagaaagggtaaatgcagccctcacagcagcctgttgttcgtcctgcaaatgtgtttccatcacattacacaaagcctctttgtcttcgtggttctaccctactaataagttttttaaaaaattatgtaatgtgtgtatatacaaatacctatatgtatgtgtgtacacatacagctgatatctgctgagattatgtatgcatgaactatagaattaacttgtaattttaagaaaataaattattttgtaaagataaatctcatgtttaagaagaggaattacagttgaatcatttagggatgcctcagcctaaacataatatggaaaaagccataaccaaaagtcattttagagtactgctaggttactcaacctatcatcacatttaattaaaatgtcagtttgaaccatgaaaaaaa

SEQ ID NO: 355810 - DNA, 1359 bp, Homo Sapiens
  misc_feature (591)..(628): n is a, c, g, or t
ggaagcaagcttagctgtacaccctgagtcttgcaaagctgcagccccacccaggagcagggtggtggctggggcgatggtggacgccctgaagatgtcccatggctactgaaggggctgcccagttagggaacagagtggcgggcatggtgtgtagcctatgggtgctgctcctggtgtcttcagttctggctctggaagaggtattgctggacaccaccggagagacatctgagattggctggctcacctacccaccaggggggtgggacgaggtgagtgttctggacgaccagcgacgcctgactcggacctttgaggcatgtcatgtggcaggggcccctccaggcaccgggcaggacaattggttgcagacacactttgtggagcggcgcggggcccagagggcgcacattcgactccacttctctgtgcgggcatgctccagcctgggtgtgagcggcggcacctgccgcgagaccttcaccctttactaccgtcaggctgaggagcccgacagccctgacagcgtttctttctggcacctcaaaagctggaccaaggtggacacaattgcagcagacgagagcnnnnnnnnnnnnnnnnnnnnnnnnnnnnnnnnnnnnnntgcagcgggggctgtgggaccccacgcggctgggcagcgggctggactgcaactgaacgtcaaaaagcggagcttagggcctctcacccaacgcggattctacgtggctcttacaggacacgggggcctgcctggccctggtcgctgtcaggctcttctcctacacctgccctgccgtgctccgatcctttgcttcctttccagagacgcaggccagtggggctgggggggcctaccctggtggcagcatgtgggcacctgtgtggctcatgcagagccagaggaggatggagtagggggccaggcaggaggcagcccccccaggctgcactgcaacggggagggcaagtggatggtagctgtcgggggctgccgctgccagcctggataccaaccagcacgaggagacaaggcctgccaagcctgaacacgggggctctataagtcttctgctgggaatgctccctgctcaccatgccctgaccgcagtcacgctcccaacccagcagcccccgtttgcccctgcatggagggcttctaccgggccagttccgacccaccagaggccccctgcactggtcctccatcggctccccaggagcttaggttagacggtgcaagggctcaagcactcattgctacacctggcgcctgcctcgggagctggagggtcgaggggacctgctcttccatgtagtgtgcaaggagtgtgaaggaccgccaaggaacac

SEQ ID NO: 355811 - DNA, 1676 bp, Homo Sapiens
  misc_feature (69)..(120): n is a, c, g, or t
  misc_feature (742)..(755): n is a, c, g, or t
  misc_feature (1214)..(1214): n is a, c, g, or t
ccgcctaggccgggagggcgggctcggctccccggaagaagggagtgggaaggcggccaaaggggctgnnnnnnnnnnnnnnnnnnnnnnnnnnnnnnnnnnnnnnnnnnnnnnnnnnnntgcgttcgctccagccgcggctctacagcagcgggcggcgggacccgggacccagcttggcgacggcgatctcgacgcgggcccccaggatctcccggcgccccacctctggagcagcccctgccgccagcgtcaggtccaccccggaatcccagggactctcggcgccgaacggacccgggccgggtgcaacggggtccccggactggagaagacgcgggtggcaccgtgcgagctccaggagccccgggtccactgcgaggcctcggggggcgcagacctgcagagactgcggccaacgggaagaaataaagggattatagtccacccaattcacagacttctgagactcagacacgaggagagatagagaaccgccaatctctagatcaacaagcaaaggaggtgccaagcctgtttgtcttcattgtgacactggagtctagatgctgggaagtccaagatcagggtgccggcatggtcagttcctggcgaaccctctcttctaggtttcagactgccctcttctttgttgtgtcctcgaatggcagaaaaaggggtggctgttggaggaagggaggagagtaaatgaagagaaagaactggaataaccccttgcagnnnnnnnnnnnnnngggaagcaagcttagctgtacaccctgagtcttgcaaaagctgcagccccacccaggtagcagggtggtggctggggccgatggtggacgccctgaagatgtcccatggctactgaaggggctgcccagttagggaacagagtggcgggcatggtgtgtagcctatgggtgctgctcctggtgtcttcagttctggctctggaagaggtattggctggacaccaccggagagacatctgagatgggctggctcacctacccaccaggggagtgggacgaggtgagtgttctggacgaccagcgacgcctgactcggaccttagaggcaatgtcatgtggcaggggcccctccaggcaccgggcaggacaattggttgcagacacactttgtggagcggcgcggggcccagagggcgcacattcgactccacttctctgtgcgggcatgctccagcctgngtgtgagcggcggcacctgccgggagaccttcaccctttactaccgtcaggctgaggagcccgacagccctgacagcgtttcctcctggcacctcaaacgctggaccaaggtggacacaattgcagcagacgagagctttccctcctcctgctgctactgctgctgttgtacctctgcagcgtaggctgtgggaccccacgggcctgagcagcgggctgtactggaactgaacgttaaagagcggaggtttggggtctttcacccatagcggggttctaccgtggccctatcagaaacacggggttcctgcgttggccccttgatcgcttgcaaggcttcttgttctaacacctgtccttgccgggccacagaacctttgctttccttttccagagaccccagcccaagttgggcttgcgggggccccaccctggggggcagctggtggccaccctgggggg

SEQ ID NO: 355812 - DNA, 245 bp, Homo Sapiens
ggcgtatggcttgggcgatgaggccaggcagggcctgttagagaggcacccagcgcatccaagcggctttccagggtggccaggcgggcctccagctcctcgtgctgagcgtgcagctccgatacaaggtcgtacatgacggtctgggtcttggctaggtcggtaagcgtgttagcctggtcgttcagcttcccttgctcgatcttcacactccggagcgctggtgtttccgaacccgggcttgg

SEQ ID NO: 355813 - DNA, 506 bp, Homo Sapiens
ctgacctctaagatgtagggtacgtgtgcacggagtccccactaacactcggctctcaggtccggcctctctggctgagggtcgaagtggacctcatccctgacagcggtgacaagtgcccccaccaccgctggcaggttcctggcggccttcacactccttgcacacgacattgaagagcaggtcccctcgaccccccagctcccgaggcaggcgccaggcttcagtgcctgaccaggcttcagtgcctgaccaggcttcagtgcctgaccaggcttcagtgcctgaccaggcttcagtgcctgaccaggcttcagtgcctgaccaggcttcagtgcctgaccaggcttcagtgcctgaccaggcttcagtgcctgaccaggcttcagtgcctgaccaggcttcagtgcctgaccaggcttcagtgcctgaccaggcttcagtgcctgacctggcttcagtgcctgaccaggcttcagtgcctgaccaggcttcagtgcctgacc

SEQ ID NO: 355814 - DNA, 1028 bp, Homo Sapiens
  misc_feature (16)..(16): n is a, c, g, or t
  misc_feature (55)..(55): n is a, c, g, or t
  misc_feature (966)..(979): n is a, c, g, or t
tttctgtgcctgaccntctgatgtgtcacacagctgccacaagagcgctggagtngctgccgctgcaggctacgggcctggtccggctgcctgacgtgcgtgccggcttctgctgcggggtcatccgagcccacaagaaggccatcgccaccctgtgcttcagccccgcccacgagacccatctcttcacggcctcctatgacaagcggatcatcctctgggacatcgggtgcccaaccaggactacgaattccaggccagccagcggctcacactggacaccacctctatccccctgcgcctctgccctgtcgcctcctgcccggacgcccgcctgctggccggctgcgagggcggctgctgctgctgggacgtgcggctggaccagccccaaaagaggagggtgtgtgaagtggaattcgtcttctctgagggctccgaggcatctggacggagagtggatgggctggcatttgtgaatgaggacatcgtggcctccaaggggagcggcctgggcaccatctgcctgtggagctggaggcagacgtgggggggccggggcagccagtccacagtggcagtggtggtcctggcgcggctgcaatggtcgtccaccgagttggcctacttctcgctcagcgcctgccctgataaggggattgtgctctgtggggatgaggagggcaacgtgtggctctacgacgtcagcaacatcctgaagcagccacccctgctgccggcagccctgcaggcccccacacagatcctgaagtggccccagccctgggcccttggccaggtggtgaccaagaccatggtgaacacagtggtggccaatgcctccttcacctacctcaccgccctgacggactccaacatcgtagccatctgggggaggatgtagcctcacaccatcgcaaaggaccagggacacagctaactaacttattcagctttgggccgatnnnnnnnnnnnnnntctttcagtgaatatttttattaaactctactgtggacaagaaaaaaaa

SEQ ID NO: 355815 - DNA, 1039 bp, Homo Sapiens
  misc_feature (910)..(910): n is a, c, g, or t
  misc_feature (925)..(925): n is a, c, g, or t
  misc_feature (953)..(953): n is a, c, g, or t
  misc_feature (955)..(955): n is a, c, g, or t
  misc_feature (958)..(958): n is a, c, g, or t
  misc_feature (1037)..(1037): n is a, c, g, or t
cgcggacgccagtgccgggctccaggagacgcagggcgacgccacacgccggggtggccgactgggtcagcgcgggctgcgcctcctcgccatgggccccctctcggcgcggctgctaatgcagcgcgggcgccccaagagcgaccggctggggaagatccggagtctggagtaagagccgggcagcggcctgtcaggattggagctgctttccgagcacctggaccccaaactcctgtgccgcctgacgcagctgcaggagcttgacctgtctaacaaccacctggagacgctgccggacaacctgggcctgtcccacctgcgtgtcctccgctgcgccaacaaccagctgggggatgttactgccttgtgccagttccccaagctcgaggaactcagcctggagggcaaccccttcctgacggtcaatgacaacctgaaagtctcctttctcctgcccacgctccgtaaggtcaatggcaaggatgcgtcctcaacttactctcaggtggagaacctgaatcgggagctgaccagcagggtcacagctcactgggagaagttcatggccacactgggtcctgaagaggaggctgagaaggcccaggcggactttgtgaagtcggctgtcagggatgtccgctacgggcccgagtccctcagcgagttcacccagtggcgggtgcggatgatctctgaggagctggtggccgccagtaggacccaggtgcaaaaggctaacagcccagagaagcccccagaagctggagctgcccacaagcccagggccagactggcggccttgaaacggccagacgacgtcccactcagcctctctcccagcaagcgggcgtgtgcctccccgtcggcccaggtggagggcagcctgtggcaggctccgatggcagcnacctgctgtgaagtnggagccctgcacttctgcagtgcacagnanaanaaagccccaggactcgagaccagtgtgggctgtgcttcgagcggctgggagagggggcaatccagacgtggcagtgcgngg

SEQ ID NO: 355816 - DNA, 1059 bp, Homo Sapiens
  misc_feature (933)..(933): n is a, c, g, or t
  misc_feature (963)..(963): n is a, c, g, or t
  misc_feature (968)..(968): n is a, c, g, or t
  misc_feature (986)..(986): n is a, c, g, or t
  misc_feature (999)..(999): n is a, c, g, or t
  misc_feature (1002)..(1002): n is a, c, g, or t
  misc_feature (1010)..(1010): n is a, c, g, or t
  misc_feature (1020)..(1020): n is a, c, g, or t
  misc_feature (1035)..(1035): n is a, c, g, or t
  misc_feature (1037)..(1037): n is a, c, g, or t
  misc_feature (1053)..(1053): n is a, c, g, or t
  misc_feature (1055)..(1055): n is a, c, g, or t
tccgcttcttccggtcgttaacgcccacgggctcgcgcggcgccgcctcctgggctcagttaccgcggacgccagtgccgggctccaggagacgcagggcgacgccacacgccggggtggccgactgggtcagcgcgggctgcgcctcctcgccatgggccccctctcggcgcggctgctaatgcagcgcgggcgccccaagagcgaccggctggggaagatccggagtctggacctgtcaggattggagctgctttccgagcacctggaccccaaactcctgtgccgcctgacgcagctgcaggagcttgacctgtctaacaaccacctggagacgctgccggacaacctgggcctgtcccacctgcgtgtcctccgctgcgccaacaaccagctgggggatgttactgccttgtgccagttccccaagctcgaggaactcagcctggagggcaaccccttcctgacggtcaatgacaacctgaaagtctcctttctcctgcccacgctccgtaaggtcaatggcaaggatgcgtcctcaacttactctcaggtggagaacctgaatcgggagctgaccagcagggtcacagctcactgggagaagttcatggccacactgggtcctgaagaggaggctgagaaggcccaggcggactttgtgaagtcggctgtcagggatgtccgctacgggcccgagtccctcagcgagttcacccagtggcgggtgcggatgatctctgaggagctggtggccgccagtaggacccaggtgcaaaaggctaacagcccagagaagcccccagaagctggagctgcccacaagcccagggccagactggcggccttgaaacggccagacgacgtcccactcagcctctctcccagcaagcgggcgtgtgcctccccgtcggccaaggtggagggcagccntgtggcaggttcgatggcagcagcctgctntgaantggagccctgcacttctncagtgcaaagaanaanaaagcccnaggacttganaccagctttgggctntnctttgagcggctgggngngggg

SEQ ID NO: 355817 - DNA, 2055 bp, Homo Sapiens
  misc_feature (1675)..(1675): n is a, c, g, or t
  misc_feature (1713)..(1714): n is a, c, g, or t
  misc_feature (1757)..(1757): n is a, c, g, or t
  misc_feature (1832)..(1832): n is a, c, g, or t
  misc_feature (1838)..(1838): n is a, c, g, or t
  misc_feature (1877)..(1877): n is a, c, g, or t
  misc_feature (1880)..(1880): n is a, c, g, or t
  misc_feature (1892)..(1892): n is a, c, g, or t
  misc_feature (1898)..(1899): n is a, c, g, or t
  misc_feature (1907)..(1907): n is a, c, g, or t
  misc_feature (1978)..(1978): n is a, c, g, or t
  misc_feature (1987)..(1987): n is a, c, g, or t
  misc_feature (1990)..(1990): n is a, c, g, or t
  misc_feature (1994)..(1995): n is a, c, g, or t
  misc_feature (1999)..(1999): n is a, c, g, or t
  misc_feature (2007)..(2007): n is a, c, g, or t
  misc_feature (2010)..(2010): n is a, c, g, or t
  misc_feature (2021)..(2021): n is a, c, g, or t
  misc_feature (2024)..(2024): n is a, c, g, or t
  misc_feature (2032)..(2032): n is a, c, g, or t
  misc_feature (2050)..(2050): n is a, c, g, or t
ttccttccccgctggtaccggtccggaattcctgggatccagtgccgggctccaggagacgcagggcgacgccacacgccggggtggccgactgggtcagcgcgggctgcgcctcctcgccatgggccccctctcggcgcggctgctaatgcagcgcgggcgccccaagagcgaccggctggggaagatccggagtctggacctgtcaggattggagctgctttccgagcacctggaccccaaactcctgtgccgcctgacgcagctgcaggagcttgacctgtctaacaaccacctggagacgctgccggacaacctgggcctgtcccacctgcgtgtcctccgctgcgccaacaaccagctgggggatgttactgccttgtgccagttccccaagctcgaggaactcagcctggagggcaaccccttcctgacggtcaatgacaacctgaaagtctcctttctcctgcccacgctccgtaaggtcaatggcaaggatgcgtcctcaacttactctcaggtggagaacctgaatcgggagctgaccagcagggtcacagctcactgggagaagttcatggccacactgggtcctgaagaggaggctgagaaggcccaggcggactttgtgaagtcggctgtcagggatgtccgctacgggcccgagtccctcagcgagttcacccagtggcgggtgcggatgatctctgaggagctggtggccgccagtaggacccaggtgcaaaaggctaacagcccagagaagcccccagaagctggagctgcccacaagcccagggccagactggcggccttgaaacggccagacgacgtcccactcagcctctctcccagcaagcgggcgtgtgcctccccgtcggcccaggtggagggcagccctgtggcaggctccgatggcagccagcctgctgtgaagctggagcccctgcacttcctgcagtgccacagcaagaacaacagcccccaggacctcgagacccagctgtgggcctgtgccttcgagccggcctgggaggagggggccacatcccagaccgtggccacgtgcggcggggaggctgtgtgcgtaattgattgccagacgggcatcgtgctccacaagtacaaggcacccggcgaggagttcttttctgtggcctggaccgctctgatggtggtcacacaggctggccacaagaagcgctggagtgtgctggcggctgcaggcctacggggcctggtccggctgctgcacgtgcgtgccggcttctgctgcggggtcatccgagcccacaagaaggccatcgccaccctgtgcttcagccccgcccacgagacccatctcttcacggcctcctatgacaagcggatcatcctctgggacatcggggtgcccaaccaggactacgaattccaggccagccagctgctcacactggacaccacctctatccccctgcgcctctgccctgtcgcctcctgcccggacgcccgcctgctggccggctgcgagggcggctgctgctgctgggacgtgcggctggaccagccccaaaagaggagggtgtgtgaagtggaattcgtcttctctgagggctccgaggcatctggacggagagtggatgggctggcatttgtaaataaaacatcatggcctccaaaaaaacaacctgancaccatctacctgtggagctggaagcagacgtgggggnnccggggcagccagtccacggtagcagtggtggtcctggcgcgnctgcaatggtcgtccaccgagttggcctacttctcgctcagcgcctgccctgataaggggattgtgctctgtggnaatgangagagcaacgtgtggctctacgacgtcagcaacatcctnaancatccacccctncttccnncatccctncagccccccacacacatcctgaagtgcccccagccctgggcgccttggccaggtggtgaccaagaccatantaaacacantgntgannaatncctccatnacntacctcaccanccnaacaaacnccaacatcgtaaccatcngttta

SEQ ID NO: 355818 - DNA, 1011 bp, Homo Sapiens
atcagacccaaggttgagcagaaaattgaagtgatacgtgaaattgagatgagtgtggatgatgatgatatcaatagttcgaaagtaattaatgacctcttcagtgatgtcctagaggaaggtgaactagatatggagaagagccaagaggagatggatcaagcattagcagaaagcagcgaagaacaggaagatgcactgaatatctcctcaatgtctttacttgcaccattggcacaaacagttggtgtggtaagtccagagagtttagtgtccacacctagactggaattgaaagacaccagcagaagtgatgaaagtccaaaaccaggaaaattccaaagaactcgtgtccctcgagctgaatctggtgatagccttggttctgaagatcgtgatcttctttacagcattgatgcatatagatctcaaagattcaaagaaacagaacgtccatcaataaagcaggtgattgttcggaaggaagatgttacttcaaaactggatgaaaaaaataatgcctttccttgtcaagttaatatcaaacagaaaatgcaggaactcaataacgaaataaatatgcaacagacagtgatctatcaagctagccaggctcttaactgctgtgttgatgaagaacatggaaaagggtccctagaagaagctgaagcagaaagacttcttctaattgcaactgggaagagaacacttttgattgatgaattgaataaattgaagaacgaaggacctcagaggaagaatagggctagtccccaaagtgaatttatgccatccaaaaggatcagttacttttgtcagaaatccgccttgcctctaaaagcagattttgggctgcagtacggttcagaaaccagatgcagcaaattactattacttaattatactaaaagcaggagctgaaaatatggtagccacaccattagcaagtacttcaaactctcttaacggtgatgctctgacattcactactacatttactctgcaagatgt

SEQ ID NO: 355819 - DNA, 1146 bp, Homo Sapiens
agaagggccgtctggccaatcttgctgcaactatttgctcctgggaagatgatgtaaatcactcatttgcaaaacaaaacagtgtacaagaacagcctggtaccgcttgtttatccaaattttcctctgcaagtggagcatctgctaggatcaatagcagcagtgttaagcaggaagctacattctgttcccaaagggatggcgatgcctctttgaataaagccctatcctcaagtgctgatgatgcgtctttggttaatgcctcaatttccagctctgtgaaagctacttctccagtgaaatctactacatctatcactgatgctaaaagttgtgagggacaaaatcctgagctacttccaaaaactcctattagtcctctgaaaacgggggtatcgaaaccaattgtgaagtcaactttatcccagacagttccatccaagggagaattaagtagagaaatttgtctgcaatctcaatctaaagacaaatctacgacaccaggaggaacaggaattaagcctttcctggaacgctttggagagcgttgtcaagaacatagcaaagaaagtccagctcgtagcacaccccacagaacccccattattactccaaatacaaaggccatccaagaaagattattcaagcaagacacatcttcatctactacccatttagcacaacagctcaagcaggaacgtcaaaaagaactagcatgtcttcgtggccgatttgacaagggcaatatatggagtgcagaaaaaggcggaaactcaaaaagcaaacaactagaaaccaaacaggaaactcactgtcagagcactcccctcaaaaaacaccaaggtgtttcaaaaactcagtcacttccagtaacagaaaaggtgaccgaaaaccagataccagccaaaaattctagtacagaacctaaaggtttcactgaatgcgaaatgacgaaatctagccctttgaaaataacattgttattagaagaggacaaatccttaaaagtaacatcagacccatgatgatatcaataggtcgaaagtaataattgactcttcaggatgcctagaggaggtgaactgatatggagaagacgcagaggagttgatcaagcttatcggaggcacgaagacaggagatcct

SEQ ID NO: 355820 - DNA, 1564 bp, Homo Sapiens
  misc_feature (774)..(821): n is a, c, g, or t
  misc_feature (1536)..(1536): n is a, c, g, or t
gctgggtggcgaattcggcacgaggcaggcgtggcagagggagcagtgcccgagcgcggtttctcttaaggttctgcagggcaaggctgtctgggacaggcttggccatggatccgctctcagagctgcaggatgatctgaccttggatgacaccagcgaggctctgaaccagctgaagctggcctccatcgatgagaagaactggccctcggatgaaatgcctgacttccccaagtcagatgactccaaaagcagctccccggaacttgtcacacacctgaagtgggatgacccatactatgacatcgcccggcaccagatcgtggaggtggcaggagatgacaagtatgggcggaagatcattgtgtttagtgcctgtcgaatgccccccagccaccagctcgaccacagcaagctcctggggtacctgaagcacaccctggaccagtacgtggagagtgactacacacttctgtatctgcaccacggcctgaccagcgacaacaagccctccctcagctggctccgtgatgcctaccgggagtttgaccgcaagtacaagaagaacatcaaggccttgtacatcgtgcatccaaccatgttcatcaaaactctgctcatcctcttcaagcccctcatcagcttcaagttcgggcagaagatcttctatgtgaattacctgagcgagctgagcgagcacgtgaagctggagcagctggggatccctcgccaagtgctcaaatatgacgacttcctgaaatccacacagaagnnnnnnnnnnnnnnnnnnnnnnnnnnnnnnnnnnnnnnnnnnnnnnnnaaccagcagtttggagtctcgctgcagcacctccaggagaagaatccagagcaggagcccattcccattgtactcagggagactgttgcctacttacaggcccacgctctcaccaccgagggcatcttccggaggtcggccaacacccaagtggtccgggaagtgcagcagaagtacaacatggggctgcctgtggatttcgaccagtacaatgagctgcacctgccagcagtcatcctcaagaccttcctccgggagcttcctgagcccctgctcacctttgacctctacccccatgtggtgggcttcctcaacattgatgaaagccagagggtgccagcgacactgcaggtcctccagacgctgcccgaggagaactaccaggtgcttcgtttcctgactgctttcctggtgcagatttctgcacacagtgaccagaacaagatgaccaacactaacctggctgttgttttcggccctaacctgctgtgggccaaggatgcggccatcaccctcaaggccattaatcccatcaacaccttcaccaagttccttctggatcaccaaggggagctgttcccaagcccggaccccagcgggcttctggaacctgggcccctgccccaccagccccttctctggtaagcccgggtttggactcttcctccgggcatcaggggccatgaagcccccgggagagagatgttggagccanccttaggcatgctttgccccactttgtt

SEQ ID NO: 355821 - DNA, 1144 bp, Homo Sapiens
  misc_feature (826)..(826): n is a, c, g, or t
  misc_feature (944)..(944): n is a, c, g, or t
  misc_feature (968)..(968): n is a, c, g, or t
gaaagcctgttgcgtggaagataaggcggcgcgggaagtggacacaggctcagatctaactggactctcgctcctgctggctggacatggaggatttggaggaagatgtaaggtttattgtggatgagaccttggactttggggggctgtcaccatctgacagccgtgaggaggaagacataacagtgttggtgactccagagaaaccacttcgacggggcctctcccaccgaagtgacccaaatgcagtggcacctgccccccagggtgtgaggctcagcctaggccccctcagtccagagaagctggaggagatcctcgatgaggccaaccggctggccgctcagctggagcagtgtgccctgcaggatcgggagagcgcaggcgagggcctgtgggcctcgccgagtgaagcccagtcctcggcgggagacctttgtgctgaaggatagtcctgtccgagacctgctgaccactgtgaactctttgacgcggagcaccccctccccaagcagcctgacgcctcgactccggagtaatgataggaaggggtcagtcagggctctccgggctacatctggaaagaggccctccaacatgaagagggagtcacccacttgcaaatctgttccctgcatccaaaagcccagcatcttctcctcttacccgatcgactcccccagtccgggggagagccgggcccagtgggagagcagcagccagtgaggagaccagagcagccaagttgcggggagcagctgctaaatcttccagtcaactgcccattccctcggccatccccaggcctgccagccgaatgccactncaccagccggagtgtgccacctgggcagaggtgccctacctccggattctctgtcaactcgaaaagggcttccaagaccaagcactgcaggacacagagtggcgggaaagtggacacnaggttcctgtttcccagcgactanatcttccctgtcatgggtgccactcgcagcaatctgcagccccccagggaaggtggcagtccccaggactacccaggtaaagagatcaggacagcaagcaaagacttcagtagcaaacccactacagtcagtacctgggactcgccctctaccccagcagaaccctgcactcccgc

SEQ ID NO: 355822 - DNA, 1735 bp, Homo Sapiens
ggagcgaggcctgggtggcgaattcggcacgagggggagaaagcctgttgcgtggaagataaggcggcgcgggaagtggacacagggtgggctggagctcagatctaactggactctcgctcctgctggctggacatggaggatttggaggaagatgtaaggtttattgtggatgagaccttggactttggggggctgtcaccatctgacagccgtgaggaggaagacataacagtgttggtgactccagagaaaccacttcgacggggcctctcccaccgaagtgacccaaatgcagtggcacctgccccccagggtgtgaggctcagcctaggccccctcagtccagagaagctggaggagatcctcgatgaggccaaccggctggccgctcagctggagcagtgtgccctgcaggatcgggagagcgcaggcgagggcctggggcctcgccgagtgaagcccagtcctcggcgggagacctttgtgctgaaggatagtcctgtccgagacctgctgcccactgtgaactctttgacgcggagcaccccctccccaagcagcctgacgcctcgactccggagtaatgataggaaggggtcagtcagggctctccgggctacatctggaaagaggccctccaacatgaagagggagtcacccacttgcaatctgttccctgcatccaaaagcccagcatcttctcctcttacccgatcgactcccccagtccggggggagagccgggccccagtgggagagcagcagccagcccacccacccccatcagatccgtcctggccccacagccttctaccagcaactctcaacgcctgccccggccgcagggagcagctgctaaatcttccagtcaactgcccattccctcggccatccccaggcctgccagccgaatgccactcaccagccggagtgtgccacctggcagaggtgccctacctccggattctctgtcaactcgaaaagggcttccaagaccaagcactgcaggacacagagtgcgggaaagtggacacaaggttcctgtttcccagcgactaaatcttcctgtcatgggtgccactcgcagcaatctgcagccccccaggaaagtggcagtcccaggacctaccaggtaaagagatcaggacagcaagcaagacttcagtagcaaaccactacagtcagtacctggactcgcctctacccagcagaccctgactccagcagattctggcccagggacaggaggaagagatgccaccagggctggtctcccaggagtagagaccatgggaaatggggtggattaggattgagctggagaagacttaaactctctgggttgaaagaagattaggggaaaagaggtcaccttccagcagtgaaatgaacaaatagaagatgagaagtacaggcaagtggtttgtctttatccacccccactgttgtggtcagccccagagaattttatcttcttccttggcattggttcactggacatttccacgtgagcggcctccgtagctaacctccctgccctctgaggagccatcttcctgaatcgcattctctactggactctggcctgcttggagaggtggcagcaggcacctggtcttcagaaattgtttcctgtgaattctgtgactcctaataggccagtttgtgataagcttactctatgagtcttcatttttctaaaataaagtgaatgtatttttatattctctgt

SEQ ID NO: 355823 - DNA, 1090 bp, Homo Sapiens
  misc_feature (38)..(38): n is a, c, g, or t
  misc_feature (218)..(218): n is a, c, g, or t
  misc_feature (220)..(221): n is a, c, g, or t
  misc_feature (225)..(275): n is a, c, g, or t
accggtccggaattcccgggatgggctccgcggcgcgnctggctcggtgcgcggcgcggctggcgctgcgctccgccccggctgcattgctgcgctcccgtgcccaagggagccacgcgccgcgtgcgcccggcagccggccgcccggaggcagcgcagtccgctggcatgggccccgggggcgccccgagctggggctccgggctgaggcgctaaancnncccnnnnnnnnnnnnnnnnnnnnnnnnnnnnnnnnnnnnnnnnnnnnnnnnnnnatggccgtccggcccggcctgtggccagcgctcctgggcatagtcctcgccgcttggctccgcggctcgggtgcccagcagagtgccaccgtggccaacccagtgcctggtgccaacccggacctgcttccccacttcctggtggagcccgaggatgtgtacatcgtcaagaacaagccagtgctgcttgtgtgcaaggccgtgcccgccacgcagatcttcttcaagtgcaacggggagtgggtgcgccaggtggaccacgtgatcgagcgcagcacagacgggagcagtgggctgcccaccatggaggtccgcattaatgtctcaaggcagcaggtcgagaaggtgttcgggctggaggaatactggtgccagtgcgtggcatggagctcctcgggcaccaccaagagtcagaaggcctacatccgcatagcctatttgcgcaagaacttcgagcaggagccgctggccaaggaggtgtccctggagcagggcatcgtgctgccctgccgtccaccggagggcatccctccagccgaggtggagtggctccggaacgaggacctggtggacccgtccctggaccccaatgtatacatcacgcgggagcacagcctggtggtgcgacaggcccgccttgctgacacggccaactacacctgcgtggccaagaacatcgtggcacgtcagccgcagcgcctccgctgctgtcatcgtctacgtggacggcagctggagcccgttggagcaagtggtcggcctgtgggctggactgcacccactggcggagccggaagtgctctgacccaaacccg

SEQ ID NO: 355824 - DNA, 1039 bp, Homo Sapiens
gcctggtgccaacccggacctgcttccccacttcctggtggagcccgaggatgtgtacatcgtcaagaacaagccagtgctgcttgtgtgcaaggccgtgcccgccacgcagatcttcttcaagtgcaacggggagtgggtgcgccaggtggaccacgtgatcgagcgcagcacagacgggagcagtgggctgcccaccatggaggtccgcattaatgtctcaaggcagcaggtcgagaaggtgttcgggctggaggaatactggtgccagtgcgtggcatggagctcctcgggcaccaccaagagtcagaaggcctacatccgcatagcctatttgcgcaagaacttcgagcaggagccgctggccaaggaggtgtccctggagcagggcatcgtgctgccctgccgtccaccggagggcatccctccagccgaggtggagtggctccggaacgaggacctggtggacccgtccctggaccccaatgtatacatcacgcgggagcacagcctggtggtgcgacaggcccgccttgctgacacggacaactacacctgcgtggccaagaacatcgtggcacgtcgccgcagcgcctccgctgctgtcatcgtctacgtgaacggtgggtggtcgaccgtggaccgagtggtccgtctgcagcgccagctgtgggcgcggctggcagaaaccggagccggagctgcaccaacccggcgcctctcaacgggggcgctttctgtgagggggcagaatgtccagaaaacagcctgcgccaccctgtgcccagtggacggcagatggagcacgtggagcaagtggtcggcctgttgggcttggcttgcacccacttgggcggagccggagtgctctgaacccagcaccccggcacggcagggggaggtgtgcccaggtcactggacctggcacccgggatggtccagtgagctctgtgtcccacgggttctggccctgaggacttggcctcctatgtgggcctcatcccgggtcgccttccgtggctgtgcgcttgtccatacc

SEQ ID NO: 355825 - DNA, 1293 bp, Homo Sapiens
  misc_feature (16)..(16): n is a, c, g, or t
  misc_feature (38)..(38): n is a, c, g, or t
  misc_feature (566)..(575): n is a, c, g, or t
  misc_feature (1182)..(1182): n is a, c, g, or t
attattgacagatganatatttgaggatgatgctttanttgtgacatttgaaatgaattacacatataaatgatataggatttctttacatgatgctttatctaaatcattacatccttatctttcaaagaaaatcatggtactatgtatgtgtgaaactaaacatttaaaacaatttgttttattatatattatagaatatactttttaaattgtaaaaccaacctatattagtttccataaagctgccttagggaactatttttttaatatgtggaaaatacatccaaactcaatgaaatgtttgatatatagttagcttatatgtttcatagagttattaacataagttttattaaagctcttcccttttggttacattatttttccacatacagtgaatcaaggtaacaaggggtcgtttttccattttgttttctgaattggttatttacacttttgaaaccacaaagacaactcccaagtctccccatattttattttgcacaaatcttgccaataactcctcagggctcataatctaaatctagaggacattacagaannnnnnnnnnctaagagttttcaaatgtgcttattttcagggtcctgacataaggaatttcattattgcaagttgtatgtaaaatataaattaaatgctagtacatttaactatgaagaacaaaatttctttagtgtataataaatgagtagagtcaactcaaatccaatatttggaatccagatgcaccttgtgcaagaaactatatgggttgcattcagtggagtgaacagagtaactcagttgtatgaaatcagttgttgcattcaatgtcagtggcccaaaaaacttggggtaaaataaagactctatgtcaggtgtctggtttggttttcattttagtttataatgcttatgtaaaggggtaagccaagaagattattcttgaccacacttgaaaatggactcaattactgaggttaaatttcagtgtattttataaaaaatattactttcacagaagtgaagagatacaatagcacaatggtggttacaatggtagaaatacatactgccaataaaatgttagcaagagatttaaaaatgactgtacagcaccgcatcagagaattgtgttaacagcaaaatgattaatattatttttcaatataaatganaatccttacattttttaaagaaataaatgggataaaagtgcctttttgttctcctaattcctaccaaaatatttcctgatatggagcaaaaaacagtaaaaatggacagtt

SEQ ID NO: 355826 - DNA, 1583 bp, Homo Sapiens
  misc_feature (4)..(4): n is a, c, g, or t
  misc_feature (8)..(8): n is a, c, g, or t
  misc_feature (12)..(12): n is a, c, g, or t
  misc_feature (24)..(24): n is a, c, g, or t
  misc_feature (32)..(32): n is a, c, g, or t
  misc_feature (43)..(43): n is a, c, g, or t
  misc_feature (48)..(48): n is a, c, g, or t
  misc_feature (50)..(50): n is a, c, g, or t
  misc_feature (57)..(57): n is a, c, g, or t
  misc_feature (67)..(67): n is a, c, g, or t
  misc_feature (109)..(109): n is a, c, g, or t
  misc_feature (140)..(140): n is a, c, g, or t
  misc_feature (154)..(154): n is a, c, g, or t
  misc_feature (187)..(187): n is a, c, g, or t
tttntctncccnattaccaagacntcttgaantccccccaaanggggntntgggcgntttgaaggcnttgtgaacaattggatcccaaactagtcccgagcttgctatngcgagaagacactgtgaagggccttgttgangtccattagtaaangacagctgctaacgagtcccaaagtctgagttnattggctcttttcgataacttcaatccatcgtctttaaatctcaaaaatttcctggaacagggccaaaagatctcctccttggcaatccgcatatcatcagtgacgttggaaaacactgtgggctcaatgaaaaacccctttcggcccagtcctttgcctccacattccagtttggcgccctcagccacaccactctggatgagttccaagatcttgttgtactgtttcttatcaatctggggaccctgctcagtggtggggtcaaagggactccccactatgcgcctcttggcccgctccacgcttcttctcacaaactcctcatagatggactcctccacgaagatgcgagagctgcagtgcagcactgaccttgattgaagaacacaccctggtgggcctgctccacagcatagtccaagtcagcatcagcaaaaataatattaggacttttgcctccaagttccagagttactctttccaaatactttttcccagctgcttcttggataagctttccaccctcagtagaccctgtgaatgcaattttgtctatgccaatgtgagaagctatggctgccccagccgttggcccatatcctggcaaaatattgatgaccccgggaggaaagccagcctccttgatgagggcttccatgtagagtgcactgagtggtgtttgctctgctggcttaataactactgtattgccacagcacaaagctggagctattttccaggcaaacatcagcagggggaagttccatgggatgatctgtccacacactccaatgggttcatgtcttgtaaaggtaaaatagtctccatctacaggaatggtcatcccatgaattttatcagcccagcctgcgtaatatcgaaaggttttgatgacgccctgcaaatccacataaaaagcttgcaggaatggtttgccaccatttagggattccatggttgcaagaactgccctgtcccgttccaccaagtctgcaagcttatccaacagacgtcccctttctgaagcatccatccttctccacactgaaccaagagagaaagccaggcgggctgcctgcactgctttgtctatatctgccttgtctgcttcttgaacttcacacacctgttctcctgtggctggattatagacagggaacactctcccactctctgagttctgccactcgttgtttataaagatcttggtgtacttaatttcgagattgggcgtgggcgacggcaggaggtgcagcgacgccatgagggcggtcggggtcggccttcacctcgaccgggcatctctatcgttgctggaagtcatggtggcgggccaggtgtccctagcccgcggcgggggcagtgcgggcatcccgagaattccggaccggtcca

SEQ ID NO: 355827 - DNA, 1542 bp, Homo Sapiens
cacttctggttttgaaatgactctgtctgtggggcagcagaaactagagaaggcaagtggctgccccaccccaaggcgtgaccaggaggaacagcctgcagctcactccatgccacacgggtgggccaccagcctgctgtcagaagtctctgggctccaactggtcttgtaaccactgagcactgaaggagagaggtcttggtcagggctggacagcatgcccgggaggaccagcagaggattaaaggtgactgggaggaccagcggaggataaaagacactgctcagggcagggcttctaccctgcatccctggccaagaaaagggcagtccccatgtgggcttgcagggtcactctcaggggcctctttcagctggggctggcaacttgcgtctgggggacacctccaggtgtgtggggtgaggatttcctataaccagggctcccagaagctttgcttatgtaaggaggtctgggagccagcccattggaggccaccagccattttggcttcaaaggaccccacctcacccaggtctcagcggcagtgggcacagctatgtcttcaggagctcccgtcaaacctcatagctggggcgctcccagacaggccagtccagacaggacacgctgggcccctggcatccagaggaagagccaggagtgtgggaaggcccacagtgggggctgtggcttctgacactcaggtcatagcctcagaggtctgaggtcagcccccacagacccatccggcccgccccccaagtccctgcagagagcacttagagttatggcccaggccctggtccacccttcccctgtgcacctccggctgggtttgccaagtcagggagcagggctggccgcaggaactcccaaaccttggctttgaatattgttgtggaggtgtgctcgtccctttctggacgtgcaaggtacctgtcccagcaggtcagatggggccagctgaggcgctcccccaggcaggaagggccagccttcaccatcgcgtgggattgggaggaggggcctccgtgagcagcccctcctctgccgctgtcccagcccagtccctctcccggagccttggcagcctcccacaacccagaacacttgcgttcacaagcaacctaaggggcaggtgaagaagcgcagccctgccagacgcgctagattcctctaaggtctctgagatgcaccgttttttaaaaaggcgtggggtgaactgattttgatcttcttgtctagatgcaataaataaatctgaagcatttaatgtagtcatcttgacattgggcctacactgtacgagttccttatgtttccttgagctaaaaatatgtaaataatttttgtcccagtgagaaccgagggttagaaaacctcgatgcctctgagcctcgggaccgctctagggaagtacctgctttcgccagcatgactcatgcttcgtgggtactgaacacgagggtggaaatgaaaactggaacttccttgtaaatttaaacttggcaataaaagagaaaaaaagttaccaagaa

SEQ ID NO: 355828 - DNA, 426 bp, Homo Sapiens
  misc_feature (23)..(23): n is a, c, g, or t
cagaacacttgcgttccacaagnaacctaaggggcaggtgacagaaaccgcagccctgcccagaacgcgcctagaattccctcctaaggtcccctgagatgcacccgttttttaaaaaggcgtggggtgaactgattttgatcttccttgtcctagatgccaataaataaatctgaagcatttaatgtagtcatcttgacattgggcctacactgtacgagttccttatgtttccttgagctaaaaatatgtaaataatttttgtcccagtgagaaccgagggttagaaaacctcgatgcctctgagcctcgggaccgctctagggaagtaacctctttcgcccagcatgactcatgcttcgtgggtactgaacacgagggtggaaatgaaaactggaacttccttgtaaatttaaacttggcaat

SEQ ID NO: 355829 - DNA, 1525 bp, Homo Sapiens
  misc_feature (7)..(7): n is a, c, g, or t
  misc_feature (94)..(94): n is a, c, g, or t
  misc_feature (1474)..(1474): n is a, c, g, or t
ctgctgnactctgggctgtggagggggtggaggacgagctggtgcctccagagtcgcagtggctggtgctcccctgccgctggggctcccgctngcggagggtggcgactgtgaggacagggacggggagctgtgctggtttatgcactgggccacgcgaagcctggcaccttgtccaccgatgcaaacacggagcgctgcactgtggggtcgctgctgccccggcgcccctggtcgtagaagcggaaaggcaggtgctgagtggaggtggaggagccgagtccaaaccccaggacttcagtggtgggctggattgggaggtccaggagggcagctattctctgcatcttcatgcgccttgcctggatgcgcctttggccaggcgctgcttggcgatgatgcagcggatgtggtctgagaaggatgaaggtggcctgaaggatgggaaagggcttggaatggggggctggacgccaggcttgtggatggtgatgtccagggcacggctgtcgtccttccacgccagtcacctgcatgtcctgcaataggcctgcaaacttgaccactccccagccaagcctggacacatcaggctccaccaaactcatctggtaaatatccacagccaggaatcgctggaccatgccgccatccttggtgatcactgtacatgcaatcaagtcgctgttattcagatccaggacatcatcagtcttgatcaggtcctcctcccgagtcagcggcaactgtgtctcaggctcccctcgcaattgcagtgacagggaacgcagcatgaagaacacccggatggcccgccgggtcttctccacatcgccacacggcagccgcttcacgaagtcaatgcccgtcagtggcgtgcctgttgggggcagcaggatggaggcgtccatcatgagatattccacgttcatgggcttcatggtcatgctcctatactcatcgtcaaacatgtccaaaaaaatgtcttctcccttataaagaatgtcgtacaaggtgaacactttcttctctcgcaccctccaggcaggccaggtgcacgtccttcatgatgcagccagcactcatcaggacttgctgcttcagaagcaggcagctcagctccagcgtcgccagccggatcttcccatctggctgggcagcgttgttcatgatcctgatgagtctttcagctagcgggtggttgtaggtggtcttctcggccgcatttggcacggggagctggattcgctctaatttttcaggatccatgcctttattatgagacatggcatagaggaggcagagcacgaacagggcatggtaatcatcatccgggctgtccagcgcgtggtacaccatatccaggaagggtctgctccattgcgtgctctcagagcaggtggcggcggcgcttttctcctcgtccgtggtgttctgctcctgcacggaggtgctggcggccagctctgagagncttctacgctccatgatcaccatctcgatctctttgaccttctcggcgtct

SEQ ID NO: 355830 - DNA, 394 bp, Homo Sapiens
  misc_feature (23)..(23): n is a, c, g, or t
  misc_feature (234)..(234): n is a, c, g, or t
aaaggccgcatcccaggcaaggngcatgaagatgcagagaatagctgccctccctggacctccaaatccagcccaccactgaagtcctggggtttggactcggctccctcccacctcccactcagcacctgcctttccgcttctacgacccaggggcgccggggcagcagcgaccccacagtgcagcgctccgtgtttgcatcggtggacaaggtgcccaggtgagccagcccnccgccctgcgccacagctcgttcatcatggtgggcgttcaaggtctttctctctgtggagcctgtgtgagctgcccttcctctctcagaagccccgtcggctggcagcaccagcttcttagaatttgtcaaagcacagcgcaagattaaacacagccccc

SEQ ID NO: 355831 - DNA, 1710 bp, Homo Sapiens
tacataggtgagtgttcatcttccctctcatgccggtatactctgcttcgctgtttcagttaaagttttccgtagttctgaacgtcccttgaccacaccataagacaagcgcaagtcactcagaattgccactggaaaactggctcaactatcatttgaggaaagactgagaaagcctatcccaaagtaatggacatgcaccaacatcgcggtacctacatgttcccgtttttctgccaatctacctgtgtttccaagataaattaccacccagggagtcacttcctgctatgtgaacaaaaacccggtttctttctggaggtgcttgactactctctcgtgagcacttaactggttgttttgagtggactttgccatcaattcatagttaggaaaaggaaggtggtggtgcagggctcagcatcaggagagaattttcagtcaagaagatggtctaacaatgtgctgggtcccagggggcagaagcagcattcagaagtggagttttaccctttcacacctgcccaactccacaaaccaactgccacatggcaaaatcacaactgcctccagaattctgagtgcttttgtagaaatctcttctgaccacaatgaagggcagtattaggtggctttaaagtaggcatttaagatcatgaggacacgtgtgtctcagatgatacacagtgtttccaataccctttccctcctttggatctttgagaacctcgtcttaaaatcggaccacagccacagcttgtctggcttttgtcacccacaagagccaatatttcaaagtcaacagaaggtcatcatcatggttcacctgagccccttaacgttgactttcgctcagaggagctggggcgaggggtggggggaagcagcgagtagagacaaaccaggctgacttcttggttaaaaaacaaagttcgcttacggccctgggaagtcgacatacaacggactccgagtgcctcccgtccccgcgggagcagctgcggcagggcgccgagcgcgtcctaccttagacctctccttgacgtagtatttgcccagccggctcccgcagtagaggaccagcctgtcgatgagggacaggaggaagctgatggcctcgcagccctcctcgttgcccccgatccacgtgatctggtcgccccgcaggtgtcgcttggagacgccggcgcgcggccccgccagctggccgtcccgcagggccccggtgcagtgcagctgcttgacgcgctccaggacgcagtcgcccaccacctcgcccaggaagttgtccaggtagcagaagcccacctcgtgcagacagggcacgatgtactccagggcaattttctccaggtccagcctcatgatgtgtcccaggggcatctcgcccgcagaatcgaggtccgggatccccagcgtgcaaccagagagggaacgatctacacgagcgcgaagccgaggcgcggggagcgtggcccggggttcagaaacctgcggctgccacggtacccgagccgctgcagcgtcggggacaagggaaagtttctcgcaactctcgggagaagggatctgccttcgggaaccagcgggagtggtgcggagctccacgacccgtttccggactggcccggcgagcagtgcggcgcaaggagtcggagggcgccttttggggatgggaagccaccactgccgcgatcccgggaattccgg

SEQ ID NO: 355832 - DNA, 1042 bp, Homo Sapiens
  misc_feature (957)..(993): n is a, c, g, or t
ggttcctccgatttgccagacgacagagttcggtcaaaatggcttcacatgctgctaggatgatggcccctcggggatatccgcaggatcccccatgtagctttggcatcccaagtcttgttcagatagttgatgcaggtgagcaagcgacccatcaccgtttggggttgtccaacgtggcggaacatgaacctggtccaggttcccggatagcaagccaaccatggccttagacctgctcctggacgtagtattttgcccagccggctcccgcagttagaggaccagccttgtcgatgagggacagggaggaagctgatggcctcgcagccctcctcgttgcccccgatgccacgtgatctggtcgccccgcaggtgtcgcttggagacgccggcgcgcggccccgccagctggccgtcccgcagggccccggtgcagtgcagctgcttgacgcgctccaggacgcagtcgcccaccacctcgcccaggaagttgtccaggtagcagaagcccacctcgtgcagacagggcacgatgtactccagggcaattttctccaggtccagcctcatgatgtgtcccaggggcatctcgcccgcagaatcgaggtccgggatccccagcgtgcaaccagagagggaacgatctacacgagcgcgaagccgaggcgcggggagcgtggcccggggttcagaaacctgcggctgccacggtacccgagccgctgcagcgtcggggacaagtgaaagtttctcgcaactctcgggagaagggatctgccttcgggaaccagcgggagtggtgcggagctccacgacccgtttccggactggcccggcgagcagtgcggcgcaaggagttggagggcgccttttggggaagggaagccaccactgccgcgactgcggccagactccgctctcgacgaattcgagctcggccgatttggcctgatnnnnnnnnnnnnnnnnnnnnnnnnnnnnnnnnnnnnncgccgccaccgcgataagcctgcggattcccctatagtagtctatcatc

SEQ ID NO: 355833 - DNA, 1100 bp, Homo Sapiens
  misc_feature (54)..(54): n is a, c, g, or t
  misc_feature (334)..(393): n is a, c, g, or t
gggcgcaacgcaaacatggcggcgggtggcacccgtcggtgaggcggtgccggngcgggggttgtcgggtgtcatgggcggtggcgacggcaccgcccccgcgtctccctgagcgggacggcagggggggcttctgcgctgagccgggcgatggacgacagcggcgagctgggtggtctggagaccatggagaccctcacggagctgggcgacgagctgaccctgggagacatcgacgagatgctgcaatttgtcagtaatcaagtgggagagttccctgacttgttttcagaacagctgtgtagctcctttcctggcagtggtggtagtggtnnnnnnnnnnnnnnnnnnnnnnnnnnnnnnnnnnnnnnnnnnnnnnnnnnnnnnnnnnnnggagctgtggacccttcagtgcaacggtcattcacccaggtcacattaccttccttctctccctcggcggcctccccacaggctccaactctgcaagtcaaggtttctcccacctcagttcccaccacacccagggcaactcctattcttcagccccgcccccagccccagcctcaacctcaaactcagctgcaacaacagacggtaatgatcacgccaacattcagcaccactccgcagacgaggatcatccagcagcctttgatataccagaatgcagctactagctttcaagtccttcagcctcaagtccaaagcctggtgacatcctcccaggtacagccggtcaccattcagcagccaggtgcagacagtacaggcccagcgggtgctgacacaaacggccaatggcacgctgcagacccttgccccggctacggtgcagacaggtgctgcgccacaggtgcagcaggtcccggtcctggtccagcctcagatcatcaagacagattcccttgttttgaccacactgaagacagatggcagccctgttatggctgcggtccagaacccggccctcaccgccctcaccacccctatccagacggctgcccttcaagtaccaaccctggtgggcagcagtgggaccattctgaccacaatgcctgtaatgatggggcaagagaaagtgcccattaagcaggtac

SEQ ID NO: 355834 - DNA, 1243 bp, Homo Sapiens
  misc_feature (33)..(33): n is a, c, g, or t
  misc_feature (1052)..(1052): n is a, c, g, or t
  misc_feature (1063)..(1063): n is a, c, g, or t
  misc_feature (1070)..(1070): n is a, c, g, or t
  misc_feature (1073)..(1073): n is a, c, g, or t
  misc_feature (1090)..(1090): n is a, c, g, or t
  misc_feature (1099)..(1099): n is a, c, g, or t
  misc_feature (1103)..(1103): n is a, c, g, or t
  misc_feature (1134)..(1134): n is a, c, g, or t
  misc_feature (1178)..(1178): n is a, c, g, or t
  misc_feature (1187)..(1187): n is a, c, g, or t
  misc_feature (1189)..(1190): n is a, c, g, or t
  misc_feature (1193)..(1193): n is a, c, g, or t
  misc_feature (1196)..(1196): n is a, c, g, or t
  misc_feature (1210)..(1210): n is a, c, g, or t
  misc_feature (1213)..(1213): n is a, c, g, or t
  misc_feature (1224)..(1224): n is a, c, g, or t
  misc_feature (1232)..(1232): n is a, c, g, or t
ccgttgctattgtaactatgaacagctgtgttnaacatgcaggctgttactggtccggatattccgggatatgtcgacccacgctgtcgctttcaccgggtgcctcccccgggctgcatagtggtggggggcgggggtatggggagccagtccctggcagcgccaaagagtgggaggaggcggtgacagccgcggggagtggggcgggaggagagagtgccgctcgtgctcggctccgctgctcagtctccgctctgcctccggctctgcgctcacctgctgcctagtgttccctctcctgctccaggacctccgggtagacctcagaccccgggcccattcccagactcagcctcagcccggacttccccagccccgacagcacagtaggccgccagggggcgccgtgtgagcgccctatcccggccacccggcgccccctcccacggcccgggcgggagcggggcgccgggggcaatgcggggccagggccgcaaggagagtttgtccgattcccgagacctggacggctcctacgaccagctcacgggccaccctccagggcccactaaaaaagcgctgaagcagcgattcctcaagctgctgccgtgctgcgggccccaagccctgccctcagtcagtgaaacattagccgccccagcctccctccgcccccacagaccccgcctgctggacccagacagcgtggacgatgaatttgaattgtccaccgtgtgtcaccggcctgagggtctggagcagctgcaggagcaaaccaaattcacgcgcaaggagttgcaggtcctgtaccggggcttcaagaacgaatgtcccagcggaattgtcaatgaggagaacttcaagcagatttactcccagttctttcctcaaggagactccagcacctatgccacttttctcttcaatgcctttgacaccaaccatgatggctcggtcagttttgaggactttgtggctggtttgtccgtgattcttcggggaactgtagatgacaggcttaattgggccttcaacctgtatgaccttaacanggacggctgcntcaccanggnggaaatgcttgacatcntgaagtccntctntgacatgatgggcaagtacacgtaccctgcnctccgggaggaggccccaagggaacacgtggagagcttcttccngaagatggncnnaancanggatggtgtggtgnccnttgaggaattnattgagtnttgtcaaaagg

SEQ ID NO: 355835 - DNA, 2251 bp, Homo Sapiens
cgctcacctgctgcctagtgttccctctcctgctccaggacctccgggtagacctcagaccccgggcccattcccagactcagcctcagcccggacttccccagccccgacagcacagtaggccgccagggggcgccgtgtgagcgccctatcccggccacccggcgccccctcccacggcccgggcgggagcggggcgccgggggccatgcggggccaggtgccgcaaggagagtttgtccgattcccgagacctggacggctcctacgaccagctcacggacagcgtggacgatgaatttgaattgtccaccgtgtgtcaccggcctgagggtctggagcagctgcaggagcaaaccaaattcacgcgcaaggagttgcaggtcctgtaccggggcttcaagaacgaatgtcccagcggaattgtcaatgaggagaacttcaagcagatttactcccagttctttcctcaaggagactccagcacctatgccacttttctcttcaatgcctttgacaccaaccatgatggctcggtcagttttgaggactttgtggctggtttgtccgtgattcttcggggaactgtagatgacaggcttaattgggccttcaacctgtatgaccttaacaaggacggctgcatcaccaaggaggaaatgcttgacatcatgaagtccatctatgacatgatgggcaagtacacgtaccctgcactccgggaggaggccccaagggaacacgtggagagcttcttccagaagatggacagaaacaaggatggtgtggtgaccattgaggaattcattgagtcttgtcaaaaggatgagaacatcatgaggtccatgcagctctttgacaatgtcatctagcccccaggagagggggtcagtgtttcctggggggaccatgctctaaccctagtccaggcggacctcacccttctcttcccaggtctatcctcatcctacgcctccctgggggctggagggatccaagagcttggggattcagtagtccagatctctggagctgaaggggccagagagtgggcagagtgcatctcggggggtgttcccaactcccaccagctctcacccccttcctgcctgacacccagtgttgagagtgcccctcctgtaggaattgagcggttccccacctcctacccctactctagaaacacactagacagatgtctcctgctatggtgcttcccccatccctgacctcataaacatttcccctaagactcccctctcagagagaatgctccattcttggcactggctggcttctcagaccagccattgagagccctgtgggagggggacaagaatgtatagggagaaatcttgggcctgagtcaatggataggtcctaggaggtggctggggttgagaatagaagggcctggacagattatgattgctcaggcataccaggttatagctccaagttccacaggtctgctaccacaggccatcaaaatataagtttccaggctttgcagaagaccttgtctccttagaaatgccccagaaattttccacaccctcctcggtatccatggagagcctggggccagatatctggctcatctctggcattgcttcctctccttctttcctgcatgtgttggtggtggttgtggtgggggaatgtggatgggggatgtcctggctgatgcctgccaaaatttcatcccaccctccttgcttatcgtccctgttttgagggctatgacttgagtttttgtttcccatgttctctatagacttgggaccttcctgaacttggggcctatcactccccacagtggatgccttagaagggagagggaaggagggaggcaggcatagcatctgaacccagtgtgggggcattcactagaatcttcaatcaacctgggctctccccaccccaccccagataacctcctcagttccctagggtctcttcttgcttgactcaatctacccagagatgccccttagcacacctagagggcagggaccataggacccaggttccaaccccattgtcagcaccccagccatgcggccaccccttagcacacctgctcgtcccatttagcttaccctcccagttggccagaatctgaggggagagcccccagagagcccccttccccatcagaagactgttgactgctttgcattttgggctcttctatatattttgtaaagtaagaaatataccagatctaataaaacacaatggctatgca

SEQ ID NO: 355836 - DNA, 1500 bp, Homo Sapiens
  misc_feature (60)..(60): n is a, c, g, or t
  misc_feature (62)..(62): n is a, c, g, or t
  misc_feature (176)..(186): n is a, c, g, or t
  misc_feature (1413)..(1414): n is a, c, g, or t
gatgctgtcaaccaggaaggcatccttaggaagagcctccaagaaaccagccaacggcgnanggatgtggaggagcaggtagggtggctcatggctacattagattcaggggacatctcctcagatgccctgcaaaccatgaaataaaaatggaggaggaacaacaacaacaaacnnnnnnnnnnngcaaagaggaactgcaagttcagtccctagcgactaacagtgagcagaggaagtaaagggggagttgtaagagaggcggtatcaacagcctgctgatgaaagaggcgactctgcagaaagaggcaacttgacatatcaggactttaaccgctgtagaaatagctcaggcataccaagcccatgcaaacacagaattgcagaagttcaggagaggcttatcacttccctgagaagaaaaacacattttcagttttgcctgcatcataagagtgagcactccattgctttctttcctggccacactgctacaatccagcactaactatccatgtccagggtaaggatcgagatcgagaagcccacactgccagtgaaaaagctacgtctttactgcataaattagaggaagcaatttcggaacaacggaaccttcaaactataaatactgaattatcgaacacttgccaggcacttcagcagaagacaaggaaactgaagaagctttttagatgaggaatttcctcactatgattccctgtcctgcgcagatgcaattcaacaacctcttcaagaaaaattgaagcagtgttgccacaaactatatggtggtcaagaagcaagaatacatcagacacccctgaccttgaaacatacgtgctggtacacacctctgctggatgccttatctctggatagttttacagcagttccaaccctggaatcaacacctttctcagggtgtagccaaccaaaatccacacctctgtgttgaaaggcccacatatggagaagtaaaggatggtgctttggatgtaaaaagacaacacaagtgcccaggccccacaagtggccccagcccaggaacgaatctctcaggctgcatcaggatgaatgatgacccaagtatggaagagaatggtgttgaacgcgtgtgtcctgagagcctgctgcagtccagggaatattcctcactaccattacccagacacacttcatcgacagacggtactataacttcaagtgatcctggattagaaattctgaatatggcttcttgtgaccttgacagaaactcgctctgtaagaaagaggaggatacaagatcagcttctcccacgatagaggcccaaggcacaagtccagctcatgataatattgcattccaagactctacgagtaaggataaaaccatattaaatctggaagccaaagagaaccagaacaatnngagaacataaaaagacatgcttcagagactctgtggtttcccctctcctgaaccactggaaatcggttaaccttaaacaagtgaga

SEQ ID NO: 355837 - DNA, 1618 bp, Homo Sapiens
  misc_feature (54)..(54): n is a, c, g, or t
  misc_feature (59)..(59): n is a, c, g, or t
  misc_feature (64)..(64): n is a, c, g, or t
  misc_feature (108)..(154): n is a, c, g, or t
  misc_feature (941)..(941): n is a, c, g, or t
  misc_feature (1007)..(1007): n is a, c, g, or t
gtaccggtccggaattcccgggatggagcggatcctggagccggagcggagcgnagcgnagcgnagccggggcggacgggccgagcgggccgagccagcagccgagcnnnnnnnnnnnnnnnnnnnnnnnnnnnnnnnnnnnnnnnnnnnnnnngggccggagcccggcagcccggggcgctttgggatcctcagcaccgggcagctccgggacctgcttcaggatgagcccaagctggaccggatcgtgcggctcagcaggaagttccagggcctgcagctggagcgtgaggcctgcctggcctccaactacgcgctggccaaggagaacctggccctgcggccccgcctggagatgggccgggctgccctggccatcaaataccaggagcttcgtgaggtggccgagaactgcgcggacaagctgcagcgactggaggaaagcatgcatcgctggagtccccactgcgcgctgggctggctgcaggctgagctagaagaggcggagcaggaggcagaggagcagatggagcagctgctgctcggggagcaaagcctggaggccttcctgcctgccttccagcgtggccgcgccctggcccacctgaggcggacgcaggcagagaagctgcaggagctgctgcggcgtcgggagcgttctgcccagccggcccccacctcggctgctgatccccccaaatccttcccggctgcagctgtcctgcccactggggccgcccgggggccaccagcagtgccccggagcctgccccccttggactcccgcccagtgcccccactgaagggctcccccgggtgccccctcggcccggcccccatgctaagccctcggccctcacagccagagcccccccaccggtaggatccacggtgcggccccccagttggggggcctagacaaacttgatgcgtggctcctncctcctcccccactgcctgggtggggggaggggcaggcccctcccacgtggcctcaggcaggaccntggccctggaggctgagctggggaggagggtcccctaaaagaggcccgagagggggctgggggtgggcgggcagggctttatgcctctggcgctgaagacaccctgcctttttgtttccgtgccccggggcctctagggtgatggaccagccccgttaaagaacttgactcaactacaggggcctgggaagatgcctgggtcccctaggggccttgccaaggggacctgtcgcaccccaccactccactgggctcgcacaacgccaaggccgccaggagtgttttacatcatgtcctgagcctacctttcccccaaattctggggcccacagcctaggagccaggtgatcaggcctcggctgtggggccagggacaccatggccctggggctactacgtgtccacacatgctccagaccctggggcaaggtaggccaggggcttctgacctgtgcaggtgagagtgggccatacccaggaaagaccattctgtatttttctgtccctgtctccttagaatggaagctttttgagggcaggtccttgtctttgtacgttctgtccccagccccgcctcttaggggccgtcaataaatgtgatgatgaggatg

SEQ ID NO: 355838 - DNA, 1646 bp, Homo Sapiens
  misc_feature (472)..(515): n is a, c, g, or t
  misc_feature (1202)..(1237): n is a, c, g, or t
caaagccccaaatccctagagtgctttctggtctcactttggtaccaaggaagcctcacatagtggtactgcatagtcccactataagtcaagttgcagtttaaggtggtctcagccaattgttacaagctacagaatatatacatgcatctatgtacagagccttgcagagaaacacaaaattttgaggctagacccatgatcaccaccaactataattgcacaaggtcttgttatattgatctctcctcgaactcaactaacgatatcttgaaaacaaagacccttcggtgtccatctacagtaaaccccaccattaccttctagttggcataaaaacaagaaccacaaaaacttgaaaaatctgaaacagagaacagaaggccaagagccagcttctgcgttcttcaactttattcaacattaggacttaccttatttctttcagtgtgtagggacaagatgtactgcnnnnnnnnnnnnnnnnnnnnnnnnnnnnnnnnnnnnnnnnnnnnctataccttcctatccattggcaagttaacctccatctggtttatttggccatgctatgctttcttcccattcccctgctgtctattctaagcccccagactcaagcctctagactcttggatgaaacagtgagaagaaaacattttctgacttacccttttggaatctcctccattattacccaggctttgctttaagttgcactttaaatcacactgtcctattaatgcgatctggcatcttctcccacaagccccctacagggaacaactaccccctaccttaactctaaatggttctttagactatagtctgtctcctctgacctgaaatcctcttttaggcaataggccgagctttagaagcagccaggtctggtgagaaatgggcccccataccaactgtgggacttggaatatcagcagagtagtaggcacagttgtaaaaaggggagatttcggtaggcacaggtgtaaaaaggggagatttcagaagacgggcgaaacaactgatgggggaagatacctggggtgagaagatgagaaagaaatgatgctgagggacctagtgaaatcaatgaaactcttgagtcttgcttaggctcgcaaacaagaagtggggaggcttgggaaattaggatatgacatatatgaaaggtttatctaagaagaaagaaacagagatannnnnnnnnnnnnnnnnnnnnnnnnnnnnnnnnnnngcccaaatatattgaatgtacagaaaggaaatattcagagactttagcattgggggcagatatcttggcctggttatggggtaggacacccagattttcagacttacaatcagtggtcctggtttcaacatggaagtgagatagctgatgaaggatttcaagtctggaaatgggaaagggaggggtagaagttccttttcagaaataaagaggcattcatgaaggcttttgttgaatcctatgctactgataggaccaggaagagaggaactcggaggacaatagggaggggaagtcttggaaaatctaccacttacactgtgtgtccccatccccagcagcgtcctgccactgtagcgcctttttaaaataaataaaataaaataaagcaccattttgtttccctttc

SEQ ID NO: 355839 - DNA, 917 bp, Homo Sapiens
  misc_feature (3)..(3): n is a, c, g, or t
  misc_feature (52)..(52): n is a, c, g, or t
  misc_feature (126)..(126): n is a, c, g, or t
  misc_feature (197)..(197): n is a, c, g, or t
  misc_feature (595)..(702): n is a, c, g, or t
ttncaaacagaatgctcacagagtgccagtaacacagggcctctattttgantgctttacagtatgaattcatttaatcattgtacataaccataggtagtgggtgctattcttatcctcattgtncagatggagagactgagaccctgaaggttaactaactttttgaaggcagtggtggcagaggcagagccganattcaagcctgtcatgacttatatcctttggtgttatttttctcttctttaaggacaaacagagaatgagggcagacgagatcaaagatgccatctacgtgaccatggagatcctgtccaaactggggcaactcgtggtgggtgggtctcacagaagtcgagttctttgacttgaatgacacaaagctttatgtgtcgccccacgatgtggatatccggaacacagccacgcctggggagctgggccgcctcgtcaacaggaacttagctgtgagtggaaggggcactggattgcttcttggctgtgtattcccatgcattttctctgcccttggtaaatctgtgttaagggtatgagtggagggaggggaagaacaacaaaatctggccaggtacannnnnnnnnnnnnnnnnnnnnnnnnnnnnnnnnnnnnnnnnnnnnnnnnnnnnnnnnnnnnnnnnnnnnnnnnnnnnnnnnnnnnnnnnnnnnnnnnnnnnnnnnnnngtgttggggagggaggagctgcagacgctctgcctcctgcctggcaccgaggggttttcccagcatgtgccaggtcagccctgggcagcttcccatcagcctttctctctgagatcccgctggatttggggatgtggtttcttgacccctcgcagctgcccagagcactagaagttcttgtagagctggagaaacttgccagaataagccccgct

SEQ ID NO: 355840 - DNA, 1252 bp, Homo Sapiens
  misc_feature (60)..(60): n is a, c, g, or t
  misc_feature (65)..(78): n is a, c, g, or t
  misc_feature (97)..(97): n is a, c, g, or t
tgagttatatatactgcactttatacagatgatatcttgttaccccttaaccccccagcnaagannnnnnnnnnnnnnggaaattacaaagtgcctnttgattgcatccgggatgttattagttccgtgggtgagataaatcattcttcttatagaattattctattaaacagtaaaatgttatatttcacaggatatgtccttttataatacagtttttaaaaaaaatttacactcagcatacttataaattacttaaaatccattaaaataatataatacgaatctgtagtccacacctttcccatagtaaatacaaatacttggttcaaaagatgcaacttttatatgacctcagagggctgataaataggcattaagaatggatgactagcaaggtgacaggcccattgttggggcttttttgaaaatagtttcaaccaggggaccaacatgagacctaatagatccatctccacaatcatcattttgctgttaccctttcaatacccaaccaaatgtgggagtcattccagagaaaagtggttaaaagtagtctagggcatagaaaaagaggactctcacagataccaaggagttttactaccaaggccagcatggtattgcaggacagtgctggggagttgtcacaagagtatgggtggacataacacatttgtccatacagaatgatgcatgccccgcatccagcttcccaccaagaagaaaaaagagaggaggatgaggaaagccatggagtgagtatgtatgtttctttttaaaatgaaaactctcttagctttgaacacatcctgagaatcctttattctttctagtttaccaaagtgcttgttacagtgaaaaacacagcccacaggcactgaggtgggactacagaaccttgctggaccacatcttttcagcacatttcggtgaccctctgtttttgatggagaaaacaacgctactgttatgaaacacagaatggagtcttcattaatcttccagcagggtaagcgctctggcaggtttccaaagcatgagaaggtgggggctctagtattccatcccaggacctctggcccttttgtctctctctgcaaggctcatagttggagggctgtatctccctttgtgttttcagaagcccagagtggcaaaataatttaaatggcaggaggtacaaagtacgttgtaaactaagcctccctgaatcctgctgtatttgctgttgatttgcttcaatttcgct

SEQ ID NO: 355841 - DNA, 442 bp, Homo Sapiens
  misc_feature (119)..(136): n is a, c, g, or t
cctgccaccctcagaaaatgggttatgggtcagtaagacaacatatattgtgattattggcttttctctgtggtaagtacaggataaaacattaaattaccaaattactaaacaatacnnnnnnnnnnnnnnnnnnctcaatcacgttgaagagttggtttgataaacaatgtatatggaagctttacaaagacaacaggaaaaaaaagaccttccgtggaagtcaggaatctaagtagcaaagacaactatatttcttatccccttatatttcttatcccaatccaggtcactacctgtatgccaaacgatgaaggctaaaatatatggataaacaggacaaaattcctcaagactttgttacttgctgatgtacactcagtaaattcttataagactttgtcttaattacctgtttatttaaaataaacaagtgtcctga

SEQ ID NO: 355842 - DNA, 484 bp, Homo Sapiens
  misc_feature (195)..(195): n is a, c, g, or t
agggaaaacccatggagtgaagtatgtatgtttccttttttaaaatgaaaaactcctccttagcctttgaaacacatccctgaaaaaccctttccttctttcctagtttacccaaagtgccttgttaaaagtgaaaaacacaaccccacaggcactgaggtgggactacagaaccttgctggaccacatcttttncagcacatttctgtgaccctctgtttttgatggagaaaacaacgctactgttatgaaacacagaatggagtcttcattaatcttccagcagggtaagtgctctggcaggtttccaaagcatgagaaggtgggggctctagtattccatccccaggacctctggcccttttgtctctctctgcaaggctcatagttggagggctgtatctccctttgtgttttcagaagcccagagtggcaaaataatttaaatggcaggaggtacaaagtacgttgtaaactaagcctc

SEQ ID NO: 355843 - DNA, 1220 bp, Homo Sapiens
cagaagtccccggctccccttacccagccaacacccaaaacccacccaagaggatgggtcctggataaataatgcccaggactcatatcctgaccccataggttataacagaattcatcaaacaaaaacagagggctagaggccagtgatccatgagaggtccttgcccctttgtaaacattgacatccaggccactggagcctggggaaagtgtgcaaacatgaggatgccacactgtgtgtccaggggccaggaacacagctggcaaccatacccgtgaagtcctgaggatctgccccccactggaacatggcaagtgccgggggcagaagcaaggcagttaccccacacccaagggctcacatgagatggcagcgacgctcttgcccataggaattctccacacgggcaatctcctggatgactttggtgaagatgccttgagtcagctgattctctcgagcagatgactccataaatgtcgcaccccaggactctgccagcttctttccttcaactgcctgtacctctctctctggagagagatctgccttgttccccactagaaccactggcacccgggttttcccatggccttcatgtagcttttggtacagactctcaatgacttggaagctatgcagagaggtgacagaatacacaagcacataaccatggaccccaatgatgaatgaatagggcagaatgctgtactcatcctgccctgctgtgtccaccagatgtaggtgaaactcatctttgccaagagtcactatcttgctgtaagtattctccactgtaggatcgtagccttccgagaactcgccttccacaaattgatgtgccaaagatgtcttccctgtggggagcagtgtgacagttgtatccaaatcatccatccacattcacatcctctgtcctttcggactacacagcggtatccgaggatgaccaccttcctgtagcggactagcggcatggcaggagcccgccccaggggcttgcggaactgcgggctcagagagcccgaaaacgaggtcagggtgtgagcaggcgcggcagctggtgcaggaaagtcgctcaccccgaagctgccgtgggcaagttagaaggaaaccaaaacaagcgccgcgcccggagctgcccacgtgatcacaacacagcacgtctaacgccagggagccgggcgcccggggaactactgagccgcgccgcgccg

SEQ ID NO: 355844 - DNA, 1093 bp, Homo Sapiens
  misc_feature (716)..(726): n is a, c, g, or t
  misc_feature (768)..(776): n is a, c, g, or t
taaggtagcgaggcctgggtggcgaattcggcacgaggggcagcttcggggtgagcgactttcctgcaccagctgccgcgcctgctcacaccctgacctcgttttcgggctctctgagcccgcagttccgcaagcccctggggcgggctcctgccatgccgctagtccgctacaggaaggtggtcatcctcggataccgctgtgtagggaagacatctttggcacatcaatttgtggaaggcgagttctcggaaggctacgatcctacagtggagaatacttacagcaagatagtgactcttggcaaagatgagtttcacctacatctggtggacacagcagggcaggatgagtacagcattctgccctattcattcatcattggggtccatggttatgtgcttgtgtattctgtcacctctctgcatagcttccaagtcattgagagtctgtaccaaaagctacatgaaggccatgggaaaacccgggtgccagtggttctagtggggaacaaggcagatctctctccagagagagaggtataggcagttgaaggaaagaagctggcagagtccctggggtgcgacattttatggagtcatctgctcgagagaatcagctgactcaaggcatcttcaccaaagtcatccaggagattgcccgtgtggagaattcctatgggcaagagcgtcgctgccatctcatgtgagcccttnnnnnnnnnnntaactggccttgcttctgccccccgaacttgccatgttccannnnnnnnncaaatcctcaggaactcacggggtatgggtgccagcttgggttcctgggcccctggacacacagggggggaatccctcatgtttgccacattttcccccaggtcccagggggcctgggattggcaatgttttccaaagggggcgaaggaacctcctcatggggacactgggcctcctaagccctccgtgtttcggtgttgaaagaaatacctgtacataacgcattatggggtcacggcaattgcatcccctcgggggttttatttgttgtcgggggaagccctattctttcttcggggggcgagcaatgacggacc

SEQ ID NO: 355845 - DNA, 2691 bp, Homo Sapiens
  misc_feature (57)..(57): n is a, c, g, or t
  misc_feature (100)..(110): n is a, c, g, or t
  misc_feature (177)..(177): n is a, c, g, or t
cggcacctggcgagcggaccggagtcgggctggggaccgcggggtcgaggccggacngcggcagggtcgggggagaaacgcgcgctgccctggcacgggnnnnnnnnnnnggccgcgcggaatggtatggcccggccggagttaaggccggggggaggcggcgagtcccgcggcggnggcgacgatggggctgcgtgcaggaggaacgctgggcagggccggcgcgggtcggggggcgcccgaggggcccgggccgagcggcggcgcgcagggcggcagcatccactcgggccgcatcgccgcggtgcacaacgtgccgctgagcgtgctcatccggccgctgccgtccgtgttggaccccgccaaggtgcagagcctcgtggacacgatccgggaggacccagacagcgtgccccccatcgatgtcctctggatcaaaggggcccagggaggtgactacttctactcctttgggggctgccaccgctacgcggcctaccagcaactgcagcgagagaccatccccgccaagcttgtccagtccactctctcagacctaagggtgtacctgggagcatccacaccagacttgcagtagcagcctccttggcacctgctgccaccttcaagagcccagaagacacacctggcctccagcaggctgggccatgcagaagggatagcaggggtgcattctctttgcacctggcgagagggtctgactctgggcacccctctcaccagctacaaggccttggactcactgtacagtgtgggagccccagttcccacctctgtgacaataggatcatggccttacccttgaagcattaccgagaaggagaacagagatgggcttgaagagccacgtgctgccggctccaaattcccaaggacaaggatccctctgcatttttgtctatgtaacctcttatatggactacattcagctgcaaggaaaggaaaaccttgattgcagtggtttaaacaaacagaagattgtttttccacatagcatggattctggagatgggtggctaatggtattggttcaacaactccacgaaggtaggggtcacgtcttggatccttttgccttaatctcagtgctcgttacttcatggtcccaagatggctgctgtatccccaagaatcatgtctgcgttcaaggaaggaggggtggaggaagaggaagggccaaactagctggacccgtcaccttctatcagaaagtaaaacctcgtcagaagtctgtttcctgctctctccctctgcatatcttcacttagatgcccttggcccgagccagctaccattgcacctctagctgcaaacaaagctaagacagcagggaacagaattgtcatggctgaatagaccaatcgtgttccatctactgagactggcacactgcctcctgcaataaaactgggatcccattaccaagagagaaatgcagaattgtgtaccagttagcttttgctgtgtaacaaaccatccccaaacttggcagctagaaacaaaccctgtattttcccacaatcctatgggttggcaatttgggctgggctcaacagggcagttctgctgctcacacctgggatccctcatggagctaaggtcagctgttacctcagctgggcctggatggtctaggatagccttactcacttgcctggcaggtgacaggctgttggctggaattgcttggttctcctccatgtggcctctccagcaggctagctcaggcttattcacatgatggcttcaggattccaaagagagtgagagtagaagctgaaagacttcttgagttcttggcctggaactgggactaggacagtgtcacttctgctaagttcttttggtcagagcaaatcacaaggctttacccagattcaagggatgagaaacagactacatgtcttgatgaggggaaccacaaagagcttgtggccatttttcacctatcacaaataattttggatgggtatttatttggataaaggtatttccctcttccccctttctctctgtctcatggggcctcactctgccaagttggaaggcactaagacattgtcctggccctcagggtctaggggaagaggtgttggggcaggaagtgagtctctccatgggctggacccactgtagtaggagtgcctccttgtctgcactgctggtatggggttaggccaggtaggacattccagaggggcttctgaaaaccaagagtccctggggaaagggaacagagtaaggcaggccttgttctcactgccctctaagggaacttggtcactcggcacttttaagcctcagtttctccagttcaataataaggacaagagcttttcccatgcattctctttccccgggaaagttgactgaggtgaccagtaatagaattgaaaagggagagtgtcttcagtgcaatgtggcatcctggattgggtcttggaacaaaaacaggacattagtgggaaaattggaaatctgaaaaaagtctgaattttagttaatataccaatttcagtctcttggttttgacagatgtaccatggtgatgtaagatgttgaccttggggtaggctgggtgaagggtatacaggaactctttgtactatctctgcaacttctctgtaaatctagtatcattccaaaataaaagtttatttaatttaaaaa

SEQ ID NO: 355846 - DNA, 469 bp, Homo Sapiens
  misc_feature (279)..(374): n is a, c, g, or t
  misc_feature (450)..(450): n is a, c, g, or t
gagtaggagtgcctccttgtctgcactgctggtatggggttaggccaggtaggacattccagaggggcttctgaaaaccaagagtccctggggaaagggaacagagtaaggcaggccttgttctcactgccctctaagggaacttggtcactcggcacttttaagcctcagtttctccagttcaataataaggacaagagcttttcccatgcattctctttccccgggaaagttgactgaggtgaccagtaatagaattgaaaagggagagtgtcttcnnnnnnnnnnnnnnnnnnnnnnnnnnnnnnnnnnnnnnnnnnnnnnnnnnnnnnnnnnnnnnnnnnnnnnnnnnnnnnnnnnnnnnnnnnnnnnnntaccaatttccagtctcttggtttttgacagatgttacctggtgatgtaaggtgttgacctggggtaggctgggtnaagggtatacaggaacttt

SEQ ID NO: 355847 - DNA, 1442 bp, Homo Sapiens
  misc_feature (468)..(502): n is a, c, g, or t
  misc_feature (729)..(729): n is a, c, g, or t
ttgggcggggctcatcgtggtggtggagaaccgacaccccaaggcctacctgcacgtgcagtgtgactgcaccgacagcttcaacgtggtgtccacacgcggcagcctgcgtacccaggatagcgtgccacccctgcacaggcaggtcctggtgatcttgtcccagctagagggcaacgccggcttctctatcacccaccgcctggcacatcgcaaggcagcccaggccttcctcagtgactggacagcctccaaggggacccacagccccccactcacgccagaggtcgccggtctgcatgggccccgaccgctgtgaccaccatgcctggggcaggggctgtgcacagacggaccccccacccccacacgcactttatgagggagaccccggacagaggacgcttgagccagaatctcaggaccccgcccagggagctgccagcccagggctcagcttcccatggnnnnnnnnnnnnnnnnnnnnnnnnnnnnnnnnnnnacagtccgcctggccaggcctcctggccgccacgcagaatacctcgaaccaggcgggctgtgaaccagccccgctcacctgccagccccaacacccgacgggggccgaggccaggctgcccctccctgtgggctcagggtctcctgcgggctaggcagccaggagctctgtccgcaaaaccaaatgtgggtgtcagaggccaagaccctggggtgggatcagggacncacccctcacggggcataaggtcagttttcccccagagcccgggtccctgtcccccacagggcaggcggggtccctggagccctggtgtggagcggcgagtcccggggcggtgcctgtctcagaagaaggggcccttggccagccccccagcgacactatgcaaatcctggagtgcccgccaggatcgaagccatgactgggtgcaggcgggcgccaggcccgctgtgggtgggcaccagttctcagcaccgctcactgctgccgggcacactgggaccagcaggctcctcagccaaccctgtccctcggcccggccctgccagagagggaccccagcacatcgtgggcacgggcagggctcagccgctcccacctccccacagaagcccaggagtgtgtggacgtctgagcccagctttctgcgtgccctcctggcccctcactcccggcagcgggccggcctcgcccccactccccctcctaccccggcaggggcttccggggccttttcacctggagaaacattcccactcccctttggcctccctgtactctgagctgtgaatatttttaaccctgtaaatacggccagctcttgtgacacagagactattttatcaattgtcagtcccgttcctttaccataggattctccacagtggcttccgactcaggctccaatggaccaaataaaagcgttttgttttgtaaa

SEQ ID NO: 355848 - DNA, 1340 bp, Homo Sapiens
  misc_feature (922)..(956): n is a, c, g, or t
  misc_feature (1003)..(1003): n is a, c, g, or t
  misc_feature (1046)..(1046): n is a, c, g, or t
  misc_feature (1090)..(1090): n is a, c, g, or t
  misc_feature (1197)..(1208): n is a, c, g, or t
  misc_feature (1264)..(1279): n is a, c, g, or t
caggagggcagcaggcgctcggacgcagtggacagccacctgctcggacctgtgcatcctggtgttccgggccacgttcggcagcggcggccacctcagcctgggccgcctcctggcccacagtaagcgcgcggtcaagaagttcgtcagctgcgacgtcatgctggagcctggcgagtacgctgtggtgtgctgcgccttcaaccactggtgggcctgcccctgccgggcacccctgccccccaggcctccagcccctcggcaggggtcccgagagcctccccagagccgccgggccacgtgctggctgtgtacagctcgaggctggtcatggtggagcccgtggaagcccagccgaccacgctggccgacgccatcatcctgctcaccgagagccgcggagagcggcacgagggccgtgagggcatgacctgctactacctgacacacggttgggcggggctcatcgtggtggtggagaaccgacaccccaaggcctacctgcacgtgcagtgtgactgcaccgacagcttcaacgtggtgtccacacgcggcagcctgcgtacccaggatagcgtgccacccctgcacaggcaggtcctggtgatcttgtcccagctagagggcaacgccggcttctctatcacccaccgcctggcacatcgcaaggcagcccaggccttcctcagtgactggacagcctccaaggggacccacagccccccactcacgccagaggtcgccggtctgcatgggccccgaccgctgtgaccaccatgcctggggcaggggctgtgcacagacggaccccccacccccacacgcactttatgagggagaccccgaccagaggacgcttgagccagaatctcagggaccccgaccagggcagctgccagcccagggctcagcttcccatggnnnnnnnnnnnnnnnnnnnnnnnnnnnnnnnnnnnacagtccgcctggccaggcctcctggccgccacgcagaatacctccnaacccagggcgggctgtgaaccagccccgctcacctgccagcncccacacccgaacgggggccgaggccaggctgccccctccctgnggggctcaggggtctcctggcgggctaggcagcccaggagctctgtccgcaaaaccaaattgtggggtgtcaaagggcaaaaaaccccggggggggggacaagggannnnnnnnnnnngggggaaaaaaggccagtttcccgcccaaaagcccggggcccctgtgccccccacnnnnnnnnnnnnnnnntccctcgggccaccttggtgcgacaccgggcaagatacccggggcgggggccctgtattac

SEQ ID NO: 355849 - DNA, 1426 bp, Homo Sapiens
  misc_feature (1196)..(1230): n is a, c, g, or t
  misc_feature (1347)..(1355): n is a, c, g, or t
gctgggtggcgaattcggcacgaggggccggggcacctgcgtggcgagctcatgccgcacggcagcagtgagggtgtcttctggatggagtacggcgactttgtcaggtacttcgactccgtggacatctgtaaggtgcactcggactggcaggaggcgcgggtgcagggctgctttcccagctcggccagcgcgcccgtgggggtaacagcgctcacggtgctggagcgggcctcgctggagttcgcgctcttccaggagggcagcaggcgctcggacgccgtggacagccacctgctggacctgtgcatcctggtgttccgggccacgttcggcagcggcggccacctcagcctgggccgcctcctggcccacagtaagcgcgcggtcaagaagttcgtcagctgcgacgtcatgctggagcctggcgagtacgctgtggtgtgctgcgccttcaaccactgggggccgcccctgccgggcacccctgccccccaggcctccagcccctcggcaggggtcccgagagcctccccagagccgccgggccacgtgctggctgtgtacagctcgaggctggtcatggtggagcccgtggaagcccagccgaccacgctggccgacgccatcatcctgctcaccgagagccgcggagagcggcacgagggccgtgagggcatgacctgctactacctgacacacggttgggcggggctcatcgtggtggtggagaaccgacaccccaaggcctacctgcacgtgcagtgtgactgcaccgacagcttcaacgtggtgtccacacgcggcagcctgcgtacccaggatagcgtgccacccctgcacaggtcctcaccggtcccctcccccaggcaggtcctggtgatcttgtcccagctagagggcaacgccggcttctctatcacccaccgcctggcacatcgcaaggcagcccaggccttcctcagtgactggacagcctccaaggggacccacagccccccactcacgccagaggtcgccggtctgcatgggccccgaccgctgtgaccaccatgcctggggcaggggctgtgcacagacggaccccccacccccacacgcactttatgagggagaccccgacagaggacgcttgagccagaatctcaggaccccgcccaggggagctgccagcccagggctcagcttcccatggnnnnnnnnnnnnnnnnnnnnnnnnnnnnnnnnnnnacaggtccgccctggccagggcctcctgggccgccccccagaataccctctaaaaccccggggggggttttgaaacaagaccccgcttcaactgtcaacgcccacaacccccggaannnnnnnnncccaaggcccaatctcgaccccctacccctggtggggctctcagtgttgccatccctatgacgagcctaac

SEQ ID NO: 355850 - DNA, 1159 bp, Homo Sapiens
  misc_feature (13)..(13): n is a, c, g, or t
  misc_feature (15)..(15): n is a, c, g, or t
  misc_feature (34)..(34): n is a, c, g, or t
  misc_feature (41)..(41): n is a, c, g, or t
  misc_feature (50)..(50): n is a, c, g, or t
  misc_feature (70)..(70): n is a, c, g, or t
  misc_feature (92)..(92): n is a, c, g, or t
  misc_feature (125)..(125): n is a, c, g, or t
  misc_feature (145)..(145): n is a, c, g, or t
  misc_feature (151)..(151): n is a, c, g, or t
  misc_feature (184)..(184): n is a, c, g, or t
  misc_feature (196)..(196): n is a, c, g, or t
  misc_feature (200)..(200): n is a, c, g, or t
ggcactgggcgcngngcagaacattccagcaacnggtcacngcagcagcncactcacatggcggtgggcncacgggctgacctcaccttccngaaggagcacctgtgtgcgcaggcatccgagtncatgtcacgtgctggcacgncaatcnccatcctttcacaacaggtcacgaagccgactnaatttaaatggntgtntgggtaatactgcccatgaccttcattccagagagcaacaggcatcaggaaacgtctgtcacaacaggcagggctggagcgtgacacggttgagaatccctgatgctcaacccgtattttctggctaccagttgaaagaaagggtgagaggatgcttggctccgagcaagtggctgagaaacgcagccataacattcagctccttctcaccaaattctttaccccaaagaaccctgggaggaagacacatttgctaggagctgggtacctgaaatcaaggtaaggaaaggatgccaggttctctcctccaaatggcgctctgggcgtctcccctacaatcagagaggaacgaaacttacacgaaccttaaacttctgttagaggtaaaatagaataataataataaatcccagttcagtgaattcaggttaaccgcaaagctcatcggtttggagagacgagctctgacctttgtgaaattttgtgcacaaaacaacctggaacactgctgtgagagagagggctgtgtcctggccagtgtcggccccacctgcaggaagtgcttatctgtttcatcggtgaggtttgctggctgggcttggggaataatgggttcccactttctcaattgtctccagggtttggaacacagggctctgcgcctctttcttcacttgctgttccacagagaaggtgacccgagctgcacagtccaaaccgaaggacacttagtccccaactggatgaaacagggaagaagcgaaagcatcttcatctatcggtctcagtatttgaaattttgctttctagataggcagaccaacggaatagaagataaagtctctcctgcagcagcgctgaacaccgtctccggacgtctggagctatcaccatgggcaacactttcatggtctttatttttagctcctcctttagaaactcactttttggggtggttt

SEQ ID NO: 355851 - DNA, 1349 bp, Homo Sapiens
  misc_feature (452)..(452): n is a, c, g, or t
  misc_feature (750)..(750): n is a, c, g, or t
  misc_feature (755)..(755): n is a, c, g, or t
  misc_feature (770)..(771): n is a, c, g, or t
  misc_feature (792)..(792): n is a, c, g, or t
  misc_feature (802)..(802): n is a, c, g, or t
  misc_feature (847)..(847): n is a, c, g, or t
  misc_feature (850)..(851): n is a, c, g, or t
  misc_feature (857)..(857): n is a, c, g, or t
  misc_feature (864)..(864): n is a, c, g, or t
  misc_feature (867)..(867): n is a, c, g, or t
  misc_feature (873)..(873): n is a, c, g, or t
  misc_feature (885)..(885): n is a, c, g, or t
  misc_feature (888)..(888): n is a, c, g, or t
  misc_feature (891)..(891): n is a, c, g, or t
  misc_feature (898)..(898): n is a, c, g, or t
  misc_feature (907)..(907): n is a, c, g, or t
  misc_feature (909)..(909): n is a, c, g, or t
  misc_feature (916)..(916): n is a, c, g, or t
  misc_feature (919)..(919): n is a, c, g, or t
  misc_feature (921)..(921): n is a, c, g, or t
  misc_feature (923)..(923): n is a, c, g, or t
  misc_feature (928)..(929): n is a, c, g, or t
  misc_feature (931)..(931): n is a, c, g, or t
  misc_feature (934)..(936): n is a, c, g, or t
  misc_feature (938)..(938): n is a, c, g, or t
  misc_feature (955)..(955): n is a, c, g, or t
  misc_feature (957)..(957): n is a, c, g, or t
  misc_feature (959)..(963): n is a, c, g, or t
  misc_feature (965)..(966): n is a, c, g, or t
  misc_feature (974)..(975): n is a, c, g, or t
  misc_feature (977)..(977): n is a, c, g, or t
  misc_feature (983)..(984): n is a, c, g, or t
  misc_feature (986)..(986): n is a, c, g, or t
  misc_feature (990)..(990): n is a, c, g, or t
  misc_feature (994)..(996): n is a, c, g, or t
  misc_feature (1004)..(1005): n is a, c, g, or t
  misc_feature (1007)..(1007): n is a, c, g, or t
  misc_feature (1009)..(1010): n is a, c, g, or t
  misc_feature (1014)..(1014): n is a, c, g, or t
  misc_feature (1016)..(1016): n is a, c, g, or t
  misc_feature (1025)..(1025): n is a, c, g, or t
  misc_feature (1043)..(1043): n is a, c, g, or t
  misc_feature (1060)..(1060): n is a, c, g, or t
  misc_feature (1083)..(1083): n is a, c, g, or t
  misc_feature (1086)..(1086): n is a, c, g, or t
  misc_feature (1094)..(1094): n is a, c, g, or t
  misc_feature (1101)..(1102): n is a, c, g, or t
  misc_feature (1111)..(1111): n is a, c, g, or t
  misc_feature (1118)..(1118): n is a, c, g, or t
  misc_feature (1144)..(1144): n is a, c, g, or t
  misc_feature (1148)..(1148): n is a, c, g, or t
  misc_feature (1151)..(1152): n is a, c, g, or t
  misc_feature (1159)..(1159): n is a, c, g, or t
  misc_feature (1169)..(1169): n is a, c, g, or t
  misc_feature (1183)..(1183): n is a, c, g, or t
  misc_feature (1185)..(1185): n is a, c, g, or t
  misc_feature (1192)..(1192): n is a, c, g, or t
  misc_feature (1326)..(1327): n is a, c, g, or t
ccccaacccccggacgcgcgccccggcggggcgcccgtgtggccgggcaccggcccggaattcccgggatgccgggaacaattttccaaggttgtaaagccaaattatcatttcatgttatccatttcttcaaagcaaaacatgaaatggttttagctagagtcagaccagaatgaaaatgccaggagctggtacactagagatgtagtaagaacctgggatattcctgaccccatctggttttcttttacccataaataacatgaatgaaaaaagattgggacaatagagactggaagtcatcatgtgcagttcaccgcttctgagcttgctgcagttttggggtgtgtgtgtattagattccttctcagtaattctggaataaggcaaggagtgggtggtttttcatagctagataagatcttttccaaagtttttcttagaaccaaccnaaaaaacaatcccgagtacgcccaagaatttgataatgctggatgccttgcagacatcattcagtttctaatattgggcaacaattattattaaatgaattatttctgtagttggaatctgtaccttccgaacctctacaccaataactgctgcaggtgtgattttgggctgtcacactgcacatctatcataatgtgccctgtaactattggcagtgaccttggaaaatctggccaagcctaggggtttccttttccatttgccaagttccattgtgccgggactgccgtgctccantgagntcgtctgtcacaccnnattcttgcccctcgctgggcnggccgtggcntacggctggcagggggtaaggcgggcccgcctccctttcttcccntcnncatacncctcttntgntttccngtgactccaccngtntgntgtgggnagtgttggntncctttcnttntncngtccnntnttnnntntttgccggctgtcaaancnannnnngnntctgaccnngntgcggnncntttntttnnnggtgccanncntnncccngngtttgtggnatatgggccacgggtgtntggccttctgtgtttgncggtcttctgcttcttaaccgtnccngttttctntttatgnntcttgtctntccatgntgttttaaggtctccactggctgttnttgncanncgacagngcattcggcngcccagtgccgtgngncctgacngatgccgtatttctgagtgcttccatgtgaatgctgccctcctgtagcatgtgtccaagtggacatagccactaaccaactagttacctttggactgcaacaaaaaatgtgaaaatgaagatttatttcttttnntttacttaaaaagaaacctctg

SEQ ID NO: 355852 - DNA, 745 bp, Homo Sapiens
  misc_feature (4)..(4): n is a, c, g, or t
  misc_feature (6)..(6): n is a, c, g, or t
  misc_feature (14)..(14): n is a, c, g, or t
  misc_feature (18)..(18): n is a, c, g, or t
  misc_feature (29)..(29): n is a, c, g, or t
  misc_feature (48)..(48): n is a, c, g, or t
  misc_feature (50)..(50): n is a, c, g, or t
  misc_feature (52)..(53): n is a, c, g, or t
  misc_feature (69)..(69): n is a, c, g, or t
  misc_feature (73)..(73): n is a, c, g, or t
  misc_feature (75)..(75): n is a, c, g, or t
  misc_feature (77)..(77): n is a, c, g, or t
  misc_feature (81)..(81): n is a, c, g, or t
  misc_feature (83)..(83): n is a, c, g, or t
  misc_feature (86)..(86): n is a, c, g, or t
  misc_feature (94)..(94): n is a, c, g, or t
  misc_feature (101)..(101): n is a, c, g, or t
  misc_feature (118)..(118): n is a, c, g, or t
  misc_feature (123)..(123): n is a, c, g, or t
  misc_feature (132)..(132): n is a, c, g, or t
  misc_feature (139)..(139): n is a, c, g, or t
  misc_feature (147)..(147): n is a, c, g, or t
  misc_feature (150)..(150): n is a, c, g, or t
  misc_feature (164)..(164): n is a, c, g, or t
  misc_feature (166)..(167): n is a, c, g, or t
  misc_feature (186)..(187): n is a, c, g, or t
  misc_feature (201)..(201): n is a, c, g, or t
  misc_feature (204)..(204): n is a, c, g, or t
  misc_feature (212)..(212): n is a, c, g, or t
  misc_feature (223)..(223): n is a, c, g, or t
  misc_feature (225)..(226): n is a, c, g, or t
  misc_feature (229)..(230): n is a, c, g, or t
  misc_feature (232)..(232): n is a, c, g, or t
  misc_feature (236)..(236): n is a, c, g, or t
  misc_feature (238)..(238): n is a, c, g, or t
  misc_feature (259)..(259): n is a, c, g, or t
  misc_feature (265)..(265): n is a, c, g, or t
atcnanaagggccncgtnatctatgggcntgaacttggaaaaattggncnannctagggggttgtcttntgcntntngtcnantgnccttgtgnccaggangccgtggtgccatgtantgccntgtgcacancccattntgcccctncanggggcaggcctggncnnacagttgtcgggtattaanncaggcccgcctccnttnctgcccancgcagttattntnnttnngntttncnagtgactccgaccagtttggngtgggnaagtgttagcttcctttccttcttccatcccttcttccatctttccagctgtcaaatccaatccagtctctaacctaaatgcagatcatttatttaaaagtaccaaacataacccagagtatgtggaatatgggcaacatatatatagccttctgtatttaacgatcttctgcttcttaaccgtaccagttttctatttataactcttatctatccatgatgttttaaagtctccacttgctgttatttacaaacgacagtgcattcagcagcccagtgccgtgagccctgacagatgccgtatttctgagtgcttccatgtgaatgctgccctcctgtagcatgtgtccaagtggacatagccactaaccaactagttacctttggactgcaacaaaaaatgtgaaaatgaagatttatttcttttaatttacttaaaaagaaacctctgtgctagcaataaagcatttatattgtgta

SEQ ID NO: 355853 - DNA, 3204 bp, Homo Sapiens
  misc_feature (107)..(198): n is a, c, g, or t
  misc_feature (2562)..(2669): n is a, c, g, or t
  misc_feature (3147)..(3147): n is a, c, g, or t
  misc_feature (3150)..(3150): n is a, c, g, or t
cgccggttgaaagcgcgtgtctgcgtcgggttctgttggagtgcgttcggtgcgccgtgggtccgcgctgcttccacccaacttcctgttagtttctctcctgtcannnnnnnnnnnnnnnnnnnnnnnnnnnnnnnnnnnnnnnnnnnnnnnnnnnnnnnnnnnnnnnnnnnnnnnnnnnnnnnnnnnnnnnnnnnncatcattatcttctatggagttcttcattcccacatctgtggaccttaaaatcctaccgttgagtgcctgccttggatcagcagtcagttcgttaccttggttctcagacagatgcttgcaacaaccgccatgcgattcgcccactcttgggttacattagttatacactctggaggtgacttgacctgtcattgtgaacaattattgctcttggacgacccaggacataggccagccagtacttaccccagtgtgttggagaatcgcgctcggcttcttcctctgtgctgagtcatgaaagttgccggagcaggtgcagttacacaacctccaggtatgatcctgtttaaggactggatttaggataactacttagaggttaaaagtcacaagggtgtatggatgaggctggagtgatctgggaccaaagacatctaggcttgctgtcaaggcttctgatcaacatgagatgaccgccgtgtggtaaactgatgaaccccgacgctgatcaacatgagatgaccgccgtgtggtaaactgatgaaccctgaccctgatcaacatgagatgaccgccgtgtggtaaactgatgaaccccgaccctgatgaacgtgagatgaccgccgtgtggtaaactgatgaaccccgaccctcatgaacatgagatgaccgccgtgtggtaaactgatgaaccccgaccctgatcaacatgagatgaccgccgtgtggtaaactgatgaaccccgaccctgatgaacatgagatgaccgccgtgtggtaaactgatgaaccccgaccctgatcaacatgagatgaccgccgtgtggtaaactgatgaaccccgaccctgatcaacatgagatgaccgccgtgtggtaaactgatgaaccctgacccattaggctttggctacagaatgtggaaataaattgtgttactacatgtgtgtaatcctagggtgcaagacacccgccggggaggttccatagagtgatgggttctgcaggtaactcatcctctagtcctctgtaagctcctagaaggaagaaattatgtcctttagactaataaaattcctccaaaccaaatacagcacctactgtgaagacacaaagatacttttagaatagtaaaaactttatccattgagaaattccttaatgaaacagtatccaagaagtcatttgccagcagatttcttagaggtgcgataaagaagaggacattgccagtcgtcacagcagctgcaatagctcctctctattgttaaacagtgggatatcttgtgcaggttttcagttgacaatcaattttaaagattagtttcggtccccatcaatcaattatttattaacccatcaataaaaatttaaatgctctgtgaggtacaatagctattaaaagagacagaggcactttctgtgtccagaggggcttttagtctgctctggaaagcaagatgcgtgcagatgagtgacgcagtgcatcgtgtggatgcaaagggagggactcacatgggaaccagaggagctacgaagggaggcagtggggactggtgggtcgagacctggaaataacacatgaataggcaacaaaggtttcctttcctcttccatgcacttcagtccttgaaaaacgtcttaccacggaattccacagcgtaccaagcgattccacagcttgatggcacactctcctttctcagcattcttgaaaatggcgtgtgagccaagccatcttactgagaaattaccttaaaccatttgatgaaccaaaaatattttgtaatacccatctccgacattaggtaggcaaatcacacagaaacaccgaggtcttctgagtcatatttatctgaaaaatcacagcttgggtgcatgtgaagccagaggagcactcctggggcctgcggtgccatcactcagctcccctgggcttcacatggccatggagcacccagcaagtgtaggctctgagccttcagggaggggcggcatcagccagcaccatcgtctcctgggtcttgtgcctcttccttggttgcggtgttgtcagggccagaattgggcaattccgggtgacatccaggtgtggctgctgacacggagcacaggtgaggttcactgaggtaagtgggccatggccttgggcttctagttcagaacacaccatccactcagcatgtgaacccagctcccaaagcgtatgtgtgcatgtgtgtacctgtgcacattgcgcatgtctctgtgtatgcatgtgctttgatgcatgttgatgtacgggggtatctgtgtattgtgtatgcacacatacgagcatatgtgtacatgaatttgtattgcacatgtgtttaatgcgaacannnnnnnnnnnnnnnnnnnnnnnnnnnnnnnnnnnnnnnnnnnnnnnnnnnnnnnnnnnnnnnnnnnnnnnnnnnnnnnnnnnnnnnnnnnnnnnnnnnnnnnnnnnncacatatacacctgtgtgcatgtgtacatggtatttaagcatgtttgcacgtgtgtttgtgcttgcatgtgctgcgtgtttgtgttggtgggatgtggggaggctgctgtggagacaaaagctggagagaacttggtagagtaacccaggtcaggaaatggcacctgcaaaggaaggctggagtgcctgggattcacgttgaaatggccaatccgtcagctgggctggacacagccatcacgctgggcagctgtgaggttaaaacagaaagtctgggctgtggggaggctgagaattgagatgcatgtatgagatgagtcacgagggccaagtggtgtgtgtgagaaagcaggcacagcaccactaaacactaaggagatttcaggggagttacgggtggagggaggacatcagatctaccctggaagttaaacgtgtttcgagtgcattaaatactatggggccacagacgccttgnctncatatctactcttttataaatgaagtaaagtctttggaaatacttttctcactc

SEQ ID NO: 355854 - DNA, 1683 bp, Homo Sapiens
  misc_feature (293)..(293): n is a, c, g, or t
acaccaaacctggggctggtgggcctggaaacgctccccctgcaacctttaattgtgatagggacccaaaaacttgcataagtgaccagctcttcatggagatggctgaccggatggcacaggatggatggcgggacatgggctacacatacctccaacattgatgactgctggatcggtggtcgcgatgccagtggccgcctgatgcagatccccaagcgcttccctcatggcattcctttcctgcctgactacgttcactccctggggcctgaagttgggtatctacgcgnacatgggcaacttcacctgcatgggttacccaggcaccacactggacaaggtggtccaggatgctcagaccttcgccgagtggaaggtagacatgctcaagctggatggctgcttctccacccccgaggagcgggcccaggggtaccccaagatggctgctgccctgaatgccacaggccgccccatcgccttctcctgcagctggccagcctatgaaggcggcctccccccaagggtgaactacagtctgctggcggacatctgcaacctctggcgtaactatgatgacatccaggactcctggtggagcgtgctctccatcctgaattggttcgtggagcaccaggacatactgcagccagtggccggccctgggcactggaatgaccctgacatgctgctcattgggaactttggtctcagcttagagcaatcccgggcccagatggccctgtggacggtgctggcagcccccctcttgatgtccacagacctgcgtaccatctccgcccagaacatggacattctgcagaatccactcatgatcaaaatcaaccaggatcccttaggcatccagggacgcaggattcacaaggaaaaatctctcatcgaagtgtacatgcggcctctgtccaacaaggctagcgccttagtcttcttcagctgcaggaccgatatgccttatcgctaccactcctcccttggccagctgaacttcaccgggtctgtgatatatgaggcccaggacgtctactcaggtgacatcatcagtggcctccgagatgaaaccaacttcacagtgatcatcaacccttcaggggtagtgatgtggtacctgtatcccatcaagaacctggagatgtcccagcagtgaggagctgggacatgtgacaggctgtggtggcaccactgagcctagaccatggagccttggcatgcccagggcaagtggggaggttctctgctccccaggcctgctcggtgactgaccccatcatacccaaagtgcaatctcacggccaggttctatgccctgtccaagcgtaaaccctcttggaaacttcttttggggcaattttcctgtggccttcctggcctctacttccatgtgcgcagccccacagacgttgctgagcaactcgccagcctcctgagctccatgcccatcaggactctagcctctgaccttgctgttgactctgaaatcaggatttggaagttttcgaattaggagtagagagatctgacctcttgccaggaatgcccatggatcatgtgattgggcttttctacccatagagggccttgcagcctgataccaccctgggagtgaggggaccaaaggagaccttggctccctcaggtccccaataaacctgtttttttatc

SEQ ID NO: 355855 - DNA, 1122 bp, Homo Sapiens
cggattcgagtcagaagcggcggcaggtctgaacgcttcgagcccaacacatacagctgatacacgcagaccagatctggtcaggtcctcggaagctgagtccagagcgatgctgctgaagacagtgctcttgctgggacatgtggcccaggtgctgatgctggacaatgggctcctgcagacaccacccatgggctggctggcctgggaacgcttccgctgcaacattaactgtgatgaggacccaaagaactgcataagtgaacagctcttcatggagatggctgaccggatggcacaggatggatggcgggacatgggctacacatacctcaacattgatgactgctggatcggtggtcgcgatgccagtggccgcctgatgccagatcccaagcgcttccctcatggcattcctttcctggctgactacgttcactccctgggcctgaagttgggtatctacgcggacatgggcaacttcacctgcatgggttacccaggcaccacactggacaaggtggtccaggatgctcagaccttcgccgagtggaaggtagacatgctcaagctggatggctgcttctccacccccgaggagcgggcccaggggtaccccaagatggctgctgccctgaatgccacaggccgccccatcgccttctcctgcagctggccagcctatgaaaggcggcctccccccaagggtgaactacagtctgctggcggacatctgcaacctctggcgtaactatgatgacatccaaggactcctggtgggagcgtgctctccatcctgaattgggttcggtggagcaccaagaacatactggcagccaaggggccgggcccctggggcaccggggaatgacccctgaacatgcctggctcctttgggaaacttttggccctcagctttaaaagcaaatccccgggccccagatgggcccttgtggacagggggctgggcaacccccccctctttgaaggcccaccagaaccttggggaaaccatctcctcggcccagaaaatgggggcatttttggcaaaaacccccctccttggacccaaaatctcaccccgggaatccccttaaggaactcccagggaaaccccccgat

SEQ ID NO: 355856 - DNA, 1873 bp, Homo Sapiens
  misc_feature (28)..(28): n is a, c, g, or t
  misc_feature (38)..(38): n is a, c, g, or t
  misc_feature (45)..(45): n is a, c, g, or t
  misc_feature (1742)..(1751): n is a, c, g, or t
aaaatggggaaggttctctgctcccccnaggcctgctngggtgantggacccccatcaaaacccaaaaatgcaaaactcaagggccccaggttcctatgcccctgtcccaaaacgtaaaaccctcttggaaaacttccttttggggcaaattttccctggtggccttccctggccctcctaacttcccatgtgcgcagcccccacagacgttgctgaagcaactcgcccagcctccctgagctcccatgcccatcaggactctagcctctgaccttgctgttgactctgaaatcaggatttggaagttttcgaattaggagtagagagatctgacctcttgccaggaatgcccatggatcatgtgattggcttttctacccatagagggccttgcagcctgataccacctgggagtgagggtcacaaaggagaccttggctccctcaggtcaccaataaacctgttctttaatcaagtagttgtaatatggacctggggtacctttagttagggactctggtggcactacacggggtgctggattcaaatctcacctctatggatgatgtctggcatcgtctggcccctccttttccaaagtgaccagaagattgtacttcctagagatgccagacttgcctcacacccaggagctgcccctgctgtgcctggtatgctggcagtggtgatggtgacaacacaatgaggccaagtagcaatgctcccaggtcctgcagcttgtgctctgcccagcagtgcccctggcccagcacctcagcctgctcttctctctggtggctccaccccaacccctacttcttttcctttatttctctcccaacctggctgcaaaggaggttcatattccccagatgtgtccacaaacctgtccaggagttgtgtcttaaaattgatttcctgtccctcttcctaaggacaggggtaacagtcaaagtgaaggaatgatgggttcttgcctgtcttgctttggtccgtatttcccaagccctcctcttttagcaaaggctacagggcacttgtcttccctggtggctctcccctttggagagagctagtggcagagcaacctagctaggtcctccttgggctttgaatgcaggagcacccagtgccccaggccttgcactgtgctgcccaaggagtattttctgggtggatctcccatactcctcagggttctgaggtccttgtatttagggtatggtgtaaaaacttacatatgcacattttgttacatcatttaagatgattggaagctttactggttaagtacagggtcaccagagaaaagttcctttccccagttgatgtcttgaggctgttgagaaacttaggacagaagcctacctcatcccaggcctgcccctccgtgcatagctctgcctttgggtcttgttcatagtgctgttcaggcaaaatggaatagtctcaggtgggaacaccttctcttgctagctccaggaaggctttgtgggaaatgagttgagaccatggacttgggagttgggggccagagttgagcctggacttgaccaattaattcccttacctttcagcccaagatagctacatgtctttacttgctgtataagttttccttttgtcctgggggtgcctgattgatcctatctcttcacccttcattctttcaacaaacatgccatctatctcccaggacatttattcccttctattcaaggccagttaggaatgcaattannnnnnnnnncagttaaatacagacttgtttggacgcaaggtaccctttctctttttaaaaactttttatcatgaaaactttcaaatacaaaaataaaatggtagagtgaacctccatgtacccagcaaaaa

SEQ ID NO: 355857 - DNA, 1538 bp, Homo Sapiens
agcggacttccggaagcggcggcgctcgggaggaagtgccgatcggctgctggggcgaaaagggggcgccgggccgctctagccgccctggtccagcgcctccctctctcagcatggacgaggagagcctggagtcggccttgcagacctaccgtgcgcagctgcagcaggtggagctggccttgggcgccggcctggattcgtctgagcaggctgacctgcgccagctgcagggggacctgaaggagctcatcgagctcaccgaggccagcctggtgtctgtcaggaagagcaggttgttggccgcgctggacgaagagcgcccgggccgccaggaagatgctgagtaccaggctttccgggaggccatcactgaggcggtggaggcaccagcagcggcccgtgggtccggatcagagaccgttcctaaagcagaggcggggccagaatctgcggcaggtgggcaggaggaggaagagggagaggacgaggaagagctgagtgggacaaaggtgagcgcgccctactacagctcctggggcactctggagtatcacaacgccatggtggtgggaacggaagaggcggaggatggctcggcgggtgtccgtgtgctttacctgtaccccactcacaagtctctgaagccgtgcccgttcttcctggagggaaagtgccgctttaaggagaactgcaggttctcccatgggcaggtggtctctctggatgagctgcgccccttccaggacccagacctgagctccctgcaggccggctctgcgtgtctggccaagcaccaggatggcctctggcacgcagcacgcatcaccgatgtggacaacggctactacacagtcaagtttgactcgctgctgctgagggaggccgtggtggagggggacggcatcctgcccccactgcgcacagaggccacagagtccgactcagacagcgacggtacgggtgactccagctatgccagagtggtggggtcagatgctgtggactctgggacctgcagctctgcctttgctggctgggaggtgcacacgcgaggtataggctccagactcctcaccaagatgggctatgagtttggcaagggtttgggccgacacgcggaaggccgggtggagcccatccatgctgtggtgttgcctcgagggaagtcgctggaccagtgtgtggagaccctgcagaagcagaccagggttggcaaggctggcaccaacaagccccccaggtgccggggaagaggggccaggcctgggggccgcccagctcctcggaatgtgtttgacttcctcaatgaaaagctgcaaggtcaggctcctggggccctagaagccggcgcggccccagcgtaaaggttgtgtcttgtactctaccatgccagcttgtattccaatctgcccctgaacctgctgcttctccagccttatgtgagaggtcgctctacccaccggtccctcagaccatccttgtgcctcttgcccaaaacgcgtcactcataacgctgcgtcgcccatatggggcaa

SEQ ID NO: 355858 - DNA, 1030 bp, Homo Sapiens
  misc_feature (7)..(7): n is a, c, g, or t
  misc_feature (13)..(13): n is a, c, g, or t
  misc_feature (15)..(15): n is a, c, g, or t
  misc_feature (21)..(21): n is a, c, g, or t
  misc_feature (32)..(32): n is a, c, g, or t
  misc_feature (48)..(48): n is a, c, g, or t
  misc_feature (69)..(69): n is a, c, g, or t
  misc_feature (79)..(79): n is a, c, g, or t
  misc_feature (98)..(99): n is a, c, g, or t
  misc_feature (101)..(101): n is a, c, g, or t
  misc_feature (271)..(271): n is a, c, g, or t
  misc_feature (387)..(387): n is a, c, g, or t
atgtganaacgcnanaaaaantaagtttactnctctgttgaggaggcngtgtggaggggacgcatcttncccacacagngacagaggccacagagtcnnantcagacagcgacgggacgggttactccagctatgccagagtggtggggtcagatgctgtggactctgggacctgcagttctgcctttgctggctgggaggcgcacacgcgaggtataggctccagactcctcaccaagatgggctatgagtttggcaagggtttgggccnacacgcggaaggccgggtggagcccatccatgctgtggtgttgcctcgagggaagtcgctggaccagtgtgtggagaccctgcagaagcagaccagggttggcaaggctggcaccnacaagccccccaggtgccggggaagaggggccaggcctgggggccgcccagctcctcggaatgtgtttaacttcctcaatgaaaagctgcaaggtcaggctcctggggccctagaagccggggcggccccagcggggaggaggagcaaggacatgtaccatgccagcaagagtgccaagcgggcctctcactgcggctcttccagactgaggagaagatcgagcgaacccagcgggacatcaggagcatccaggaggctctcgcccgcaacgctggccggcatagcgtggcgtcagcccagctgcaggagaagctggcaggagcccagcgccagctggggcagctccgggctcaggaagccggcctgcagcaggagcagaggaaggcagacacccacaagaagatgactgagttctagagaccccacaagcactatggacgaagcgtgggaccccagcacgggctgccctcaggaagaccagtgttgcccgaggaggggccggcctgctggcctggggcgtgcggacactgctgagtggagacagagctgcggggtcccatctggacacttacttgcccacctgccagtgtcttgggcatttccttggcaaggacattaaagtgatttcatcacagtgtcaaa

SEQ ID NO: 355859 - DNA, 1534 bp, Homo Sapiens
  misc_feature (1378)..(1396): n is a, c, g, or t
cggctgctggggcgaaaagggggcgccgggcgctctagccggtgaggccggcgggctctctgtggctgcggctgggaaaccgcgcggaggaggtgcccggccggggaccagccctggtccagcgcctccctctctcagcatggacgaggagagcctggagtcggccttgcagacctaccgtgcgcagctgcagcaggtggagctggccttgggcgccggcctggattcgtctgagcaggctgacctgcgccagctgcagggggacctgaaggagctcatcgagctcaccgaggccagcctggtgtctgtcaggaagagcaggttgttggccgcgctggacgaagagcgcccgggccgccaggaagatgctgagtaccaggctttccgggaggccatcactgaggcggtgaaggcaccaagagcggcccgtgggtccggatcagagaccgttcctaaagcagaggcggggccagaatctgcggcaggtgggcaggaggaggaagagggagaggacgaggaagagctgagtgggacaaaggtgagcgcgccctactacagctcctggggcactctggagtatcacaacgccatggtggtgggaacggaagaggcggaggatggctcggcgggtgtccgtgtgctttacctgtaccccactcacaagtctctgaagccgtgcccgttcttcctggagggaaagtgccgctttaaggagaactgcaggttctcccatgggcaggtggtctctctggatgagctgcgccccttccaggacccagacctgagctccctgcaggccggctctgcgtgtctggccaagcaccaggatggcctctggcacgcagtcacgcatcaccgatgtggacaacggctactacacagtcaagtttgactcgctgctgctgagggaggccgtggtggagggggacggcatcctgcccccactgcgcacagaggccacagagtccgactcagacagcgacggtacggcgtgactccagctatgccagaggtatggcagcagctgcggagcccaggagccaggaagtggtggggtcggacgccgaggactctgcaccagtcctctgccctctgtccgtctcttgcatgggtggggtcagatgctgtggactctgggacctgcaactctgcctttgctggctgggaagtgccccccccagggataggctccaaactccctcccaagaagggctatgaattttgggcagggttttgggcccaaccccccggaaaggcccgggtggaaccccaccccctggcttggggaggttgccccccaaggggaaatccccctggaccccaagggtggggaaacccccgcgcaaaactacaaccccgggttgcgcaaagggcggannnnnnnnnnnnnnnnnnnaggtgccttcgggaataagaggccgtaccatccaggggggatcccccgaatatccaagccgccactgggggttcgagctcacctagcgcctgacccccccctcaggcacacgcccttagcggggagcccatcgctaga

SEQ ID NO: 355860 - DNA, 928 bp, Homo Sapiens
gtgttcttttatcttagaaacccacgtgcttggtaggagtgcatcactcacccgcagctgcttcctgaagctgcctgagcctggtgcaaaagaattgggcccccattatggtgctgctgaataaatcttgccaagatagacaaacaattatgaacctcagatggagcttcctactcatgttgatttatgtctcacaatcctgggtattgttaattcaacatagggtgaaactatttctgataaagaacttttgaaaaactttttatactctaaagtgatactcagaacaaaagaaagtcataaaactcctgaatttaatttccccacctaagtcgagacagtattatcaaaacacatgtgcacacagattattttttggctccaaaactggattgcaaaagaaagaggagaagaatattttgtgtgttcctggtattcttttataagtaaagtttacccaggcatggaccagcttcagccagggacaaaatcccctcccaaaccactctccacagctttttaaaaatacttctactcttaacaattacctaaggcttcctcaactgccccaaatctcttaatagcttctagtgctgctacaatctaagtcaggtcaccagagggaagagaacatggcattaaaagaatcacatcttcagaagagaagacactaatattattacccatatacatgatttcagaagatgacataagattcctcttaaagaggaaatgtcaggaatcaagccactgaatccttaaagagaaaagttgaatatgagtcattgtgtctgaaaactgcaaagtgaacttaactgagatccagcaaacaggttctgtttaagaaaaataatttatactaaatttagtaaaatggacttcttattcaaagcatcaataattaaaagaattattttaatgaaaaaaa

SEQ ID NO: 355861 - DNA, 437 bp, Homo Sapiens
ggttttaactagatcttatatttaatatattaataaaacgattataccacacatttacaaatattttcataaatgtatttcattatagttgattttcttcttaatcctctgtattttatgtgtttaaaacattattctgagaaggggtcagcggctttaccaggctgcccagggtgtccagggcacatgaaacggttaaacccccctcgccttagaaggctgaggatggctgtaagggcggcaatcttaggtgaaagatgtgtaagtacttactgaactgtgacattataatattcttctggtgtcacgatttttggtccaccaaagtagtccaggacccagatattggttatattcaacttagcaaagaaccaattatggctggaaggccaggttttcatctcagggtgtcgaatgataacgatgctaagcgggcc

SEQ ID NO: 355862 - DNA, 1268 bp, Homo Sapiens
  misc_feature (1243)..(1243): n is a, c, g, or t
agcggggggcggggcctgggcgcgccgagctccggctgggtccctgcaggtcttggggcccgggactcttcctggagacaccgccatggccgggctatcccgcgggtccgcgcgcgcactgctcgccgccctgctggcgtcgacgctgttggcgctgctcgtgtcgcccgcgcggggtcgcggcggccgggaccacggggactgggacgaggcctcccggctgccgccgctaccaccccgcgaggacgcggcgcgcgtggcccgcttcgtgacgcacgtctccgactggggcgctctggccaccatctccacgctggaggcggtgcgcggccggcccttcgccgacgtcctctcgctcagcgacgggcccccgggcgcgggcagcggcgtgccctatttctacctgagcccgctgcagctctccgtgagcaacctgcaggagaatccatatgctacactgaccatgactttggcacagaccaacttctgcaagaaacatggatttgatccacaaagtcccctttgtgttcacataatgctgtcaggaactgtgaccaaggtgaatgaaacagaaatggatattgcaaagcattcgttattcattcgacaccctgagatgaaaacctggccttccagccataattggttctttgctaagttgaatataaccaatatctgggtcctggactactttggtggaccaaaaatcgtgacaccagaagaatattataatgtcacagttcagtgaagcagactgtggtgaatttagcaacacttatgaagtttcttaaagtggctcatacacacttaaaaggcttaatgtttctctggaaagcgtcccagaatattagccagttttctgtcacatgctggtttgtttgcttgcttgtttacttgcttgtttaccaatagagttgacctgttattggatttcctggaagatgtggtagctacttttttcctattttgaagccattttcgtagagaaatatccttcactataatcaaataagttttgtcccatcaattccaaagatgtttccagtggtgctcttgaagaggaatgagtaccagttttaaattgcccattggcatttgaaggtagttgagtatgtgttctttattcctagaagccactgtgcttggtagagtgcatcactcaccacagctgcctcctgagctgcctgagcctggggcaaaaggattggcccccattacggggcttctgaataaacttccaagntaggcaacaatgatggacttagatg

SEQ ID NO: 355863 - DNA, 2266 bp, Homo Sapiens
  misc_feature (93)..(166): n is a, c, g, or t
  misc_feature (1750)..(1780): n is a, c, g, or t
  misc_feature (1791)..(1824): n is a, c, g, or t
  misc_feature (2204)..(2204): n is a, c, g, or t
  misc_feature (2209)..(2209): n is a, c, g, or t
  misc_feature (2212)..(2212): n is a, c, g, or t
  misc_feature (2214)..(2214): n is a, c, g, or t
  misc_feature (2222)..(2222): n is a, c, g, or t
  misc_feature (2225)..(2226): n is a, c, g, or t
tgcttgtgtgtcggagctctgaggctccggctgacctctcctcggggtcgacgggaacgtctccggatgccaggactcgcaaagggctgacannnnnnnnnnnnnnnnnnnnnnnnnnnnnnnnnnnnnnnnnnnnnnnnnnnnnnnnnnnnnnnnnnnnnnnnnntggttggggtaagattggggaagatgccaggtgatagaatccaccctgcctctgacagcatccaatctggagcaaaggcttctttcaaccttcccccaagctcccaagtacaagcccaaattctggaacaagtcctttccaacacctccttcagagaagctccctggctccaggcagtgcttgctcccctcactgcagcaggaagcctaacttgcgaactgcaggtgtgctccaggtggtcactggatgcaagtttcttttgatttctcctgcttagaaatggtgagagaactatggatgtggaacgtggaggaggaggaacacgaagtggggatctgcacttgcgggtggtcagcactgcggatgcccatgcaaaggcactgcctggtccacatcccggaggggtctctgcgcctcagtcggcatcgcagctgatggtgaaacttttggtgtggcagaagagtgtccacaaacttcggaaggtatccgctacctcctccatagccgtgtatccctgccgagggcaatcatctcggggagccgaaagtccggctcatgggccagggctggctggctggagccacttgcgcggcgcacctgggcggaggttcaggcggccccggtgtcgcaagcggctgtgagtgatgcctccttggtgccggaggggtcccaggaagtctgcagaccagggctgaccagcgggcagcatggtggccgcgatggaaggtgacggggttcgcagcgccaggggacccagcagagccagagcccgggcatcccgcatctccagcagcaccgcggggaggcctggcgctggtgacgtggcggccagtgcacaaggcccacgactcagtcccagaggccagcccatcgtcagctaacttcaggaaccccgggccagctgaggccccgggccccacgggcaagacaaagggcagagggtccgcaggcggggccgagagcaggcagtgcaggcctggctccacaaccgcggagctcgcagggcgcagcaggcacccggcagcaaccagggcttccagaggaggctgtgcacccccgcaaaggctcctgcccggcgtacagcctatccgcggggactccacgtgcaccccctcctcattgtccttgtctagggtcgcagcaaggtcctcgctcccatggcctgactctggggacgcaggagcctgggctgagcaggtggagtagggtgagcaccgccaagaacccagcgagagtggcgccccagggcggcacaggaggccgcatttaacgtataaatcatctcaaagattttatggcatcttcttttttttgatatcttataatatctataatgtctattatatcttgtgatataattattaacaccacttcattgggattattatgattatttttataccaacacatcttcgattattaatattcccagttgctagagaaaaatgaaaacgactagttttgaaagccttacttctgccaatggaagcacattccagcatgtcgacaaggcaatccactttccaccactttcacaagaaacgttactgcacaattttactatcctacccttatatacttttnnnnnnnnnnnnnnnnnnnnnnnnnnnnnnntacataggtcnnnnnnnnnnnnnnnnnnnnnnnnnnnnnnnnnngccagagatgaacaagcattagaaaattaaatgccacacaggtccatgtcagtgcctatgtataatgtggtatactaagtatagatgttccaacagtgtgggatctaggctggaacaagactcctagtcttaagcaattctttctaggttcagtctctggaaataatgccttggatcaaatgtctgagaaaatcaatgggttttaaagactattctatgtcaactataacatttaatttggggatttctgtcccttataatgtctacctcattttggatggaatccttgaggcctggtttattttcttttctttcacacatcctgctcaaatgtagatggagtgtgtttgataaatactatcatcttttgtgaaaaaaanaatantananatgtatanaanntgttgctccagctttaaaatttaaataagtagcccggctg

SEQ ID NO: 355864 - DNA, 974 bp, Homo Sapiens
  misc_feature (323)..(324): n is a, c, g, or t
  misc_feature (354)..(354): n is a, c, g, or t
  misc_feature (413)..(414): n is a, c, g, or t
  misc_feature (440)..(440): n is a, c, g, or t
  misc_feature (483)..(484): n is a, c, g, or t
  misc_feature (515)..(516): n is a, c, g, or t
  misc_feature (562)..(562): n is a, c, g, or t
  misc_feature (575)..(575): n is a, c, g, or t
  misc_feature (612)..(613): n is a, c, g, or t
  misc_feature (625)..(625): n is a, c, g, or t
  misc_feature (627)..(627): n is a, c, g, or t
  misc_feature (904)..(914): n is a, c, g, or t
tgttattccctaaaaaatggccttcctaccagttagggttaagtttatataggaaaaaaatgggcttttctgtaattaatttattaggcattttcactaatttgtgcattttatatctctgaagagcacactgctagcaacctgattgtaaatgaccagaaggacttatatccaacctatgtgacttaaacatacacttaagtactctaaaccactatttaaaaaatacttctagagagattctgaaatcttaatttggttgcactttctggtaatatattttttgaaaactattttgatatttctttcatataacattattnnatctgtatcactaagttaattgtctaaaangtaactgatttcatcaaaccttccagtattaataatttttaagccattttgaaactganncctaaaatactgaaatgcttatgtcnttgtacttactcctttctgaaatgatcagatttttaaaaaatnnatttctcatataaataatattatcaaaaaannatttctcatataaataataatatcaaaaaagctgattttaaaagtntctcccaaagtcntattctagtaattatagagacctaggtaatgagtggnngatatatctgcntntcagatatgccgtaatgtgaaaaataacacagtcatgtgatattctttattaactaaaactgtgttgtttttattttggagtagttctcataattcattggtagggaactatccagtatttatattcctatgtatgtatatcagattaattttgaggcttggtattcctaaaagatttggatgtgtgtatttctttaacttgacgtaaacatgtatcacaaacatatcttttaattccaattaaaggggtgctttggcacatgctgaaatctgggannnnnnnnnnngactttgataaatttatacaaaaagattggaaccaaatgttaattagggtaagtttcttt

SEQ ID NO: 355865 - DNA, 2740 bp, Homo Sapiens
  misc_feature (2014)..(2014): n is a, c, g, or t
  misc_feature (2018)..(2018): n is a, c, g, or t
  misc_feature (2142)..(2142): n is a, c, g, or t
  misc_feature (2153)..(2153): n is a, c, g, or t
  misc_feature (2155)..(2155): n is a, c, g, or t
  misc_feature (2212)..(2212): n is a, c, g, or t
  misc_feature (2229)..(2229): n is a, c, g, or t
  misc_feature (2252)..(2267): n is a, c, g, or t
  misc_feature (2345)..(2345): n is a, c, g, or t
  misc_feature (2352)..(2352): n is a, c, g, or t
  misc_feature (2390)..(2390): n is a, c, g, or t
  misc_feature (2404)..(2404): n is a, c, g, or t
  misc_feature (2413)..(2413): n is a, c, g, or t
  misc_feature (2420)..(2420): n is a, c, g, or t
  misc_feature (2431)..(2431): n is a, c, g, or t
  misc_feature (2434)..(2434): n is a, c, g, or t
  misc_feature (2454)..(2454): n is a, c, g, or t
  misc_feature (2464)..(2464): n is a, c, g, or t
  misc_feature (2467)..(2467): n is a, c, g, or t
  misc_feature (2477)..(2477): n is a, c, g, or t
  misc_feature (2512)..(2512): n is a, c, g, or t
  misc_feature (2536)..(2537): n is a, c, g, or t
  misc_feature (2540)..(2540): n is a, c, g, or t
  misc_feature (2549)..(2549): n is a, c, g, or t
  misc_feature (2553)..(2553): n is a, c, g, or t
  misc_feature (2584)..(2584): n is a, c, g, or t
  misc_feature (2613)..(2613): n is a, c, g, or t
  misc_feature (2624)..(2624): n is a, c, g, or t
  misc_feature (2649)..(2649): n is a, c, g, or t
  misc_feature (2653)..(2653): n is a, c, g, or t
  misc_feature (2660)..(2660): n is a, c, g, or t
  misc_feature (2691)..(2691): n is a, c, g, or t
  misc_feature (2706)..(2706): n is a, c, g, or t
  misc_feature (2708)..(2708): n is a, c, g, or t
  misc_feature (2718)..(2718): n is a, c, g, or t
ggctcactgtggtggtgtgagtgggaggcggcggcgctggtggctgcagctggggtgaggcgcgaggcggcgcactcgacggctgactggagcagcggtaaaggcgaggatggagaccgaaggatataagtcaaagagtacagcagaaaatgtctactgaacggacttcttggacaagcctgtccaccattcagaaaatagccctgggccttgggatcccagccagtgcaacagttgcctatatcctataccgcaggtatagggaaagcagagaagagcggctgacatttgttggggaagatgacattgagatagagatgcgggttccccaggaggctgtgaaactcatcattggccggcaaggagccaatattaaacagctgcggaaacagacaggtgctcggattgatgtggacacagaggatgtaggcgatgagcgagtgctgcttatcagtggttttcctgttcaggtgtgcaaggccaaagcagcaatccatcagatcctgacagagaataccccagtgtctgagcagctttcagttccccagagatctgtgggcagaatcatagggagaggcggcgagacaattcgttctatctgtaaggcatctggagccaaaattacctgtgacaaagaatcagaagggacattactactatcaagacttataaaaatctcaggaacacagaaggaagtggcagcagccaagcatttgatactggagaaagtttcagaagatgaagaacttcggaagagaattgctcattctgcagaaaccagggtcccacgcaaaacagccaatcagtgtgagaaagagaagacatgacagagccaggtggagctggagagccagcattatgggaaaacaccagttctagcatggagccgactgcacccctggtgactcctccacccaaaggaggaggcgacatggctgtggtagtgtcaaaggacggttcctgggagaaacctagtgatgacagctttcagaagtctgaagcccaggccatcccagagatgcccatgttggaaatccccagtcctgacttcagttttcatgctgatgagtacctagaagtctacgtttctgcttctgagcaccctaaccacttctggatccagatcgttggctcccgcagcctgcaattggataagcttgtcaatgagatgacccagcactatgagaatagtgtgcctgaagacttgactgtgcatgtaggagacattgtagcagcacctttacctacaaatggttcctggtatcgagcccgggtcctcggcaccttggagaatgggaacttggacctctattttgttgactttggagataatggagattgcccactgaaggacctcagggctctcaggagtgacttcctaagccttccatttcaagcaatagaatgtagtctggcacggattgctccctcaggtgaccagtgggaagaggaagctttggatgagtttgatagactcactcattgtgctgactggaagcctctggtagccaagatctctagctatgtccagactgggatctcaacttggccaaagatctacttatatgatactagccaatgggaagaaacttgatattgggctagaattagtacacaaaggatacgcaattgagcttcctgaagacatagaagaaaacagagctgtcccaaaacatgttgaaaggacatggcccacagaaacagatgccctctctcagcacgttgcctcactggagaccacaaaagagctctggagagataacacataccctgtcctgcctcagcttatcagaagctgcttccatgtctggtgatgataaccttgaagatgactacttactcagaagtctgggcttcagtttgctcagccatctgctttgctgtgtgagtgcagctatcatctatctgtagcaacaggaaagtaatgagggcgacagtggggcactcgctgtgattccctctttcccatgccctgtcttaatatacttctctgcagctgctttcctgcagcttnactngctctcagattgagcactctcaagcttttgtgtgtatctctgtctctggcaggattttgcataggaattggtgcatggaggagaggagtgtatgataaaggatccatgcagtccttcctttatnacacatatagncnggctggctgtgaccaaattaatattcccctcccaccagacgacaaaaaatgggacgnccacgcgacaagtgtgncgcccccatgccaccgccggatnnnnnnnnnnnnnnnnagtgtttgaacacggctgtgtcacttccaggccgttcaacgtcaggctcagtcccctctaccagtcatgattcacatnactactnggcggtatcctttttgaggcggggagacagtcaggctntcgtcatgggaagngattcggcngacgtcngacgcaccttntcnggtgactcgggttaaggaangcttttgagnggnggactcaaanacgccagttgaatcaggaggcaaaggcaaaaattngcataatgatatttaaaagccgcnngangggggaagngaanactgcctcccagcctcaatggcggatatgtnatgggagacaggcttttgaaacggctccngctatttctcngtaacctttagttaaaatataagtngaanggagacnggaggctcaggaaattttctaaatagctagnataatatctatatgnanacacacatanacacccgtggagagagaggaag

SEQ ID NO: 355866 - DNA, 779 bp, Homo Sapiens
  misc_feature (458)..(551): n is a, c, g, or t
caaaggatacgcaattgagcttcctgaagacatagaagaaaacagagctgtcccagacatgttgaaggacatggccacagaaacagatgcctctctcagcacgttgctcactgagaccaaaaagagctctggagagataacacataccctgtcctgcctcagcttatcagaagctgcttccatgtctggtgatgataaccttgaagatgactacttactctgaagtctgggcttcagttgctcagccatctgctttgctgtatgttgcctgcaatgaactcgctgaagcgtgctcagccctggaactggtgctaccagagttccgtagggaacctttactctttagaggttccctgatataaatcattcataagacttcctaccctggaaaatgagtaatgtctcattcttacctgcagtttgttactatgtataaaagtctttttctttaatatgcnnnnnnnnnnnnnnnnnnnnnnnnnnnnnnnnnnnnnnnnnnnnnnnnnnnnnnnnnnnnnnnnnnnnnnnnnnnnnnnnnnnnnnnnnnnnnngataacacagaacacaagaaacaaggaggcgatgggggagccgatccgaaagggcccagaggcggatcccttgacgggcaagggcaaggagacgcccctcgatgcattgggaatgtatacagaggagaaagaggcggggagaacctagaaacgaggagaggcgatagagtaaggacataaccgatagaagaggagcacagcccagagggcagcgagcacatagagagt

SEQ ID NO: 355867 - DNA, 770 bp, Homo Sapiens
cccacgcgtccggtgggaggcggcggcgctggtggctgcagctggggtgaggcgcgaggcggcgcactcgacggctgactggagcagcggatataagtcaaagagtacagcagaaaatgtctactgaacggacttcttggacaagcctgtccaccattcagaaaatagccctgggccttgggatcccagccagtgcaacagttgcctatatcctataccgcaggtatagggaaagcagagaagagcggctgacatttgttggggaagatgacattgagatagagatgcgggttccccaggaggctgtgaaactcatcattggccggcaaggagccaatattaaacagctgcggaaacagacaggtgctcggattgatgtggacacagaggatgtaggcgatgagcgagtgctgcttatcagtggttttcctgttcaggtgtgcaaggccaaagcagcaaatccatcagatcctgacagagaataccccagtgtctgagcagctttcagttccccagagatctgtgggcagaatcactagggagaggcggcgagacgaattcgttctatctgtaaggcatctgggagcccaaaaattacctgtgacaaagaatcacaagggacattactactatcaagactcactaaaaaatctcaggaaccacagaacggaagtggcaagcagccaagcaatttgatactggagaaagtttcagaagatgcacgaacttcggaaagagaattgctcattctgcagaaacacagggtccga

SEQ ID NO: 355868 - DNA, 996 bp, Homo Sapiens
  misc_feature (885)..(885): n is a, c, g, or t
gaatccagggcctgaaaacccagaatgaacttgtgtccatgcccagagatcactgcagatgtcatgaggtacccttagtgtcaccagctcaagcaggcctctggccacgtttatcatctgtggtggtcctgtcccgtgaccaggaggaaaaattagctctttgaagagaaagtagttctctattgcaggcactggcctcttaaattgttgcaggtggggaatggatgagaatatttgttttgggtgatcagaactgagactcctattgtggattagtaacatgcctcctcctagaacaagggagggcagggatcgccgagaccaccaccgggctcccagcgaggaagaggccttggagaaatgggactggaattgtccagagacgcgtcgcctcttggaagatgccttcttccgtgaagaggattacatccgtcagggttctgaggaatgtcagaagttttggaccttctttgaacgcgctgcgagagagtgtccagaatcgtcaagaccgtccaggaagggaggacgaaagaccctgtgacagcccaagcacagcatcccagcgctggccgacctacctcgcacttacgacccacgttaccgcatcaacctctctgttcttggccctgccacgcggggctctcagggactgggcaggcacttgcccgcggagagagtggctgagttccgccgagccctgttgcactacctggactttggccagaagcaggcatttgggcgtctggccaagctgcagcgtgagcgggcagccctccccatcgcccagtatgggaaccgaatcctgcagacgctgaaggaagcacaaggtggtggtagtggacggcgacaccggctgtggcaagcccaatcaggtgcccgagtacntgctggctgctggcttcagtcatgtggcgtgcacccagccccggcggatcgcctgcatctcactgggcaagcgtgtgggctttgagagcctcagtcagtatggctcacagg

SEQ ID NO: 355869 - DNA, 1081 bp, Homo Sapiens
ggagggtttctaaaaaggccccaccacgtctttgccccatgaagattccaggggattcccgccgggggttggggtgcacctccaccatgattgaaagcccagcagcccagcagggtactgggggcaccggagtgaacttgccaacaaccgggggtcaccggccaactaccaccacctggtgctccttcagcgtctgcaggatgcggttccccatactgggcgatgggagggctgcccgctcacgctgcagcttggccagacgcccaaaatgcctgcttctggccaaagtccaggtagtgcaacagggctcggcggaactcagccactctctccggcgggcaagtgcctgcccagtccctgagagccccgcgtggcagggccaagaacagagaggttgatgcggtaacgtgggtcgtaagtgcgaggtaggtcggccagcgctgggatgctgtgcttgggctgtccagggtctttctcctccttcctggaggtcttgagattctggaatctctgcaggcgttcaaagaaggtccaaaacttctgacattcctcagaaccctgacggatgtaatcctcttcacggaagaaggcatcttccaagaggcgacgcgtctctggacaattccagtcccatttctccaaggcctcttcctcgctgggagcccggtggtggtctcggcgatccctgccctcccttgttctaggaggaggcatgttactaatccacaataggagtctcagttctgatcacccaaaacaaatattctcatccattccccacctgcaacaatttaagaggccagtgcctgcaatagagaactactttctcttcaaagagctaatttttcctcctggtcacgggacaggaccaccacagatgataaagtggccagaggcctgcttgagctggtgacacaaagggtacctcatgacatctgcagtgatctctgggatggacacaagttcattctgggttttcaggccctggattcacacgccgcgaacgccttaacttccggtcccaagagcgctagtcttgcgcctgcgcacacagcatcccgggaattccggaccggtccag

SEQ ID NO: 355870 - DNA, 1295 bp, Homo Sapiens
  misc_feature (639)..(639): n is a, c, g, or t
  misc_feature (1218)..(1218): n is a, c, g, or t
  misc_feature (1227)..(1227): n is a, c, g, or t
  misc_feature (1250)..(1250): n is a, c, g, or t
catgatccacaattacccacacccccctgagcataagcccagccgggacataaatagtaccccggcacatcctcttcataatgaaaaacctccagtgtgcaccccaaggcctggattaagggcctggaaagagtaaagcctggagtggttaagaagataaaaacagctctttccttccctggaagtataataaaattttcaacagactctttcaaccaaaacttgtttcaaagcaaactgaattctgtatatggcacagcaataatattcccttttaggttttatccacgtgcctgctgactccatgatagaaactgtataaaatatataaaaatattcccaaggcaacttcatataagttttcagtctcttagagctcttcaagtcaagtcattgctgctactctgtgccactgcgttctctcttcacaggtgttgccggcacctccccattgacggtttcagccccactaacagacatcaggcttctccgttccttctggtttgacttgtgctccacttttgtaactctaaatctgccaacagaaaggaccgtgacctcgccttggcgccgtggtctgctctctctggacttgttagtgggctttataaagtgccaccgcttgtgcctacaccgatnacacacatccctctcgacaacaccgcccaccgtatgcagatgatggccacagacgtgcttccctggcgtcccccctggtgacaaaggcccagaactcactggcgggctccctggtgtgctgggggtcacggggctttcaggatcatacaggctgttatctgctaccatcgcctttaagacatcagcattcgcttcatttttcatgatgtagtggacgatttgcccaacagtgtcactgttttcattcacactgtcattcaattctatcttttcaaccttttcctcttcgatatcttgctctgcttctgttgtacaacgatagcctttcttcttaagcaggtggcaaatgaggacgccaaagagacccatgataaagaacacagggacaagcgcgtatgcaatatattctgggtgtccattcccagtatcgttgctgggcgacggggtcgtctctgttctggagtgcaatgtgcggctgctcccattgtccggagccaccagcggcgaactcacggcgcctcccacgaagacagcagcggctaggacggcggaccccgggagtgcccgcggagccatcgnccgcggtcnttcgccctcctcccccagggcgncccgtcccgcgctcgggaaggcagagccgctccggagccggcggg

SEQ ID NO: 355871 - DNA, 975 bp, Homo Sapiens
  misc_feature (698)..(698): n is a, c, g, or t
  misc_feature (700)..(932): n is a, c, g, or t
  misc_feature (941)..(941): n is a, c, g, or t
  misc_feature (944)..(944): n is a, c, g, or t
gcccgtcgccctgagtacgttagcggaaatggctccgagaggctttgacgcatgtgtacctttttagtggcggtatctcggccggggattttcgggctccagtggaggtggctatgctcaccccatctcccttgagaggcacagaaggttagagatgtgtgcgaggaacggccaggtccagcgtctcctcgttgctgccccttgagcccgggaccggcgccaatgcgcgcccgggttcttgggttctttcgtcccgcagacctgccttggtgtggcgtccctgggccgtagcttccgaaggctgcagccgacctggtcggggtcctctagcccgccttacccttcccccattgacagatggagaaactgaggcccaggccaaaaaatatctcactagagggctcaccgccatttcctggaaaaattggggctgggactcaacggacgctcgtccagcagcagcgcggagctccgaagtaaaggcgcccgtgaccgagtgctttgtccttacaagcgtggtgttcttgaatgcttccaggcgccttatgaggcccccgatgtacaatctgtgcttaactaaaccccactgtcttccagggtcaggttggccatccgcaggcgtagttgctaggaaggtttgacagatgtccgcctgttgattcagacgttcccaggatttggagcaagaagagcaaggnannnnnnnnnnnnnnnnnnnnnnnnnnnnnnnnnnnnnnnnnnnnnnnnnnnnnnnnnnnnnnnnnnnnnnnnnnnnnnnnnnnnnnnnnnnnnnnnnnnnnnnnnnnnnnnnnnnnnnnnnnnnnnnnnnnnnnnnnnnnnnnnnnnnnnnnnnnnnnnnnnnnnnnnnnnnnnnnnnnnnnnnnnnnnnnnnnnnnnnnnnnnnnnnnnnnnnnnnnnnnnnnnnnnnnnnnattccgcantcncttcagtcttggcgaaaaacaaaattttttt

SEQ ID NO: 355872 - DNA, 1002 bp, Homo Sapiens
  misc_feature (11)..(11): n is a, c, g, or t
  misc_feature (14)..(14): n is a, c, g, or t
  misc_feature (18)..(18): n is a, c, g, or t
  misc_feature (21)..(21): n is a, c, g, or t
  misc_feature (27)..(27): n is a, c, g, or t
  misc_feature (37)..(37): n is a, c, g, or t
  misc_feature (45)..(46): n is a, c, g, or t
tttcccaaagntantagnaangaggcngtatctactnttgtgganngaaccaagtctacttggagaaaagaaccaagtccttggatatctaggggaaagctgtttggcagaaagaaaaatcaagaggacccaaggggatggagacaggaccacaggaatgggccaaggagcaacgtgcctgccattcagccagcttgggacaggctttcactttcactcccatgaggaggcttccaggcagcctggttcccccatgtacagccattgccctctagcaggccaggcctcccagtgggaaggcctgggtccagggcatcttaagttcatccagcagctccatgagccacacagatatcctagaaaatattcctttctcacacagggcttctgattactcagaaacatgcccctcttccctgaataaccaagaacatgttctatgaacccaatctctgccacatgtcaatacctgctcttcaaagccccttttgaaactcagttttgtgccaagtcctctggatctaattaccttaaacaagcagatttagccatttttaaacagacattcccagtcatcctggtgcttgtacttctcctacatgtcatgaaggaccttggatttactgagaactcagccgtggccttggctttgatacttataggtgtcagcccttgggccgattgttgatcatccagagcctcagttctgtacttgtaaagtggagacagcagttctcatcctccatccttttagcccatggggtggttgtaaggctggattgaaatatgcatgtgactaagccatgtagctataaagtgagggatgacttgtgttttggatcacttattttaattctacttataatccacggcttagaatatttaaacattgtttctattaaactagaaaggttcagcatttctgtcatttacttctgctatgatacacaagaacttatgttggaatgaagtgaaaagtaaaatggccattcttatgaacct

SEQ ID NO: 355873 - DNA, 1675 bp, Homo Sapiens
  misc_feature (1622)..(1630): n is a, c, g, or t
tcgacttcggagaggcagcgcggttcctctgggtgcttccgcctccccttctcctgcttctccagcctcttcggcctcctcgcccgccgcgggaacccgagaccccagtgtatgccccacccctgaccccgctcgcgacatgtccaccccggctcggcggcgcctcatgcgggacttcaagaggttgcaggaggatcctccagccggagtcagcggggctccgtccgagaacaacataatggtgtggaacgcggtcattttcgggcctgaagggaccccgtttgaggatgtctatgcagatggtagtatatgtctggacatacttcagaaccgttggagtccaacctatgatgtgtcttccattctaacatccatacagtctctgttggatgaacccaatcccaatagtccagcaaacagccaggctgctcagctgtaccaggagaacaaacgggaatatgaaaagcgtgtttctgcaatagtagaacaaagctggcgtgattgttgaccccgggtacagtttaaagaagctggccataagaaaaatatatattgatgtgtttgtcacctccctactcctgtcattacatttactttattaaaagcaaaataactgttgtgctgtttccatcttccttgccaagttttcctaccccttctaccctctccttaaacatcagaaaacaccctctatgaaatcaaatgtactgtacctgggttacttgcaaaaattactaatgcttcagtttttctgttgtatttcatttccagttttcaggcagttatttttattattgtactttaagcttttaagatgaattgttatacaagaggtgcttatgcttagcttgatgaccaggatgttatttttaacaaaatgattgctgaagtgtttcatcctggctggtccttcacttgtgttggatttagaagtgaatgtgtttggaatatggcctacagagaatagaaacaaatccatgtaaacaattttgaaggaggcatgggagctaaaaatcctgtgatactaagatctcagtcatatgaattacaacgtagtatttactggcaagaaggagaaagttgaaggactcagctaaaggagtacagcaattgtagtaactgacacatcctctctttgcaagctgctgactgggcacactcatgccaagtttcagaattattggtcttctgggtttttgctttttaaaagaggtgtgggagcagaggaatggaaacaatcgtgagtttttgagctagggaaagttggagctcctttaatctttttaaaggatcagtgctgccctaagtgaataaactcaattgtccatctttattttagagttttaatgaattcaaggaagggagcatagcatatctgtggcaaactattttccactcaaatcctgagttattgctgcatgctttaatttcttccctttcagcatctgagaaccttaaagccaatgtctgcgatctttttttggatatttatacttttagatatatagtacctttaagtagcagtatgggacaaggcttgtaaatgttttgtctaatgttctattgtcaccttttatgcatttatcacttccaaatctaactttgcacaagtaacccatgtnnnnnnnnntgtacatttttcaaaagttgtaaataaaaataaccttaaaatttc

SEQ ID NO: 355874 - DNA, 945 bp, Homo Sapiens
  misc_feature (686)..(686): n is a, c, g, or t
ggctggtaccggtccggaattccgggatatcgtcgaccacgcgtcgtgcttagccggcgccagaccgaccctcgacttcggagaggcagcgcggttcctctgggtgcttccgcctccccttctcctgcttctccagcctcttcggcctcctcgcccgccgcgggaacccgagaccccagtgtatgccccacccctgaccccgctcgcgacatgtccaccccggctcggcggcgcctcatgcgggacttcaagaggttgcaggaggatcctccagccggagtcagcggggctccgtccgagaacaacataatggtgtggaacgcggtcattttcgggcctgaagggaccccgtttgaggatggaacatttaaacttacaatagaattcactgaagaatatccaaataaaccacctacagttagatttgtctctaagatgttccatccaaatgtctatgcagatggtagtatatgtctggacatacttcagaaccgttggagtccaacctatgatgtgtcttccattctaacatccatacagtctctgttggatgaacccaatcccaatagtccagcaaacagccaggctgctcagctgtaccaggagaacaaacgggaatatgaaaagcgtgtttctgcaatagtagaacaaagctggcgtgattgttgaccccgggtacagtttanagaagctggccataagaaaaatatatattgatgtgtttgtcacctccctactcctgtcattacatttactttattaaaagcaaaataactgttgtgctgtttccatcttccttgccaagttttcctaccccttctacccctctctttaaacatcagaaaaacacccctcctatgaaattcaaatggtaactggtaccctggggttaactttgccaaaaaatttaactaatgggctttccaggttttttccgggttgggc

SEQ ID NO: 355875 - DNA, 1056 bp, Homo Sapiens
ggtccggaattctcgggatctcgacttcggagaggcagcgcggttcctctgggtgcttccgcctccccttctcctgcttctccagcctcttcggcctcctcgcccgccgcgggaacccgagaccccagtgtatgccccacccctgaccccgctcgcgacatgtccaccccggctcggcggcgcctcatgcgggacttcaagaggttgcaggaggatcctccagccggagtcagcggggctccgtccgagaacaacataatggtgtggaacgcggtcattttcgggcctgaagggaccccgtttgaggatggaacatttaaacttacaatagaattcactgaagaatatccaaataaaccacctacagttagatttgtctctaagatgttccatccaaatgtctatgcagatggtagtatatgtctggacatacttcagaaccgttggagtccaacctatgatgtgtcttccattctaacatccatacagtctctgttggatgaacccaatcccaatagtccagcaaacagccaggctgctcagctgtaccaggagaacaaacgggaatatgaaaagcgtgtttctgcaatagtagaacaaagctggcgtgattgttgaccccgggtacagtttaaagaagctggccataagaaaaatatatattgatgtgtttgtcacctccctactcctgtcattacatttactttattaaaagcaaaataactgttgtgctgtttccatcttccttgccaagtttttcctacccccttctaccctctccttaaacatcagaaaacaccctctatgaaatcaaatggactggtacccggggttactttgcaaaattactaatgcttccactttttcggtggaatttcatttgccggttttccgggagggatgtttaataatgggactttacgctttttagaatgaattggttaaaccgagaggggcctaaggcttagcttgcagcacccgcgaatgcatttttttaccaaaagtgattgccgaaagggtttctatcctgggtggggcccttaccattggggcccg

SEQ ID NO: 355876 - DNA, 863 bp, Homo Sapiens
ggggaatgtggcggcggtagttccaggcgacggcggacggtggtacggtcctggagggcccagtgcgcggggctagccgtggctggagagcttcgaagagccttgaaatgtgaggaggaggaagatagctgttgcagaagtagtggccaaggtatcgttctggacgcgcctgcggcaggagggtcgccgcgtccacttccgccagccccacctccccccggccttcctggagtccctgaaagaggaagaagtaggttttaaggcaaaagatggccaaggaaagatgcctgaaaaagtcctttcaagatagtcttgaagacataaagaagcgaatgaacagagaaaaggaataaaaacttgggcagagatgggcaaacgcaggtcttttatagctgcaccatgcaaaataatcaccaacacttctacactgctgaaaaaattaccaagacaaccaacaaaaactgtgagttttagcttggcaaatgaaaaatccaaagtgaaagaagccaagaatatcatcctacagctgagaaaagaatgttactatctcacatgtcagctatatgcttgaaggaaaactttactcacaacaaacagtagaactggtcagagcaggaaataggttccttctggaatggacccaatagtgtgacgtccagaaatcatggggaggattaaccgaattctcttgaaaaatgattcccgacacgggatcttccaatgaaatcgatctactttctcagacctggggtggtttgatcacgggggcagtcacggaggttccgaacggttcggcgctctacacatgcgcccttcgcgcgtgggtttgacacctcggggcgcctttccaagttgccccactc

SEQ ID NO: 355877 - DNA, 530 bp, Homo Sapiens
  misc_feature (493)..(493): n is a, c, g, or t
cgaccctcgacttcggagaggcagcgggttcctctgggtgcttccgcctccccttctcctgcttctccagcctcttcggcctcctcgcccgccgcgggaacccgagaccccagtgtatgccccacccctgaccccgctcgcgacatgtccaccccggctcggcggcgctcatgcgggacttcaagaggttgcaggaggatcctccagccggagtcagcggggctccgtccgagaacaacataatggtgtggaacgcggtcattttcgggcctgaagggaccccgtttgaggatggaacatttaaacttacaatagaattcactgaagaatatccaaataaaccacctacagttagatttgtctctaaggatgttccatccaaatgtctatggcagatgggtagtattatgtctgggacatactttcaggaaccgttgggagttccaacctatggatgtgtctttccattttaacatccttacagtctctgttnggatggaacccattcccattagttccagcaaacagcc

SEQ ID NO: 355878 - DNA, 793 bp, Homo Sapiens
  misc_feature (100)..(135): n is a, c, g, or t
  misc_feature (233)..(233): n is a, c, g, or t
attcccgggatgtcagccgtcacaaggcacttccagccagtcgcaacggcgggtcgccagcgcctcagtagctcgcgcggtgcctgtcggtagtcgcgtnnnnnnnnnnnnnnnnnnnnnnnnnnnnnnnnnnnncatgggagatatcccagccgtgggcctcagctcctggaaggcttctccagggaaagtgaccgaggcagtgaaagaggccattgacgcagggtaccggncacttcgactgtgcttacttttaccacaatgagagggaggttggagcagggatccgttgcaagatcaaggaaggcgctgtaagacgggaggatctgttcattgccactaagctgtggtgcacctgccataagaagtccttggtggaaacagcatgcagaaagagtctcaaggccttgaagctgaactatttggacctctacctcatacactggcccatgggtttcaagcctcctcatccagaatggatcatgagctgcagtgaactttccttctgcctctcacatcctcgagtgcaggacttgcctctggacgagagcaacatggttattcccagtgacacggacttcctggacacgtgggaggccatggaggacctggtgatcaccgggctggtgaagaacatcggggtgtcaaacttcaaccatgaacagcttgagaggcttttgaataagcctgggttgaggttcaagccactaaccaaccagattttgatccgatttcaaatccagaggaatgtgatagtgatccccggatctatcaccccaagtcacattaaaga

SEQ ID NO: 355879 - DNA, 1700 bp, Homo Sapiens
  misc_feature (100)..(135): n is a, c, g, or t
  misc_feature (1560)..(1560): n is a, c, g, or t
  misc_feature (1564)..(1564): n is a, c, g, or t
  misc_feature (1585)..(1585): n is a, c, g, or t
attcccgggatgtcagccgtcacaaggcacttccagccagtcgcaacggcgggtcgccagcgcctcagtagctcgcgcggtgcctgtcggtagtcgcgtnnnnnnnnnnnnnnnnnnnnnnnnnnnnnnnnnnnncatgggagatatcccagccgtgggcctcagctcctggaaggcttctccagggaaagtgaccgaggcagtgaaagaggccattgacgcagggtaccggcacttcgactgtgcttacttttaccacaatgagagggaggttggagcagggatccgttgcaagatcaaggaaggcgctgtaagacgggaggatctgttcattgccactaagctgtggtgcacctgccataagaagtccttggtggaaacagcatgcagaaagagtctcaaggccttgaagctgaactatttggacctctacctcatacactggcccatgggtttcaagcctcctcatccagaatggatcatgagctgcagtgaactttccttctgcctctcacatcctcgagtgcaggacttgcctctggacgagagcgacatggttattcccagtgacacggacttcctggacacgtgggaggccatggaggacctggtgatcaccgggctggtgaagaacatcggggtgtcaaacttcaaccatgaacagcttgagaggcttttgaataagcctgggttgaggttcaagccactaaccaaccagattttgatccgatttcaaatccagaggaatgtgatagtgatccccggatctatcacccccaagtcacattaaagagaatatccaggctctctttttgcctgctgccatccatgtaagacgcgacttgtttctccttgccttctgtcatgattgtgaggcttcccccagacacttggaactgcacaaaaacgtgttttgaacctactctaaccaactgtcaaaaggctgtgttaagtgattctctgacaaggcccaggagcttcaaattgtcttgggacctcaagaggagaggaatttagccaaatcatgcagagccttggccattctggtgtttggccgggagttgagctgggtggctctggccggcgtggaggatgagggcggcctgaacttacactgtgaaaattataggttcgggctgctgtcatcttccgccctggtcggggccgctcagccccgctcctggttgaatatgagaatcgcagagactctgcaagtaaatggaagccaacatgaatacttggtggcaccttcactgtgagattgttggggctggaagtgggaatatcaaccatctaaaccttctctcatgtaagaggttactgtgataccaaaaattagataatgaggaaggatggcttaggaggcataaagtcacaacagagactggattgtgcttgtgtggtccaaggctcttggcccccgaaagaatcactgaaaatcaatgacggatgttgctttggagagattgcacccaaaatgacagagaccaatgtgctcagtcttggtagaactatgacatgagagatcaccagataacagctgtcagacagaaccagctncttntcaatggtataattgtccatntcatccatcgtgaagacttaagcataagttaagcataagtcttacatacattatgtccaccttttattactgttgttaactacaaaacagagctaaagagaacagaacagaaagc

SEQ ID NO: 355880 - DNA, 1156 bp, Homo Sapiens
  misc_feature (8)..(8): n is a, c, g, or t
  misc_feature (14)..(14): n is a, c, g, or t
  misc_feature (17)..(17): n is a, c, g, or t
  misc_feature (20)..(20): n is a, c, g, or t
  misc_feature (30)..(30): n is a, c, g, or t
  misc_feature (44)..(44): n is a, c, g, or t
  misc_feature (56)..(56): n is a, c, g, or t
  misc_feature (63)..(63): n is a, c, g, or t
  misc_feature (78)..(78): n is a, c, g, or t
  misc_feature (86)..(86): n is a, c, g, or t
  misc_feature (98)..(98): n is a, c, g, or t
  misc_feature (105)..(105): n is a, c, g, or t
  misc_feature (110)..(110): n is a, c, g, or t
  misc_feature (112)..(112): n is a, c, g, or t
  misc_feature (114)..(114): n is a, c, g, or t
  misc_feature (171)..(171): n is a, c, g, or t
  misc_feature (184)..(184): n is a, c, g, or t
tactagtnttacanacncanttgaatcagnttacagtctccttnatctttaaacanatatcanaaagtctgtaccccnattctatncacctatggatntcatgtntacantntnagttccagaataaagtgagggaaatcaggtctttattgataaagttagggagaagantgatgcaaatagnacaatttccaatttaatttagatcctctaatctttctacatggacaagctgttttcttttctaggttactgataacccctacaattttcgacttaacttcaaaacacagtattgtgttatctatcacataacaggaccatgtttttaacctaccatcaagagcctgtattttgagttattccaacagagatgatggattcctgtagaactagaggtgggtgacctatggttatgtggcacggcaaagcaagtacctcttaagggactctaatatatgctaacgctggtcctcttagctctgtgctctcaccagacaatgaatgaactatgaaagatttagtcaacagaaactattttagggtatgtttagttggtaaatgcttcatgttcatggatgacacaatgtttttgcaaaaaaaccctgaaactattctttggcattggtgtccatggccctataccgccatcttacacgaaagccacagagttgaaagccacagagttgaaagccacagagttaagtgacctcaggtaacataatggtgatggttggccatttgagtctttgtaacctaggaaagacaaaggtctgattcagattgcatgggggatttttaacatatttgaaactcagggggaacatgattaagaacacaaactggtagctacacatgaaggtttacttgagcttttgtgattcaaagttcaggggtggtaaggactctggtaccagggaagagggagaattaatttattgtgcaaatgctggtatttcttacatgattttttgttttcctctgttgctagataaatagaaactaataatagctctatttctctgccaatataaaatctacctttcatataatgctacattgaaggcacagaatttgctaccatctctctctccccctacctaccaaactatccacaatttaaataaagaactgctgtgtctgacttactctcaat

SEQ ID NO: 355881 - DNA, 1586 bp, Homo Sapiens
  misc_feature (1545)..(1545): n is a, c, g, or t
  misc_feature (1568)..(1568): n is a, c, g, or t
gttgactctctttttcactgtagaataatgtggaaataaccctagataaaaattcagtctgataacctcaaatcaaaaagctttaaataaattcttgggcatttatcttttaaaacttcactaatatagcattgtgtgataagcactaagcagtcagtcccctgggggaatctggcataattcggctataaatgtagcaatgcttggaaaggtagtcatcaaatgagactatttgaggggactatttgaaatgattctggtatttcttttggtatctttcttcctgtacattggagtgatggaaagtctggtattaaaacctctcttacttttaaacttgattttgcagactctggcaataagccttccaaaattctgtgccttttctattatcaccaaacaatatgttaagtggctttccttggcatctacagagaaaacattctatagccctccttcctaggtgttaccattcactgaatcttctctcagagggagatgagcaattgtcagtcaggataattctgtttgctaaatgttgcctttatgctttcaaactgaattaaacccattgtgaggttgacactgggaggggctagaagattggtgggcagcagactaaagagttatgttggatagttttatttctgtggctgaaaataaaatcttgtctagcacagttaaagtcattaaaaataaaaatgacagctttagcacaattttaagaaaatgcccctctctattaccacattttctcttattaacagtatctcagaataattttctttccttagaaacctgagagaatgctagtcataactgtactagttactatgaaaatggaaataattatcttagaatattttcaaagtagagcgtgagcatgtatttttagtgggagagctctgatagttgttgggaatatataatttactggacctcagcccaaatcaagatgcttaaaattgtacttgtggagcttcactcaaaccaatgtgtcaaataacgtattgaatatttatgaaaagagagactatatttatattcttagatagtttgttccacaatttttcatttcatgcttccatatatattaccctgaactttctatcaccacagataaagattttgttttgccctgcaaataaaaagacaattccttattgtctgaatgtaatacagtcttcattgtactattcaaccctttgtttctttctttttcattttgtgaaaaactccatgttagtcctcttagatgactgcttatttatgtgtaacataaatcccacatattctaatgacaacttctttaatccttccgggtcatatattatatttccatagtatcacatactattatttagttgtttacaagactccaatttgaattcaggattacagtgctcctttcattctttcaaacagataacataaaagttctgttaccctcattctatacaacctaggggatttcatgtggttacaatatcagtttccaggaataaagtgaggggaaatcaggtctttattgataaagttaggggnggaggttgatggcatagggacanttcccattttaatttagg

SEQ ID NO: 355882 - DNA, 1337 bp, Homo Sapiens
  misc_feature (46)..(46): n is a, c, g, or t
  misc_feature (95)..(95): n is a, c, g, or t
  misc_feature (928)..(928): n is a, c, g, or t
  misc_feature (981)..(981): n is a, c, g, or t
  misc_feature (1014)..(1014): n is a, c, g, or t
  misc_feature (1025)..(1025): n is a, c, g, or t
  misc_feature (1031)..(1031): n is a, c, g, or t
  misc_feature (1046)..(1046): n is a, c, g, or t
  misc_feature (1048)..(1048): n is a, c, g, or t
  misc_feature (1050)..(1050): n is a, c, g, or t
  misc_feature (1097)..(1097): n is a, c, g, or t
  misc_feature (1109)..(1111): n is a, c, g, or t
  misc_feature (1113)..(1121): n is a, c, g, or t
  misc_feature (1125)..(1126): n is a, c, g, or t
  misc_feature (1128)..(1129): n is a, c, g, or t
  misc_feature (1131)..(1132): n is a, c, g, or t
  misc_feature (1181)..(1181): n is a, c, g, or t
  misc_feature (1275)..(1275): n is a, c, g, or t
  misc_feature (1277)..(1277): n is a, c, g, or t
  misc_feature (1279)..(1279): n is a, c, g, or t
  misc_feature (1291)..(1291): n is a, c, g, or t
  misc_feature (1294)..(1294): n is a, c, g, or t
  misc_feature (1298)..(1299): n is a, c, g, or t
  misc_feature (1301)..(1301): n is a, c, g, or t
  misc_feature (1321)..(1326): n is a, c, g, or t
gtaaggataaacccatttaatctggaagccaaagaggacccagaanccatagaagactataaaaggaacatgcttcaggagattctgtggtttcncctcttcctgtaaccactgtgaaatcggttaaccttagacaaagtgagaacaacttctgctaatgagaaggaggtggaggcagaatttctcagattatctttgggatttaagtgtgactggtttaccttggagaagagagtgaagcttgaagagaggtcccgtgacttggcagaagaaaatttgaagaaagaaatcactaactgtttaaaactattagagtctttaacacctctgtgtgaagatgacaaccaggcacaggaaatcattaagaagctggagaagagtataaagtttcttagccagtgtgcagcacgagtggccagtagggctgagatgttgggagccatcaatcaggaaagccgggttagtaaagcagttgaagtgatgattcagcacgtagaaaacttgaagaggatgtatgccaaagagcacgctgaattagaagaactgaaacaggttcttctgcagaatgaaaggtctttcaatcctcttgaagatgatgatgactgccaaattaaaaaacgttcagcttctctaaactccaagccatcttctctacgaagagtgactattgcctctttacccagaaatattggaaatgcaggaatggtggctgggatggaaaataatgatcgattcagtagaaggtcaagcagttgaactaaagatgactcagagccatctggagaagaaacagtagaaaggacaaggaagccaagtctttctgaaaagaaaaataatccatcaaagtgggatgtctcttcagtttatgacacaatagcttcctgggcaacaaatctcaagtcctccatcagaaaggctaataaggccntctggctctctattgcattcattgtactgtttgcagctttgatgagcttcctnacaggccaattattccagaagtctgtggatgcngctcccacacngcaagnggagtcatggacgtntntngaacatgtcttgtggccatttaccagactccgacacaatgggccgcnaccagtgtgacnnngnnnnnnnnnggtnngnngnngttgatttttaagtttcagtatctgaacttcgtaaattagtaacttttnggctgggaaagtatagcatgaaaccagaggttctcacgaactgagctgtaacgatcgcttgcactttcctctttttgcctttacctcccgctantngnatgcggtggggnagngggnngngtgtgatctttgaatggggnnnnnngggaagaaata

SEQ ID NO: 355883 - DNA, 1134 bp, Homo Sapiens
gctaccgaagcactggagagtgtcatggaggcctacgagcaggtccaaaagggacccctgaagctgaaaggcgtcgcagagctgggagtgaccaagcggaagaagaaaaagaaggacaaagacaaagcgaaactcctggaagcaatgggaacgagcaaaaagaacgaggaggagaagcggcgcggcctggacaagcggaccccggcccaggcggccttcgagaaaatgcaggagaagcggcaaatggaaaggatcctaaagaaggcatccaaaacccacaagcagagagtggaggacttcaacagacacctggacacactcacggagcattacgacattcccaaagtcagctggacgaagtagccgcctgcccccagtatggagcagcatcgagggttcgcaaaaggccacactggggttgtgtgtgtttcctttggtatattctggaaacatggctacacacacccttgcatcttctgctacagactgcttttcgaagctgtgtaccctcattctggaacttgattaaagtaagatcgtccttgtactcagtttaggcttcttggcaacatacagaagatacacccttttcgtttggatggaaagtttctaagtttatccagaggtaaagcccattgtgtgtctgtgtcatgtaaaaatgttttcacccgagttgcatgtaacgctctgaggccagccagctgtcttctcctggatgagacagactccagagggtaaggagctagcgccatggtggcctgcagtatgcagagccccgcaggacccagcgtgggcgcccttccaagcttcctctagctttgggcctatgcttgtcccctgcaaggccctagggaagccacttgcaactatgcggccttcagacttcctcctcagccacctggccactgagacagcatagcctgggtaacggaacagccacctaaggcaagaatgggaacggacacaccttgctcctttctgagccgtttccaaaacccccttccaggtgctttaatggatgttgcatagagacgctgtaatgctcacagcatctttgaatggaacagacaacagctgcttcaacctcagtggggcctagcacctttgattactccaagtgacactcacagatcg

SEQ ID NO: 355884 - DNA, 2191 bp, Homo Sapiens
  misc_feature (1580)..(1664): n is a, c, g, or t
  misc_feature (2126)..(2126): n is a, c, g, or t
gctgggtggcgaattcggcacgaggaagcactgggagagtgtcatggaggcctacgagcaggtccaaaagggacccctgaagctgaaaggcgtcgcagagctgggagtgaccaagcggtgaggcccgagggcccgcgggattccgtcttcatcccccttagaccttttctcgggacccctggccctgatcctccgacccgccgcctcctcatgtctttttccaggaagaagaaaaagaaggacaaagacaaagcgaaactcctggaagcaatgggaacgagcaaaaagaacgaggaggagaagcggcgcggcctggacaagcggaccccggcccaggcggccttcgagaaaatgcaggagaagcggcaaatggaaaggatcctaaagaaggcatccaaaacccacaagcagagagtggaggacttcaacagacacctggacacactcacggagcattacgacattcccaaagtcagctggacgaagtagccgcctgcccccagtatggagcagcatcgagggttcgcaaaaggccacactggggcttgtgtgtgtttcctttggtatattctggaaacatggctacacacacccttgcatcttctgctacagactgcttttcgaagctgtgtaccctcattctggaacttgattaaagtaagatcgtccttgtactcagtttaggcttcttggcaacatacagaagatacacccttttcgtttggatggaaagtttctaagtttatccagaggtaaagcccattgtgtgtctgtgtcatgtaaaaatgttttcacccgagttgcatgtaacgctctgaggccagccagctgtcttctcctggatgagacagactccagagggtaaggagctagcgccatggtggcctgcagtatgcagagccccgcaggacccagcgtgggcgcccttccaagcttcctctagctttgggcctatgctgtcccctgcaggccctagggaagccacttgcaactatgcggccttcagacttcctcctcagccacctggccactgagacagcatagcctgggtaacggaacagccacctaaggcaagaatggaacggacacaccttgctcctttctgagcccgtttcccaaaaccccccttccaggtgcttctaatgggtgttgccatagcagacgctgctaatgcatcacagcattctttgaaatggaaccagacacagcctgcctctcaatcctcagctgggggctcctagcagcctcttgtatttactcagagttgacacatcacacagatcctgtttggcattcctaccttacggacgtctcaggggtgacaggaccagggcagagccccggtacaaacagacaaggctgcagtcaaatgggagggtccaggtgtccgtgttggagggctgggatcttgtagggcctgtgcgtcctggctgaggatcaaaccacatatgttattgggagaaacgatttctgttgacgtagatattgaaagaataatgaaggcagaagagaaaaacgaagtgtggaatttggggttgtcctgtgtaaattacacaataaagcaaaagtcagttattgtnnnnnnnnnnnnnnnnnnnnnnnnnnnnnnnnnnnnnnnnnnnnnnnnnnnnnnnnnnnnnnnnnnnnnnnnnnnnnnnnnnnnntgaagaaggcccgatatatctagaaaaaaatggagcgacatcaaaattcgcacaaacacctaggtactggggcggggctttcccttaatcccaccttgggaaaaagggcctagcgtcggcccgctttgttttactacccctaggtccggggtcctataactggcttgatagaattttcggggaccggtcttcttggttgtttctgaggcctgctttacaatggagacaaccggcctaacttggggactccccccagcccccaggatccctttattgtggtgtggaagaaatatttattttatccgcccacacctcctttcacgacaaaattcttttttcccccggcgaagaccatcctctttttcttagttcggggttggggggatggttaaaaataaaacgcccaccctagggttgtcgtattcaaataaccccctagtttccccccctgggttttgttcncgtggcccacttgatccccgccacaccccgcccacctggaacaagggttattcccgggttctttg

SEQ ID NO: 355885 - DNA, 1079 bp, Homo Sapiens
aaggtgtttgtgaccttcagtatttattgaacagaggaaataactgacaagggcaatacaattcaatgttcatgtagtaacattcatgtcacttgttgaatttggttctcatatgtatattgcatacacataaattcaaactataagtcgtcatttttgagccatcatcttacattcatgtaatgaaattatggaagagagtaaaaactagctcttaacttagtaaatataatatggtatttaaaatcaggtcactacagtaaggttctaagtattgccaattgaaaagctagaaatggtattactgttgcaaagtgttgtcaataattgactccaatagcattgtaaatacttgtatcccacaactattttaaacccaagcaataaaatggattttctaattcacttcaattctttatttctcttacctatctatgtcttggtacataagaaaagtgtttccatcactgcattggtagaattatttcagtgttattatttttgtgatttcgtatgtctacacaaaaatgaattagtttaatttatattgtgatacagttgtttgagaaatatttttaattctgtttcaactttatttctccaagtgtataatataaaaattacttctgttattgttctctaccaataggggaaaaaattaaaacattagatccattgagaaagagatgatgtaataaataattaagattagtaataatattatcagggggtgattatgaccagttgaataatctctttcccttgaattatttagctaacaaattaactctcccaaatatttaaaataatgtaaaatcatattttactgcccattattaactaaaatatttttgtttgactttgagcaccaactggtaatactaataaatacccatgtcatgcagatggctgggcgaataagagatgtctaaaaatatgcactggtcttggaaaacatggcacaagtaaggatatcatatatgatgtctgtttattttatgtctgatttcttttgaatgagtagttggggactccatttctaaggagactaggtaaataaaatgacctttgacatttca

SEQ ID NO: 355886 - DNA, 1563 bp, Homo Sapiens
  misc_feature (593)..(893): n is a, c, g, or t
  misc_feature (1393)..(1393): n is a, c, g, or t
  misc_feature (1409)..(1409): n is a, c, g, or t
ttggttctgtggctggaaaattcggatcaagcagctgtatctggtggcgttctcatgactgcctcatgctgcatcaaaacatcgtagagaaacagaaggggaccgagtttgtgcaaacaaaaagcgcaaaatagaagaggcagccttgttttataacaactcactctcttgggaactaaccattcccaggagaacccagtctcagtgtcaagagaaagatgttaatccatcttagcaacctaattacctcttaaaagtaccatctcccaacactattacattggcaattgaactacaacatgagttttggaggggccaaacaacatgcaaaccatagcagcaggtttaaaggtaaaaggatgggagaaaagtacacagaaagatattctggagaaaaggcacagagtgagccaaggcacaaggtaaaatgtttgactggttagagacgctagattattttgtgtggctaagacaaaacaaagctggtggggagtggcaggaggtaagtctagaatggcacaatggggccagactgcgaatggcaaactgaagtatgtgatcttttattctaaagaaaatgtagtatgattagnnnnnnnnnnnnnnnnnnnnnnnnnnnnnnnnnnnnnnnnnnnnnnnnnnnnnnnnnnnnnnnnnnnnnnnnnnnnnnnnnnnnnnnnnnnnnnnnnnnnnnnnnnnnnnnnnnnnnnnnnnnnnnnnnnnnnnnnnnnnnnnnnnnnnnnnnnnnnnnnnnnnnnnnnnnnnnnnnnnnnnnnnnnnnnnnnnnnnnnnnnnnnnnnnnnnnnnnnnnnnnnnnnnnnnnnnnnnnnnnnnnnnnnnnnnnnnnnnnnnnnnnnnnnnnnnnnnnnnnnnnnnnnnnnnnnnnnnnnnnnttattatccatggtattatcatggtagtactgactaaaagagggacatgtgtaaaaaaatcagtaaggagggtactccaagaatccatgttaaagttaatgagggcttgaacccaaacataaaggatggaaatgatgtaataaaataccttttgaaagttatattaaaaaatttttggttaatagtctagttagaggtgaaagaagaaagcagaggagtctaatgcaatgcgtgacttgtagctcaggtaaaggggtggcaggtgacgcttaaatactagaaatataagaagcagcacaggtttggttttatctttgagaacaatggagtggaggtatgctttagatgcaattatttatgggatattcaaaacagatatatatgaagcaaaaaacttgggcccaaaaaacaagtttgaaggtatatttgggagttaccagtaatataggtaactgttgaagctctaaatatagaagacaaactagaggagcttgtttccntgaaagaattcttggncacacttgacattttttacagagatttcttaaaacaggggcatatcttctttggctaacatatgcagactaaaatgaaagagtatagtatattataaaatcaataaaaggtaagataaatttaggcctaaaaataaagaataaatacactcagt

SEQ ID NO: 355887 - DNA, 1796 bp, Homo Sapiens
gtggaccggtccggaattcccgggatccgctgcggccgatcagaggagcaggaactggaaccctggccgagtccgaaaaaagccagatctggaaggtggctgcggaacggttttaagcggaagatggaggagccggaggaaccggcggacagtgggcagtcgctggtcccggtttatatctatagtcccgagtatgtcagtatgtgtgactccctggccaagatccccaaacgggccagtatggtgcattctttgattgaagcatatgcactgcataagcaaatgaggatagttaagcctaaagtggcctccatggaggagatggccaccttccacactgatgcttatctgcagcatctccagaaggtcagccaagagggcgatgatgatcatccggactccatagaatatgggctaggttatgactgcccagccactgaagggatatttgactatgcagcagctataggaggggctacgatcacagctgcccaatgcctgattgacggaatgtgcaaagtagcaattaactggtctggagggtggcatcatgcaaagaaagatgaagcatctggtttttgttatctcaatgatgctgtcctgggaatattacgattgcgacggaaatttgagcgtattctctacgtggatttggatctgcaccatggagatggtgtagaagacgcattcagtttcacctccaaagtcatgaccgtgtccctgcacaaattctccccaggatttttcccaggaacaggtgacgtgtctgatgttggcctagggaagggacggtactacagtgtaaatgtgcccattcaggatggcatacaagatgaaaaatattaccagatctgtgaaagtgtactaaaggaagtataccaagcctttaatcccaaagcagtggtcttacagctgggagctgacacaatagctggggatcccatgtgctcctttaacatgactccagtgggaattggcaagtgtcttaagtacatccttcaatggcagttggcaacactcattttgggaggaggaggctataaccttgccaacacggctcgatgctggacatacttgaccggggtcatcctagggaaaacactatcctctgagatcccggatcatgagtttttcacagcatatggtcctgattatgtgctggaaatcacgccaagctgccggccagaccgcaatgagccccaccgaatccaacaaatcctcaactacatcaaagggaatctgaagcatgtggtctagttgacagaaagagatcaggtttccagagctgaggagtggtgcctataatgaagacagcgtgtttatgcaagcagtttgtggaatttgtgactgcagggaaaatttgaaagaaattacttcctgaaaatttccaaggggcatcaagtggcagctggcttcctggggtgaagaggcaggcaccccagagtcctcaactggacctaggggaagaaggagatatcccacatttaaagttcttatttaaaaaaacacacacacacaaatgaaatttttaatctttgaaaattatttttaagcgaattggggaggggagtattttaatcatcttaaatgaaacagatcagaagctggatgagagcagtcaccagtttgtagggcaggaggcagctgacaggcagggtttgggcctcaggaccatccaggtggagccctgggagagagggtactgatcagcagactgggaggtggggagaagtccgctggtgttgttttagtgttatatatctttggtttttttaataaaatctttgaaaacctag

SEQ ID NO: 355888 - DNA, 1419 bp, Homo Sapiens
  misc_feature (912)..(912): n is a, c, g, or t
gatggacgggagggcacgggagtcagcccgcccatgtggctactggaggtcacgttccctaactgatcccttggttctctcgggtggagccttcagcgtgcacggcggggtttgactttgccaccgtctctcttctgggttccaataaagttttcctcttcctctcctcgtacggagttcaagatggcggcctcctggtcgctcttggttaccctgcgccccttagcacagagccgctgagagggagatgtgttgggtgcggggcctgggccgccgctctcgctcctctggccaccgcccctgggaagcccttttggaaaggtcagtgactgtgccatgagtagtccgagccgactgcatatgactggagaagcctctgggattaccctccctgtccgatctaccccaggtgtctcctgctttcacgaagctgagggctcctcgagaggagtttccatttctcttgaccttttatactgtctgtgaatgagccctgagcactgagggaaatgaccctgagtgactttcattttgagggtcataggttgactcagagtttgttccttccgggacgtttagagagctgaacctagtgggagtgcctggcttgaagagatgcaggtgtggggttggggcctggggacccctaccctctgcgttttccaagctctcgggggctggtgactgacgggcactggaggaagagccgcgcctgggacctctgcaggccctgatgtctctcgtgattctaggaaggaaggtccacacacattctcagattgagggatcgattcttggtgttcttttcaagtcactaggggcttcagtggaattattttgtcaccgggctttctttctccctggcttccttcattcagttatatgttcatgaatgaatgaatgaatgtatanttctgagtaaccaagagtgccagttttactgctctattcatgtattcgcactaaactgcacgattttcaaaagcaaggacattgtgtcattgtttcctaagcacttagcgcaatgattggtacttgacgtgcaaatatgatttttgagtgaatgaatgaatgaaattattctccttgtctccctcatccacatactcgttttcctttttctcaaatccaagcaacccctgtaatataccttaatagattgatagaccttaataaggtatataccttaatagattatttattaatttagctaaaaatatgacaatctttgacccttatcatcaatgcagttgaaattaatactagaactttgattaggtcaccttacgtctttctgcaaagattagcataatgcatttagtataatggaataggctccacacactgcctgggggtagccctgatctgctggagtagtcgttaaaagtaaataaataaataaagatataatggaatatt

SEQ ID NO: 355889 - DNA, 846 bp, Homo Sapiens
  misc_feature (20)..(20): n is a, c, g, or t
  misc_feature (798)..(798): n is a, c, g, or t
aggtattctgggcccagggnatcctggcgatgagggagggccttcccccctgggcccccatgtcccggtacaggccccccacagagctgggggggcctgagccatgtcggacccgggtgccattgggatctagggcaccctggcctttggcctccaggaaggcagccctgtgctttatcaccctggccgggaaggtgtccacagccagtttgcccgtggcctcagctgagctagggctggtcacaccacactgcaccaggtccgagtcctgtcttcgggccagctggatcacactgtggccggctggaaactttcctgccccggaaggggtgtcgtccagcttcctgcccttgaggtactctccgaggccggcgctgggttcgcctaagggcctctgtgaggggtccgggagctccttccggggcttggggcctcgcttcttcgagctgtcccccggtgagctgggcttgtcatccactctgctggtaccccgctctcgttccctctcacgttcccgctccctctctcgctccctctccctttctcgatcccgctcccggtccctatcccggtctcggtcccggtcccgaggggcctctgcgcggcaggtgctgctggtgccggtgctgctcgctggcggggacaaacccatgtttcgaaggccatcccgggcccgggaagtggaggccaggtcctggggcgagcggccagggtaggggatccggatgcccctggctgagtcacctcgaactcgtaagttttggccttgcctttggctgcgctttgaggaggagggtntgggcttgggtccagctttttggggccataaagctccattcttcttcc

SEQ ID NO: 355890 - DNA, 1870 bp, Homo Sapiens
tgggttagggagaggggacagaatctcttcaaggtctggatgctaaacgtaccccttccttattccctcccaatgcagaaaaaggtctgggatgttctgacagggccatctctgccttgcaggtacattggggcactgggggcacgagtgatctgtgacaatatccctggtttggtgagccggcagcggcagctgtgccagcgttacccagacatcatgcgttcagtgggcgagggtgcccgagaatggatccgagagtgtcagcaccaattccgccaccaccgctggaactgtaccaccctggaccgggaccacaccgtctttggccgtgtcatgctcagaagtagccgagaggcagcttttgtatatgccatctcatcagcaggggtagtccacgctattactcgcgcctgtagccagggtgaactgagtgtgtgcagctgtgacccctacacccgtggccgacaccatgaccagcgtggggactttgactggggtggctgcagtgacaacatccactacggtgtccgttttgccaaggccttcgcggatgccaaggagaacacgcttaaggatgcccgggccctcatgaacttacataataaccgctgtggtcgcacggctgtgcggcggtttctgaagctggagtgtaagtgccatggcgtgagtggttcctgtactctgcgcacctgctggcgtgcactctcagatttccgccgcacaggtgattacctgcggcgacgctatgatggggctgtgcaggtgatggccacccaagatggtgccaacttcaccgcagcccgccaaagctatcgccgtgccacccggactgatcttgtctactttgacaactctccagattactgtgtcttggacaaggctgcaggttccctaggcactgcaggccgtgtctgcagcaagacatcaaaaggaacagacggttgtgaaatcatgtgctgtggccgagggtacgacacaactcgagtcacccgtgttacccagtgtgagtgcaaattccactggtgctgtgctgtacggtgcaaggaatgcagaaatactgtggacgtccatacttgcaaagcccccaagaaggcagagtggctggaccagacctgaacacacagatacctcactcatccctccaattcaagcctctcaactcaaaagcaccaagatcctggcatgcacaccttcctccaccctccaccctgggctgctaccgcttctatttaaggatgtagagagtaatccatagggaccatggtgtcctggctggttccttagccctgggaaggagttgtcaggggatataagaaactgagcaagctccctgatttcccgctctggagatttgaagggagagtagaagagatagggggtctttagagtgaaatgagttgcactaaagaacgtagttgaggctccttttttctttcctttgcaccagcttcccgatacttcttggtgtgcaagaggaagggtacctgtagagagcttctttttgtttctacctggccaaagttagatgggacaaagatgaatggcatgtcccttctctgaagtccgtttgagcagaactacctggtaccccgaaagaaaatcttaggctaccacattctattattgagagcctgagatgttagccatagtggacaaggttccattcacatgctcatatgtttataaactgtgttttgtagaagaaaaagaatcataccaatacaaacacacattcattctctctttttctctctaccattctcaacctgtattggacagcactgcctcttttgcttacttgctgcctgttcaaactgaggtggaatgcagtggttcccatgcttaacaaatcattaaaaaaccatagaac

SEQ ID NO: 355891 - DNA, 1681 bp, Homo Sapiens
  misc_feature (1676)..(1676): n is a, c, g, or t
ccgcctgggccctccccgcgtcgccgtgcaggtggctattacgggtacgggccggaattcccgggatgccgggagccgccggccgccggtgtccggaccgctcgcccccgtttggacccgacttcggttcttctggggtgttgatgctcctaaagcccgagagcacgtgtccagaccctagcctgtacgacgctgactctgcccggtcccagaaccaaagccatgccggggtgtggcctctgaccccacgcggaggggacctcgccttgcgggaccccacctggaacccgacctcccagcctcgcagccggcctgagccgccatgcgcgggaagttgctgccgctggccggcctctacctggtgcagggcctgccctacgggctccagtccggcctcctgccagtgctgctgcgtgccggcggcctctcgctgacgcgcgtggggctggccaaggttctgtacgctccgtggctgctcaagctggcttgggccccgctggtggacgcgcagggctcggcgagggcctgggtgacgcgcagcacggcgggcctgggcctggtgtgtgggctgcttgccgggctgccccctcctggagctggccaggccgggctgcccgccgctgtggcggggttgctgctgttgttgaacctgggtgccgccatgcaggatgtggccctggacgcgctggctgtgcagctgctggagccggccgaactggggccgggcaataccgtgcaggtggtcgcgtacaagctgggggccgcgctagctgggggcgcgctgctggcgctgctgcccaccttctcgtggccgcaactctttctgctcctggctgccacctactggctggccgcggccctggcctgggctgcaccagccctgcggcggctcccacagcagcccccttccgagcagcgtccccacaccgcgcaccttctgcgggacgtgctagccgtgccggggaccgtgtggacggcaggctttgtgctcacctacaagctgggtgagcagggtgccagcagcctgtttcctcttctcctgctggaccacggcgtttctgctcccgagttgggactgtggaatggtgtgggtgctgtggtctgctccatcgctggctcctccctgggtgggaccttgctggccaagcactggaaactgctgcctctgttgaggtcggtgctgcgcttccgcctcgggggcctagcctgtcagactgccttggtcttccacctggacaccctgggggccagcatggacgctggcacaatcttgagaggtgaggggctggccttgaggaggaagagaggggccaggagcctggggcactgctgacttctgccctcccagggtcagccttgctgagcctatgtctgcagcacttcttgggaggcctggtcaccacagtcaccttcactgggatgatgcgctgcagccagctggcccccagggccctgcaggccacacactacagccttctggccacgctggagctgctggggaagctgctgctgggcactctgccggaggcctggctgatgggttggggccacatccctgcttcttgctcctgctcatcctctctgcctttcccgttctgtacctggacctagcacccagcacctttctctgagctgagtggctggagtggtcaataaagccacatgtgcctgtgccnagatg

SEQ ID NO: 355892 - DNA, 751 bp, Homo Sapiens
gccctggcctgggctgcaccagccctgcggcggctcccacagcagcccccttccgagcagcgtccccacaccgcgcaccttctgcgggacgtgctagccgtgccggggaccgtgtggacggcaggctttgtgctcacctacaagctgggtgagcagggtgccagcagcctgtttcctcttctcctgctggaccacggcgtttctgctcccgagttgggactgtggaatggtgtgggtgctgtggtctgctccatcgctggctcctccctgggtgggaccttgctggccaagcactggaaactgctgcctctgttgaggtcggtgctgcgcttccgcctcgggggcctagcctgtcagactgccttggtcttccacctggacaccctgggggccagcatggacgctggcacaatcttgagagggtcagccttgctgagcctatgtctgcagcacttcttgggaggcctggtcaccacagtcaccttcactgggatgatgcgctgcagccagctggcccccagggccctgcaggccacacactacagccttctggccacgctggagctgctggggaagctgctgctgggcactctggccggaggcctggctgatgggttggggccacatccctgcttcttgctcctgctcatcctctctgcctttcccgttctgtacctggacctagcacccagcacctttctctgagctgagtggctggagtggtcaataaagccacatgtgcctgtggccc

SEQ ID NO: 355893 - DNA, 387 bp, Homo Sapiens
cggcacgcagcagcactggcaggaggccggactggagcccgtagggcaggccctgcaccaggtagaggccggccagcggcagcaacttcccgcgcatggcggctcaggccggctgcgaggctgggagatcgggtatccaggtggggtccacgcaaggcgaggtcccctaccgcagtggggtacagaaggccacacgcaccggcatggctttggttcatgggaccgggcagagtcagcgtcgtacaggcatagggtcgtggacacgagctctcgcgcatattaggagcatcaacaccccagaagaaccgaagtcgggtccaaacgggggcgagcggtccgacaccgcgcacgcggctcccgcatcccaaatcccgggccgtaccagcc

SEQ ID NO: 355894 - DNA, 1719 bp, Homo Sapiens
ccgcggtgcgcgcggattctggacttgggcgccaactcgtagtccacgctccccggggtcagcagaggggcgctcacgctctcgccacccacctcgctttctcaccccgcgcttcccggcctgggtttttagtcttccttggagcgctctctggcctccgcctccgccagggagcggaaggcggagacagcgagactggccaggggggaggaaagaggacgcgtgtgggcaagggggacaacgggatgtccacgggctcggtgagtgatccggaggagatggagcttcgggggctgcagcgggagtacccggtccccgcctccaagaggccgcccctccgcggcgtagagcgcagtacgcctcgcccagtgacaactcgtcggcagaggaggaggaccccgacggcgaggaggagcgctgcgctctgggcacagccggcagcgcggaaggctgcaagaggaagcggccccgtgtggctgggggcggcggcgcaggtggtagcgcgggcggtggtggcaagaagcccctcccggccaagggctcagccgcagagtgcaagcagtcgcagcggaacgcggccaacgcccgtgagcgtgcccggatgcgcgtgctgagcaaagccttctccaggctcaagaccagcctgccctgggtgccccccgacactaagctctccaagctggacacgctccggctggcttccagttacatcgctcacctgcggcagctgttgcaggaggaccgctatgagaacggctacgtgcacccagtgaacctgacatggccattcgtggtctcgggaagaccggactctgacaccaaagaagtttccgcagccaacagactatgtggaaccaccgcttaaatcggactggaactcacttgatgggattattcgttaaatgcgagtgtttgggggccacggagagaagggagagctcgtgagatgggaagaagtttccgctggattctccttgacccttcccctttccctggaactgtgatcgtgacaggtggcgggtgtggctgtcactgcacagcgcccacggctacagctgcgccggatctgggcgaccacgttttgcctctccaaaaagagcttcctttcgtgacgagacgcgcacgcaggtccaccctcgggccctagctctgtagactaactctcggctgctgccccagcccgcgccagacagcccacggatccgttctcagcggagccagattcatcgcacacgtgcgggacggttccacacagccccggcctttcgcggtgacacaatggttagggaacggttagaacgcgctctacatccgctttaaagacagaggtctagacgtgagatccgcgtcgggacagggttttaagtgacaaagaagggcgagtggcttctctgggccgggttcggtcttcaaacaggggcctttttacggcgggaagaaggccgttctttccggccttggtggggaccacttcccagatcacgaaggcggttttaccccgaagttttgggccgttggcctccttccggggggttttttaatcccgttctttccaagttccggtttttttaataagaggcgtttgcaaccctttcctttttggctggagcctcccaagccccgttgcaacctgtgggggctttcttgggcctccctttcgcccgcgcttgtttcacttgggacccccgattcgattccgaattttttatgagtctcccc

SEQ ID NO: 355895 - DNA, 1929 bp, Homo Sapiens
  misc_feature (29)..(29): n is a, c, g, or t
  misc_feature (64)..(64): n is a, c, g, or t
  misc_feature (133)..(307): n is a, c, g, or t
  misc_feature (691)..(699): n is a, c, g, or t
tagtttgatacctaaagtgataccagtgnattaaatactgcgggcacacatgaaaccttctaanaatcagagagcctattacaatacatttttaaaatcttatgtaactggccgggcgcggagacgcacaccnnnnnnnnnnnnnnnnnnnnnnnnnnnnnnnnnnnnnnnnnnnnnnnnnnnnnnnnnnnnnnnnnnnnnnnnnnnnnnnnnnnnnnnnnnnnnnnnnnnnnnnnnnnnnnnnnnnnnnnnnnnnnnnnnnnnnnnnnnnnnnnnnnnnnnnnnnnnnnnnnnnnnnnnnnnnnnngcttgaacacagtgggcagaggttgcactcaagcatgggtgacagagcgaggcttgaatatagtctaaatacagatccctgtcctagttactaagtataaaaaatgaataaaatattagtcctgtctttgtattttctgtaccaagatgaaccaaattgccgaagtgtccacagtaaacaaagattatttatcacacaagcaacatgtggcattgttattatgggagggaaacaagcgttcaaacttgcacaatctgatttgctactaaataatagtaactaagagatttttcaagaagcagtggacatttagcctgccagtatccgtttctggttccataaagtcagcattttaaaaaaagaagcctgcgattttcttagagnnnnnnnnncgcttaactcacttccaagcaaatgcaaagtaaaatgtgccattaagccttgtaaggggtctgaaggctctggtttataagggagtcaggccatcgagaaaactgttcaatggtttttcataccgccactgccaactcccctcctagattcagtgtaatttggtgcagggccacaactgcatatggccttgaggtatgtgcagtagctcataggcagcaggaggtcagggtgaggtttgaggggccagagctgtcgaagggcgctggttcaaggtcagcgattctccacttgaggtgaaattaggtcaaaatgaatacctgggggtatccttctccagtgcagcttgaacagctgacttgctttctgaatccagggcagacgtagcctcatctaaaatcagaatcttggggtttcgaactaaggcacgagcaattgcgatcctctgtttctgccctccactcatttgagctcctttttcccctaccaatgtattaaatttattaggacatgataaaatcatacgcatttgcttcccttgctgctctctccatctcttcatcagtcacatcatctcgtccatacttgatattgttactgatggtggtcccgaacaaaacaggctcttgactaaccactccaatatggtctcgataatgccgcacatttaaagctctgatgtcattctcatccaccatgataaagccatcatccggatcatataacctctgcagaagctggactaccgtactcttcccactgccattgagaccgaccaaggcgactgtctctccagacttaattctgagattcagacctttcagaatcttgatagatggtcttgatggataattgaaagaaacatttttaaattccacagttccttctatggattcaggtttatatccagctgtggaaaagttatctatactgggtttcttatcaataacctggaaaatatgaaaggcagctcctcgggctattgcgaaggtttcaaagtgagggactgctgctccaatgcaataactgctatggattacactaaagaaaacctacaggaacaaacaaagtgatatttatctttctgcagttatataagaaagacaatagaatgtaatatataattattggtttaggctcacagagagatattagaggaattaggtaagaaagaatggaagatatgaccaaataaaaaagaacacagattacacttgatcccgaagaattcc

SEQ ID NO: 355896 - DNA, 984 bp, Homo Sapiens
  misc_feature (6)..(6): n is a, c, g, or t
  misc_feature (19)..(19): n is a, c, g, or t
  misc_feature (28)..(28): n is a, c, g, or t
  misc_feature (34)..(34): n is a, c, g, or t
  misc_feature (38)..(38): n is a, c, g, or t
  misc_feature (41)..(41): n is a, c, g, or t
  misc_feature (43)..(43): n is a, c, g, or t
  misc_feature (56)..(56): n is a, c, g, or t
  misc_feature (62)..(62): n is a, c, g, or t
  misc_feature (66)..(66): n is a, c, g, or t
  misc_feature (70)..(71): n is a, c, g, or t
  misc_feature (74)..(74): n is a, c, g, or t
  misc_feature (76)..(76): n is a, c, g, or t
  misc_feature (84)..(84): n is a, c, g, or t
  misc_feature (88)..(88): n is a, c, g, or t
  misc_feature (105)..(105): n is a, c, g, or t
  misc_feature (120)..(120): n is a, c, g, or t
  misc_feature (201)..(201): n is a, c, g, or t
  misc_feature (394)..(394): n is a, c, g, or t
  misc_feature (652)..(652): n is a, c, g, or t
  misc_feature (706)..(706): n is a, c, g, or t
  misc_feature (757)..(757): n is a, c, g, or t
aatganctgtgggaaagcncccctgaanagcctngttntcnanagcaccccttttnagcttnaggncccnnctntncctcttanaagnccttgatgcagcctgtntgccctgatggattnttggagcctcctgaatcagctctgaggggtgtcggctctcctggaggtccaaacccccatcctcctgcatgttctctggtnggaggcagagaaaagaccccacgtgcctggagagctgtgctagctgctaggtggtcctcgggaattccaggctgggttttctagggagaactggttgtcacgtgtggtcactgttgactagacagagtcggctcgggggtcctctgtgtgggtttgccctgctgtggcctgtctgccacccaccacctctttnactgttggtgggggccttgaggggagggcccagccggcgggggctggctcagaactttggccaaaggtgaacggaattttttaggagcagcagcctcctgccccaaggccgaccggcactggcagcactttcctgttgaagaaatcttcctggcgtgtggtttcaaagtgtaagcacctcagtgatgcaccctgtcctaagcattgagaggcacgtttacttgtgaatatgagaccatgagattctcaatgatagganagtgctgtcccccacggccttgcacagtggcctcgggtagagcggctatcaagngcagacagtggtccagcctgctgggcacctggcctgggctgtggccctccngcgggctgccccctggccccaggttagggcgtccaggagaggcttaggccctctacttcctcacagttccccagtttgagccatcgaaggccttcttcctgcccacctccccgtctcagccacacgccgttcccaagcaccagcgtggctcctggtgccagtgacctgccaggaggccccttgtgattataaaaccgttcagttggaccgggcgcggtggctcacac

SEQ ID NO: 355897 - DNA, 387 bp, Homo Sapiens
tggtaggaggcagagaaaagaccccacgtgcctggagagctgtgctagctgctaggtggtcctcgggaattccaggctgggttttctagggaggactggttgtcacgtgtggtcactgttgactagacagacctgtctccgcgtgagctgcctgcaggcccctgcgtcattcctcagctgcgtgcgaggcctctggcttggagagcctccccgctgtgcacagttctctctttgccagggcagggcttggggcagcaccaggctggggcagaggaggaaagcaagaggacagacctccagaagagcagcggagggcgggtgaggatttccccatataccagtgtgtgttcatctacccatgaggaataaaaccatgcagcagcatgc

SEQ ID NO: 355898 - DNA, 426 bp, Homo Sapiens
  misc_feature (53)..(53): n is a, c, g, or t
tgtcctgtatatatccacataccatggtaatggagtcttaatgataagtgcangataataatttaatgcatgggattagtctgatcgcttaatatgcacaatcctggaagtgaattacttgcatcagatatagtgatatttattattctgtacagagagaaaaatacatataaaacatatgcttacattacatgcacgcggatttcatgctccataatcttttctattttttaatttacctttctgtaaatgatgtgcatggaatatgccttatagaaaaatgctgttcataatttgactacgtggaaaagtgcctatatggtggtaatgctagtaaggcaaataagacaaattatcatgttggtttactacatcaccagttaacattttatattgtgatgtttaaaaaagaaaaatttatacctc

SEQ ID NO: 355899 - DNA, 435 bp, Homo Sapiens
  misc_feature (17)..(17): n is a, c, g, or t
  misc_feature (357)..(394): n is a, c, g, or t
acattgcggaaaccccnggaaccctccctgaatctgcccagtcccctgagctccccagatttccttccccagggcaaacacttctttcctttacggggagttcccctggggacgaacggcggaaactcatccgatacgtcacagccttcaatggggagctcgaggactatatgagtgaccgggttcagtttgtgatcacagcacaggaatgggatcccagctttgaggaggccctgatggacaacccctccctggcattcgttcgtccccgatggatctacagttgcaatgagaagcagaagttacttcctcaccagctctatggggtggtgccgcaagcctgaagtatgtgctatnnnnnnnnnnnnnnnnnnnnnnnnnnnnnnnnnnnnnngatgcatttaataaagatgagttggttctccaaaaaaaaaa

SEQ ID NO: 355900 - DNA, 1921 bp, Homo Sapiens
  misc_feature (50)..(86): n is a, c, g, or t
  misc_feature (1858)..(1858): n is a, c, g, or t
ggatgtatagatcactatagggcgaatggagctcaccgcggtggcggcgnnnnnnnnnnnnnnnnnnnnnnnnnnnnnnnnnnnnnatcaggccaaatcggccgagctcgaattcgtcgagagcgggcggactttagccagcgcagggcgcaccccgctccctcccactctccctgcccctcggaccccatactctacctcatccttctggccaggcgaagcccacgacgttgacatgccggagatccgcctccgccatgtcgtgtcctgcagcagccaggactcgactcactgtgcagaaaatcttctcaaggcagacacttaccgaaaatggcgggcagccaaggcaggcgagaagaccatctctgtggtcctacagttggagaaggaggagcagatacacagtgtggacattgggaatgatggctcagctttcgtggaggtgctggtgggcagttcagctggaggcgctggggagcaagactatgaggtccttctggtcacctcatctttcatgtccccttccgagagccgcagtggctcaaaccccaaccgcgttcgcatgtttgggcctgacaagctggtccgggcagccgccgagaagcgctgggaccgggtcaaaattgtttgcagccagccctacagcaaggactccccctttggcttgagttttgtacggtttcatagccccccagacaaagatgaggcagaggccccgtcccagaaggtgacagtgaccaagcttggccagttccgtgtgaaggaggaggatgagagcgccaactctctgaggccgggggctctcttcttcagccggatcaacaagacatccccagtcacagccagcgacccagcaggacctagctatgcagctgctaccctccaggcttctagtgctgcctcctcagcctctccagtctccagggccataggcagcacctccaagccccaggagtctcccaaagggaagaggaagttggatttgaaccaagaagaaaagaagacccccagcaaaccaccagcccagctgtcgccatctgttcccaagagacctaaattgccagctccaactcgtaccccagccacagccccagtccctgcccgagcacagggggcagtgacaggcaaaccccgaggagaaggcaccgagcccagacgaccccgagctggcccagaggagctggggaagatccttcagggtgtggtagtggtgctgagtggcttccagaaccccttccgctccgagctgcgagataaggccctagagcttggggccaagtatcggccagactggacccgggacagcacgcacctcatctgtgcctttgccaacacccccaagtacagccaggtcctaggcctgggaggccgcatcgtgcgtaaggagtgggtgctggactgtcaccgcatgcgtcggcggctgccctcccggaggtacctcatggcagggccaggttccagcagtgaggaggatgaggcctctcacagcggtggcagcggagatgaagcccccaagcttcctcagaagcaaccccagaccaaaaccaagcccactcaggcagctggacccagctcaccccagaagcccccaacccctgaagagaccaaagcagcctcaccagtgctccaggaagatatagacattgagggggtacagtcagaaggacaggacaatggggcggaagattctggggacacagaggatgagctgaggagggtggcagagcagaaagaacacagactgccccctggccaggaggagaatgggggaagacccgtatgcaggccccacggatgagaacacggacagtgaggaacaccaggagcctcctgatctgccagtccctgagctcccagnatttcttccagggcaagcacttctttctttaccgggagttccctggggacgagcggcggaaac

SEQ ID NO: 355901 - DNA, 1483 bp, Homo Sapiens
  misc_feature (1292)..(1293): n is a, c, g, or t
  misc_feature (1311)..(1363): n is a, c, g, or t
  misc_feature (1418)..(1418): n is a, c, g, or t
ggatggagcagaggcggaaggtccggcggcggcgaggatgcgcccagggcgggagcggacgctccactttaccctggctgcccgcaacgggccaggcctgccgtctctacctctctacctgtgagttttttccctgcatttacttcagtctgccgcgtcttctccccgcccttctctgtaaggtaaatatgtggaggaaataattcctattaaaggtaaaggaaaggagagcaatttgaatgaagaaacaggtagttgctatcgtcgttttcagccaaagccctctggctgctagagagtatacatggttctctggtgtcaaggcctgttttccataagctttctggattctcagcttagttcctcaaagtgatctctgcaagtcggctcttcggtcagaagacctcctccaaaaacagaaagcccaaagattccctaactcgattgaaaagataggaagatacgaagaaaaactaacctaaagaattgtgtggtttatctgcaaagagttctagactaaaagcaaacaatgcaaagatagtatgagttaatatgtttgttgtggctctcctctgccattcccgcttcctcaaggtaatgtgccccgatgcctggtagaactgttttgtagaggcagccaatagtgatacagttattgtctttactggtcagaccacctctgaagtgctgtgttcagcatttgaagactttaatcaagctggcattatatcagggaagagcaaaatgatgacgagaactcaaaaacagggcaagtgaagaaggattgattaaaccttccaggactcacctagaagagagaaaactactggactctctccaaatatgaaatgacctatcatgtgaagttgatttgtttcatgtgatgcaaacttcagggaacagatttaagatcctgaaaagaagatgcccttgtagcacgacccaaagaattgcctaccttagcatgtgtgaatacctcaaccacagaattttgcttcaaggagattctgaagctcacttaatagggacttggtacaggggagccacacatcaacagaataattagttgatggttttgttaaagatatttccagtcttgagattacatgtgtctttggtcctggacttcatagagtttacaagttagttcatgagacaagacaaatgcatcacaaaaataaataatgcaaggaggccaagtgataatgagaggtgctgataagtgctaggaattcacatgacagattattcccatcacagttccagaggcttaagggagaagagaggaactnnaaatagactacctagaannnnnnnnnnnnnnnnnnnnnnnnnnnnnnnnnnnnnnnnnnnnnnnnnnnnnatgtggcttgtccaaactgagacatgcaatgagtccaaaatgtacaccagatttnaaagacttagaaaacaaatgtaaaatattgtaattcttatgtcgattacatgttgaaataatata

SEQ ID NO: 355902 - DNA, 1605 bp, Homo Sapiens
  misc_feature (156)..(312): n is a, c, g, or t
  misc_feature (337)..(361): n is a, c, g, or t
  misc_feature (758)..(766): n is a, c, g, or t
  misc_feature (1090)..(1090): n is a, c, g, or t
  misc_feature (1239)..(1248): n is a, c, g, or t
  misc_feature (1254)..(1254): n is a, c, g, or t
  misc_feature (1526)..(1526): n is a, c, g, or t
  misc_feature (1531)..(1531): n is a, c, g, or t
  misc_feature (1543)..(1553): n is a, c, g, or t
cccgggaaatgagccccagttaaggtcttcccaaagaaaaaggggcaggggcacgggaggctcacggcctgataaaaacaggcactttggaagagccaaaggtgggcggatacacctgatgtcaggggttcgaagaacagcctgggaaacatggtnnnnnnnnnnnnnnnnnnnnnnnnnnnnnnnnnnnnnnnnnnnnnnnnnnnnnnnnnnnnnnnnnnnnnnnnnnnnnnnnnnnnnnnnnnnnnnnnnnnnnnnnnnnnnnnnnnnnnnnnnnnnnnnnnnnnnnnnnnnnnnnnnnnnnnnnnnnnnatgacagagtgagacttcatctcgnnnnnnnnnnnnnnnnnnnnnnnnncaacccggtagcattgtcccttccccactgacaaacttatcaaatccagaagcttcagagtttcgtctctaactacttttctcctgaacaaaattacccaagccaaaacaaaatgtatttttagaattacggcagcatacgacctgaattttgtgagtttcgcggctttatctcaaatcaccattctccctaaaaacggcctcttcctccttacaaacgctggtgccaacttgatgaaaaagccaaatgcaccaggcgccggcccactttcccattacccgggattgcccagcccccccaggtgctacctctacgggcgcagatctgcccgcggcgaccctagggcccggggaagaaggctctggcacgcacccccttacttgttggggccccgtgnnnnnnnnnactcacggggtataacgtgaaaacacctggtatgcgatacgtcgtcggtcttgtgccctgtggggagcaagtcccctggtggtgaaatcgggaacaccaatacgtggccttttggcgcacatcagctcccgccccccccacattcaccaagaaaatactgtccccccgctgggggacggcggtttgttaagcaccccggcgagagcgccgatgttgtttgctgggtgaatgaacagcgaatacgcatcctttgcactccccccagttgagggagggtaatagtgccatcccatatacgacgactgagagcgcccccaatatccngagcgcgctagtgagaagaaattcccgcccacccccctctaaaccaggcaagttgcgcccccgttttttcgctattctccccccgccctttctgctgctctgcttgctgccccgccctcccgctcccccaagtcatttagcacgcgcgnnnnnnnnnngtagtnatggtcgactctgcggcgcttataacccagcgtttccccctgtgctgcttgacaggcaaaaacgtgttcgtcggtctgcgtgtagaaagatgttggcccgctgtggacgcgccgcgccgcgcgggcatcctctcgtgatgctacacagaaatatttggtgaaggaacagccctcaggccttgtggtagaatacaaacatgaagggtggagccacttggggtagacgaagaaacccctgccgatgtatagggggcgcggctccctgacgccangatanggaaaccgtcannnnnnnnnnnactttttataatgtcatgtgctgctcttaggcgctcgcactctcccgcctcg

SEQ ID NO: 355903 - DNA, 794 bp, Homo Sapiens
agcggctctgcgtgcgccggaggctgccgtggcgggtgggccgcctgacttctcctcccggccagttctcgagcgcctcaccgggcctcgccctgcagcctcgctctcgctggcgctgcgcggcctaggggactgggctgctggcctccgggtgcggggtgggggcaggctccgacctggggcgtcctggcagcgcgagccgcgggatgggggcccgggccgcggaggaggcgccgctgctgtgtcccttggtggagagggcgctgccggccctgcgcggtttccagccaggaagcttcgggaagcctggacgtctgctcactggagatgacacgtgcgtggggtgttggcattcttgttatttaacacgggaaggaggtgacttcgcctgtgatggacttccagtgtgagcactggccagagtgaccaggctgaccagcaccagccctgatccagatgcagaggccaggatgtgggcccagccctgtgccaggaggctggctggaataaagggatgggcaggctggcatgggggcagccgctgcccctgcctgggtgttgctgtgtattcctgccggccaggggccactgccaggaccacgcctcccttttcatatcccgattcttaagttctgctattgtggtattctggtggagaaaaaagaaccgcgtggctgtttttgaactgcctggaacctaagaccctgaattcttttcccccccaaggggaaaatctatatggaaaacatttattttaaaatacaggatgaagtgaattaaaagatttaaatgca

SEQ ID NO: 355904 - DNA, 1259 bp, Homo Sapiens
ggctggtaccggtccggaagttatgggatatcgtcgacccacggcgtcgggctgccgtggcgggtgggccgcctgacttctcctcccggccagttctcgagcgcctcaccgggcctcgccctgcagcctcgctctcgctggcgctgcgcggcctaggggactgggctgctggcctccgggtgcggggtgggggcaggctccgacctggggcgtcctggcagcgcgagccgcgggatgggggcccgggccgcggaggaggcgccgctgctgtgtcccttggtggagagggcgctgccggccctgcgcggtttccagccaggaagcttcgggaagcctggacgtctgctcactggagatgacacgtgcgtggggtgttggcattcttgttatttaacacgggaaggaggtgacttcgcctgtgatggacttccagtgtgagcactggccagagtgaccaggctgaccagcaccagccctgatccagatgcagaggccaggatgtgggcccagccctgtgccaggaggctggctggaataaaggtacagatagaggcctcaccccctctgggaccactggcactcagggtgtttgcagcctcagagcccacctgcccccagggccacagctgcatctcctgccctgctgtcattacagggatgggcaggctggcatgggggcagccgctgcccctgcctgggtgttgctgtgtattcctgccggccaggggccactgccaggaccacgcctcccttttcatatcccgattcttaagttctgctattgtggtattctggtggagaaaaaagaaccgcgtggctgtttttgaactgcctggaacctaagaccctgaattcttttcccccccaaggggaaaatctatatggaaaacatttattttaaaatacaggatgaagtgaattaaaagatttaaatgcacatttctttaaggataatatttctgtgttggcaaaatttgagagtaaattggtcttgaatggaatggattgtcttgactcacacattgcggacagagcccgccctgaagaaaggtgttgctgtggtgggatcttcccacgagggtccttgcctgttctcctaggggatggttgctgggtgccctgggctactggggagagcgtacggggctggagaagatggccattcctgggctgtttcctagggaatgagttgtacatctcatggctggattttgtaaaatcagtttttaaaataccgcatatatctgttttcttactgg

SEQ ID NO: 355905 - DNA, 1593 bp, Homo Sapiens
  misc_feature (81)..(101): n is a, c, g, or t
taggctggtaccggtccggaattacgggatatcgtcgacccacgctgtcggcccaggttgctgctctggccgccgagtgannnnnnnnnnnnnnnnnnnnncgcgcggcccgagacccccccggccgccctcctcctttctttgttcctgtggctgggggggtatcccctccctccacaacatggagccatctcctctgtctcccagtggggcagcacttcccctgccgctgtcgctggctccgcccccactacccctgccagcagctgcagtggtacatgtgtccttccctgaggtgaccagtgccctcttggagtccctcaatcagcagcgtctgcagggccagctctgcgatgtatctatcagagtgcagggccgggagttccgggctcatcgggctgtcctggctgcctcctccccttacttccatgatcaggtcctactcaaaggcatgacctccatctcgctgcccagtgtcatggacccaggcgcctttgagactgtcctagcctccgcttacactggccgcctcagcatggctgctgctgacattgtcaacttccttacagtggggtctgtgctccaaatgtggcacattgtggacaagtgcactgaactactccgagaaggccgggcctcagctaccaccaccatcactactgctgcagccacctctgtcactgtccctggtgctggggtgccatccgggagtgggggcactgtggcccctgctaccatgggctctgcgcgctcccatgcctccagccgggccagtgagaatcaatctcccagcagcagcaactacttcagccccagggagtccactgatttctcatcttcctcccaagaggcatttgcagcttctgcagtgggcagtggggagcgtcgaggaggtggccctgtattcccagcccctgtcgttggcagtggaggggccacatctggaaagctgctgctggaggcagatgagctgtgcgatgatggtggggatgggaggggggcagtggttcctggggctgggctccggagacccacctacacaccccctagcatcatgccacagaaacactgggtatacgtgaagcgaggtggtaattgcccagcgccaacacccctggttccccaagacccagatctggaggaggaagaggaggaggaagatctggtgttgacctgtgaggatgatgaagatgaagaactagggggtagctccagggttccagtggggggagggcctgaggctaccctcagcataagtgatgtccgtaccctgagtgagcccccagacaagggggaggagcaggtcaacttctgtgagtcctccaatgactttggcccatatgagggtgggggtcctgtggcaggtcttgatgactcaggggggccaactccctcttcctatgccccctcccaccctcctcgaccgctccttcccttggacatgcagggcaaccagatcctgggtcttcccgtcgtcgtcttcatcctcatcctcacaggctcctgggccaaaccaccaggggaaccaagcagaacacggggcagtgaccgtgggggggcacgttcggtgggggagctggggtgttgccgggt

SEQ ID NO: 355906 - DNA, 1342 bp, Homo Sapiens
  misc_feature (59)..(59): n is a, c, g, or t
  misc_feature (85)..(85): n is a, c, g, or t
  misc_feature (93)..(93): n is a, c, g, or t
  misc_feature (107)..(107): n is a, c, g, or t
  misc_feature (115)..(115): n is a, c, g, or t
  misc_feature (117)..(117): n is a, c, g, or t
  misc_feature (119)..(119): n is a, c, g, or t
  misc_feature (123)..(124): n is a, c, g, or t
  misc_feature (126)..(126): n is a, c, g, or t
  misc_feature (128)..(128): n is a, c, g, or t
  misc_feature (130)..(130): n is a, c, g, or t
  misc_feature (132)..(133): n is a, c, g, or t
  misc_feature (141)..(141): n is a, c, g, or t
  misc_feature (144)..(144): n is a, c, g, or t
  misc_feature (152)..(154): n is a, c, g, or t
  misc_feature (170)..(170): n is a, c, g, or t
  misc_feature (172)..(172): n is a, c, g, or t
  misc_feature (175)..(176): n is a, c, g, or t
  misc_feature (180)..(180): n is a, c, g, or t
  misc_feature (184)..(184): n is a, c, g, or t
  misc_feature (189)..(189): n is a, c, g, or t
  misc_feature (198)..(198): n is a, c, g, or t
  misc_feature (205)..(208): n is a, c, g, or t
  misc_feature (210)..(211): n is a, c, g, or t
  misc_feature (213)..(213): n is a, c, g, or t
  misc_feature (215)..(217): n is a, c, g, or t
  misc_feature (261)..(262): n is a, c, g, or t
  misc_feature (265)..(265): n is a, c, g, or t
  misc_feature (267)..(267): n is a, c, g, or t
  misc_feature (274)..(274): n is a, c, g, or t
  misc_feature (276)..(277): n is a, c, g, or t
  misc_feature (284)..(284): n is a, c, g, or t
  misc_feature (294)..(295): n is a, c, g, or t
  misc_feature (303)..(303): n is a, c, g, or t
  misc_feature (306)..(306): n is a, c, g, or t
  misc_feature (310)..(310): n is a, c, g, or t
  misc_feature (313)..(313): n is a, c, g, or t
  misc_feature (315)..(315): n is a, c, g, or t
  misc_feature (534)..(534): n is a, c, g, or t
  misc_feature (750)..(750): n is a, c, g, or t
  misc_feature (904)..(904): n is a, c, g, or t
  misc_feature (1061)..(1061): n is a, c, g, or t
agggctctgctgtgagaccatgacttggctcagggctgctcatccaatctctttccagnccttcctttctttttgtgtaaaatgnagccctgnctctgcaactaggntctcactngntnctgnngntntngnnttcttggntgnctaatttnnnttttgtttggctcgtnanggnnggantatntcaancaggttttncactctnnnntnntntnnnattggaaaatggatggtcagggctttgtttttataaccaagcanngcnanacacgcntnnaaacatnccattcctgnngttcaggnganggantgngncctgcagttccatttttggagttttccagtttaccctgccaccaattatgatcatccttactaataatctggatgatgtcaccaactctgaatcgaatgccagcttctttacaggggatgaggtcatccttggctggatcatattcaaattgtgctcttacatagatctataaaacaggagttcgtaagaaaggatgccatagtgatgtgaaagagaangttagctctaatgtcataaccacacacccaacagttacaatacaaacaggacatcagatggtgaaagcaaaaacgatgcatggaaatacgacacaaaaaacttctaccgctagaaacaatgtactagtaatctttgatgagtatagcttcaaaactttgctgtttttatttggaaggaacacttgaaatacttgtttaataaaaataaagcacttnatttatgcttttactgtaacagaataggcctctaattatagaaaagtatgctcgctcttttttaaacctgcattggtgatgctggcattatggatacgttgtcatgactgcgtggcagcctttaagccataaatactagcagtcaggataggtnttaaccctaaagcagcacacgatataaaattagcaagaactctgggttggtatcttgctgtagaatgcttatatgacaactggcagtgtgtctacacattgctgataaagttaagtgtaactcaaacaattttttaaaagttaaaaaaagcttcatntttttctaatttaggttttaggtttgtattttactcttctgagagaataaaaatgaatttgaaccctagcttcccccaatgtaacacttgaaatcagcacagagcttcaagacatgcatagttcaaggctctgagttttatgatatgtgagtttacttaggaaatagattagcattcaagggtttattatatggcagcattttatgaattattttattttttaaatgctttaagataaggtaattcatacccaatgttccatcaattatacagtcttaaga

SEQ ID NO: 355907 - DNA, 426 bp, Homo Sapiens
  misc_feature (327)..(327): n is a, c, g, or t
  misc_feature (370)..(370): n is a, c, g, or t
  misc_feature (378)..(378): n is a, c, g, or t
  misc_feature (400)..(400): n is a, c, g, or t
gtaaactggaaaactccaaaaatggaactgcaggtctcattccttctcctgaacttcaggaatggcgagtagcttgcattgccatggagaagaccaaacaggagcagcaggccagctgtacttggtttggcaagaaaaagaagcagtacaaagataaatatttggcaaagcacaatgcagtgtttgatcaattagatcttgtcacatatgaagaagtagtaaaactgccagcattcaagaggaaaacactagtcttattagggcgcacatggtgttggggagaagacacataaaaaacactctcattcacaaagcaccccaggaccngttttgcgtaccctatttcccacattaccaacccaggaccttnccaaaggnaaggacggagggaaattggggnaaggtttattttacttttgttttctt

SEQ ID NO: 355908 - DNA, 1111 bp, Homo Sapiens
  misc_feature (943)..(943): n is a, c, g, or t
  misc_feature (972)..(972): n is a, c, g, or t
  misc_feature (987)..(987): n is a, c, g, or t
  misc_feature (989)..(989): n is a, c, g, or t
  misc_feature (991)..(991): n is a, c, g, or t
  misc_feature (1000)..(1000): n is a, c, g, or t
  misc_feature (1003)..(1003): n is a, c, g, or t
  misc_feature (1017)..(1017): n is a, c, g, or t
  misc_feature (1020)..(1020): n is a, c, g, or t
  misc_feature (1028)..(1028): n is a, c, g, or t
  misc_feature (1033)..(1034): n is a, c, g, or t
  misc_feature (1036)..(1036): n is a, c, g, or t
  misc_feature (1042)..(1042): n is a, c, g, or t
  misc_feature (1046)..(1047): n is a, c, g, or t
  misc_feature (1057)..(1057): n is a, c, g, or t
  misc_feature (1067)..(1067): n is a, c, g, or t
  misc_feature (1072)..(1072): n is a, c, g, or t
  misc_feature (1076)..(1076): n is a, c, g, or t
  misc_feature (1078)..(1078): n is a, c, g, or t
  misc_feature (1084)..(1084): n is a, c, g, or t
  misc_feature (1091)..(1091): n is a, c, g, or t
  misc_feature (1093)..(1093): n is a, c, g, or t
  misc_feature (1095)..(1095): n is a, c, g, or t
agcggagtctctcccagcgaccgccgcgggggcaaggcctggagctgtggttcgaatttgtgcaggcagcgggtgctggcttttagggtccgccgcctctctgcctaatgagctgcaccagaatgatccaggttttagatccacgtcctttgacaagttcggtcatgcccgtggatgtggccatgaggctttgcttggcacattcaccacctgtgaagagtttcctgggcccgtacgatgaatttcaacgacgacattttgtgaataaattaaagcccctgaaatcatgtctcaatataaaacacaaagccaaatcacagaatgactggaagtgctcacacaaccaagccaagaagcgcgttgtgtttgctgactccaagggcctctctctcactgcgatccatgtcttctccgacctcccagaagaaccagcgtgggatctgcagtttgatctcttggaccttaatgatatctcctctgccttaaaacaccacgaggagaaaaacttgattttagatttccctcagccttcaaccgattacttaagtttccggagccactttcagaagaactttgtctgtctggagaactgctcgttgcaagagcgaacagtgacagggactgttaaagtcaaaaatgtgagttttgagaagaaagttcagatccgtatcactttcgattcttggaaaaactacactgacgtagactgtgtctatatgaaaaatgtgtatggtggcacagatagtgataccttctcatttgccattgacttaccccctgtcattccaactgagcagaaaattgagttctgcatttcttaccatgctaatgggcaagtcttttgggacaacaatgatggtcagaattatagaattgttcatgttcaatggaagcctgatggggtgcagacacagatggcacccaagactgtgcattccaccangacgtctcctaagaaagagttagagtcanaatctttgggagtcngngntggctagtnggntcttccagagtggnganctgggganaatgnnanttggcnctanngatgataaancaaaatgtantggtntgantntcaatncccatgnancnaggctgtatgtcaatt

SEQ ID NO: 355909 - DNA, 1455 bp, Homo Sapiens
gagcggaagtaacgccgcggaccgggaaagtgggaggggccgctcccggaacgcagccttcttgtaagaacctccaaggaagcaagaagaaaaaagaggcgctaccctgcgcatcccgggaggcctctgaaagcttccactagagaaaaactccccactcttacaatttctttaaccgcaagaagcggaggacctggacaaggactcgaggagcaaggtggcgaaccaagggtagggcgcaccgggcccgagaggtcccccgcaggttgcagatacggtggactctctgcggcttctgagcacggagggagctgtcgcggggtcgggaggtcgtctctcatccctgcctcatcttccgacggccggcggggccatgtccagaggcccgagctccgcggtcctgcctagcgccctgggatcccggaagctcggcccccggagcctcagctgcctgtcggacctggacggcggcgtggccctggagccgcgggcctgtaggcccctgggagcccgggccgcgcgccgccgccaacgccagcgccgtcgggctgcgacccccgcctgcggcccatcatcctgcggcgggcgcgctcactgcccagctccccctagcgccgccagaaggccgcgggcgcgccgggcgctgcgtgtcggccgggctgcagccagaagctccgcgtgcgcttcgccgacgccctgggcttggagctggcacaggtcaaggtgttcaacgcgggagacgacccgtccgtgccgctgcacgtgctgtcgcggctcgcaatcaactcggacctgtgctgcagcagccaggacctggagttcaccctgcattgcctggtgcccgatttcccgccgcccgtcgaggccgccgacttttggcaagcgcctgcagcggcagctccgtgtgcctggagcgtgtcacttgctcggaccttggcatcagcggtacggtgcgcgtgtgcaacgtggccttcgagaagcaggtggctgtgcgctacactttctcgggctggcgcagaacccacgaggcggtggcgcggtggcgcggacccgcaggccccgagggcacggaggacgttttcaccttcggctttacaggaccgtccttgctgctggagctcgggtcccgcgtgcacttcgtggtgcgctaccaagtggcggctgccgagtactggaacaacaacgaccaccgtgactacagtctgtacatgtggtaaccacgcgctgtacatgcctcgcgctgagtgcgaagagagctggatccactttatatgagccgtgcggagaccggtcacctggagcctgcacacctaagctgtgcctactgacattttacctgctggactctcacatgtatgtggatgttctagaccaccctttaagatctatgacctaattctttgatcacaggtttctctgtcagggccttatcctgtcttgttcgttttacgcctg

SEQ ID NO: 355910 - DNA, 718 bp, Homo Sapiens
  misc_feature (15)..(15): n is a, c, g, or t
  misc_feature (28)..(28): n is a, c, g, or t
  misc_feature (33)..(33): n is a, c, g, or t
  misc_feature (38)..(38): n is a, c, g, or t
  misc_feature (49)..(50): n is a, c, g, or t
  misc_feature (73)..(73): n is a, c, g, or t
  misc_feature (75)..(75): n is a, c, g, or t
  misc_feature (131)..(131): n is a, c, g, or t
  misc_feature (173)..(173): n is a, c, g, or t
  misc_feature (194)..(194): n is a, c, g, or t
  misc_feature (223)..(223): n is a, c, g, or t
  misc_feature (251)..(251): n is a, c, g, or t
  misc_feature (283)..(283): n is a, c, g, or t
  misc_feature (292)..(292): n is a, c, g, or t
  misc_feature (298)..(298): n is a, c, g, or t
  misc_feature (305)..(305): n is a, c, g, or t
  misc_feature (308)..(308): n is a, c, g, or t
  misc_feature (326)..(326): n is a, c, g, or t
  misc_feature (328)..(328): n is a, c, g, or t
gggcagggagagtgnaagaaggtcaggngtcanagtcngggccggtttnngaggaggctgaggctgccgttgntngaggggcttggatggaggaggccgggctgcctgtagtaggccttgtaagctttgcnagcagctcctggatgaagtcctcgacaggtttcccacatganttcaggagtccctggattttncggcttctctcctcttcactctctaactncaacaattcatcaatgttgatctcatcnggcatgtttgcttccatgctgcggtatagctnctccaggtncccgtngatccanttnttcatgtttagttgctgntncagctcccgccggtcatacttgacggtgacgcgcgcgtgccgcttctgcagccccccgggactgccccctggcccgcgggcccgcgatggagactgcagcttgctcagcacgcgcttgcccagccgctgagctgccatcgcgctgctggacccagcctggccccgcgctgtgcgccttcgcctcgcgccccgggtgcttcttacgggccagggcggggctagccgggggcgggggctcgggctcgccgggaggtctgccccaccccggccgcctcgggcctcagtttccccgtctgcagtgcgagagtaggccgctgcgtcggcttgaggcacgcagtcgtgcgaagttgaggtatgggcggatcccgggaattccggaccggtaccagc

SEQ ID NO: 355911 - DNA, 704 bp, Homo Sapiens
  misc_feature (66)..(102): n is a, c, g, or t
gacaacacccacccagcccccgcgacgatgactactatggggaccgcagcttatgggtggcggcgnnnnnnnnnnnnnnnnnnnnnnnnnnnnnnnnnnnnnatcaggccaaatcggccgagctcgaattcgtcgagagcgggcacagcgcggggccaggctgggtccagcagcgcgatggcagctcagcggctgggcaagcgcgtgctgagcaagctgcagtctccatcgcgggcccgcgggccagggggcagtcccggggggctgcagaagcggcacgcgcgcgtcaccgtcaagtatgaccggcgggagctgcagcggcggctggacgtggagaagtggatcgacgggcgcctggaggagctgtaccgcggcatggaggcagacatgcccgatgagatcaacattgatgaattgttggagttagagagtgaagaggagagaagccggaaaatccagggactcctgaagtcatgtgggaaacctgtcgaggacttcatccaggagctgctggcaaagcttcaaggcctccacaggcagcccggcctccgccagccaagcccctcccacgacggcagcctcagccccctccaggaccgggcccggactgctcacccctgaccctcttgcactctccctgccccccggacgccgcccagcttgcttgtgtataagttgtatttaatggttctgtaacaataaaa

SEQ ID NO: 355912 - DNA, 979 bp, Homo Sapiens
  misc_feature (30)..(30): n is a, c, g, or t
  misc_feature (36)..(36): n is a, c, g, or t
  misc_feature (97)..(97): n is a, c, g, or t
  misc_feature (312)..(312): n is a, c, g, or t
  misc_feature (334)..(334): n is a, c, g, or t
  misc_feature (651)..(651): n is a, c, g, or t
  misc_feature (668)..(668): n is a, c, g, or t
  misc_feature (691)..(691): n is a, c, g, or t
  misc_feature (714)..(714): n is a, c, g, or t
  misc_feature (725)..(725): n is a, c, g, or t
  misc_feature (729)..(729): n is a, c, g, or t
  misc_feature (750)..(750): n is a, c, g, or t
  misc_feature (752)..(752): n is a, c, g, or t
  misc_feature (757)..(758): n is a, c, g, or t
  misc_feature (768)..(768): n is a, c, g, or t
  misc_feature (771)..(771): n is a, c, g, or t
  misc_feature (778)..(779): n is a, c, g, or t
  misc_feature (782)..(783): n is a, c, g, or t
  misc_feature (794)..(794): n is a, c, g, or t
  misc_feature (796)..(796): n is a, c, g, or t
  misc_feature (809)..(811): n is a, c, g, or t
  misc_feature (817)..(817): n is a, c, g, or t
  misc_feature (826)..(826): n is a, c, g, or t
  misc_feature (832)..(833): n is a, c, g, or t
  misc_feature (840)..(840): n is a, c, g, or t
  misc_feature (842)..(844): n is a, c, g, or t
  misc_feature (855)..(856): n is a, c, g, or t
  misc_feature (858)..(858): n is a, c, g, or t
  misc_feature (862)..(862): n is a, c, g, or t
  misc_feature (865)..(865): n is a, c, g, or t
  misc_feature (867)..(867): n is a, c, g, or t
  misc_feature (882)..(883): n is a, c, g, or t
  misc_feature (887)..(887): n is a, c, g, or t
  misc_feature (901)..(901): n is a, c, g, or t
  misc_feature (905)..(905): n is a, c, g, or t
  misc_feature (912)..(912): n is a, c, g, or t
  misc_feature (916)..(916): n is a, c, g, or t
  misc_feature (922)..(922): n is a, c, g, or t
  misc_feature (930)..(930): n is a, c, g, or t
  misc_feature (939)..(939): n is a, c, g, or t
  misc_feature (946)..(946): n is a, c, g, or t
  misc_feature (954)..(954): n is a, c, g, or t
  misc_feature (956)..(956): n is a, c, g, or t
  misc_feature (961)..(961): n is a, c, g, or t
  misc_feature (963)..(965): n is a, c, g, or t
tgggatcagatatgacattgcactaatganaatggnggtttcagttgctcaggctcagattgcgcaatggcaggaagcatattaggtgctaaaaaanccccctccctagccgagctgggcgggtgagaagccgagtgcgaaacgggacttggcgtgtcatgggcgctaaggaaacggagtaaggccgactcacaggcaggaacatcgggacacacacaaagaggcaacacccactgcggacggggaaacagactttggtgtttcatccacctctcagcgcgcttatcagcatcctgtgacggccggtgctgnaccctaacacacacctaatganagacaccaacgccttcgcttggggagcccggccagcctcctgctccgggatgccctgctggcttcaaagatgagaagagccacatctccatcctatctccatcctatctccatccttctctccccaacagcgtgtggttgtctgtttcagggagcacatcgctcctggggcatgtggggtttatgtttcaggctgagacaccgccagccacagcacaaggacggtggcatcaagagctacgtcgggtattaggcagggtacgtggaaacccttgatttcagggctttggcatcagaggaggatgttttctcccaagnactggaaaaataaaagnaaggaaaacagtggtggctatanctcacatgtatttacacaagcgntctttagaggngctntgtctttaaggctacctgcgngnagcgnnaaagcacaangcncaagcanngcnnctcgccaagcnancactgcgcatgannnacaaancaagaacanactgcnnccacacngnnncgcgcggcggnnantaangcngnagccgcacacagcgnngcgnacgcaaattaaatntatntatgtcncatncgtttncgtagctntatttttantaaatanacttttgngnacttnannnatgtgtagcattag

SEQ ID NO: 355913 - DNA, 945 bp, Homo Sapiens
gggtccggaattcccgggatctctgccctgttgctgtcgcgccgctgctggttgctgtccctggacccctaccatggaggagaccatcaaagatccccccacatcagctgtcttgctggatcactgtcatttctctcaggtcatctttaacagtgtggagaagttctacatccctggaggggacgtcacatgtcattataccttcacccagcatttcatccctcgtcgaaaggattggattggcatctttagagtggggtggaagacaacccgtgagtattacaccttcatgtgggttactttgcccattgacctaaacaacaaatcagctaaacagcaggaagtccaattcaaagcttactacctgcccaaggatgatgagtattaccagttctgctatgtggatgaggatggtgtggtccggggagcaagtattcctttccaattccgtccagaaaatgaggaagacatcctggttgttaccactcagggagaggtggaagagattgagcagcacaacaaggagctttgcaaagaaaaccaggagctgaaggacagctgtatcagcctccagaagcagaactcagacatgcaggctgagctccaaaagaagcaggaggagctagaaaccctacagagcatcaataagaagttggaactgaaagtgaaagaacagaaggactattgggagacagagctgcttcaactgaaagaacaaaaccagaagatgtcctcagaaaatgagaagatgggaatcagagtggatcagcttcaggcccagctgtccactcaagagaaaagaaatggaggaagcttgtttcaggggagatccaggataagaccgagccagttaggagcagctggaaaaaagggaaaatggaccaccctcctttctcaattttaacttgaaccagagggaaaggaccccgaaaaaagcctcccagc

SEQ ID NO: 355914 - DNA, 1025 bp, Homo Sapiens
ccgggattcaatctggtggaagaaaggcgatttcgaggttccaatctgggcgacacttcccagttggagagtcagcaaaagggagagggcaattccaagaagagggaaaagcttgtgcacagtgtacctcctttattcctgaagcccgggcagtgcttgacctggtcgaccagtgcccaaaacagatccagaaaggaaagttccaggtagttgccatcgaaggactggatgccacgggtaaaaccacggtgacccagtcagtggcagattcacttaaggctgtcctcttaaagtcaccaccctcttgcattggccagtggaggaagatctttgatgatgaaccaactatcattagaagagctttttactctttgggcaattatattgtggcctccgaaatagctaaagaatctgccaaatctcctgtgattgtagacaggtactggcacagcacggccacctatgccatagccactgaggtgagtgggggtctccagcacctgcccccagcccatcaccctgtgtaccagtggccagaggacctgctcaaacctgaccttatcctgctgctcactgtgagtcctgaggagaggttgcagaggctgcagggccggggcatggagaagaccagggcaagaagcagaacttgaggccaacagtgtgttccgtcaacaaggtagaaatgtcctaccagcggatggagaatcctggctgccatgtggttgatgccagccccctccagagaaaaggtcctgcagacggtattaagcctaatccagaatagttttagtgaaccgtagttactctggccaggtgccacgtctaactagattagatgttgtttgaaacatctacatcaaccatttgttatgcagtgctcccaaatttctggttctacaagcatggttgtgtggcagaaaactggagaccaggcatcttaattttacttcagccatcgtaccctcttctgactgatggacccgtcatcacaaaggtccctctcatcatgttccagtgagaggcca

SEQ ID NO: 355915 - DNA, 1042 bp, Homo Sapiens
gctggaccggtccggaattccttgcatcgcggggtctgcgctggggccatggctccgccgcgccgcttcgtcctggagcttcccgactgcaccctggctcacttcgccctaggcgccgacgcccccggcgacgcagacgcccccgacccccgcctggcggcgctgctggggcccccggagcgcagctactcgctgtgcgtgcccgtgaccccggacgccggctgcggggccagggtccgggcggcgcggctgcaccagcgcctgctgcaccagctgcgccgcggccccttccagcggtgccagctgctcaggctgctctgctactgcccgggcggccaggccggcggcgcacagcaaggcttcctgctgcgcgaccccctggatgaccctgacacccggcaagcgctgctcgagctgctgggcgcctgccaggaggcaccacgcccgcacttgggcgagttcgaggccgacccgcgcggccagctgtggcagcgcctctgggaggtgcaagacggcaggcggctgcaggtgggctgcgcacaggtcgtgcccgtccccggagcccccgctgcacccggaggggccagacttgcccaattccgtggccttcccggaccgggaagccgccccggccgttttggaggagtgtacctcctttatttctgaagcccgggcagtgcttgacctggtcgaccagtgcccaaaacagatccagaaaggaaagtccaggttgttgccatcgaaggactggatgccacgggtaaaaaccacggtgacccaagtcagtggcagattcacttaaggctgtcctcttaaagtcaccaccctcttgcatttgggcagtggaggaagatcttggatgatgaaccaagtatcattagaagagctttttactcttgggccacttatattgtggcctcccgaaatagctaaagaatctgccaaattctcctgtgattgtacgacaggttcttggcacaggacgggccacctatgccattaggcactgaggtgaagtggggggtatccagaaccggacccc

SEQ ID NO: 355916 - DNA, 1038 bp, Homo Sapiens
  misc_feature (396)..(478): n is a, c, g, or t
agatttggaaatttcttaaattatgtagagttcaatacaaaaagaggcacaaatgggtttgcaaatctaaaccactcagcatccttcatggctggaaaggcaacatttctgttttaattcccaggcatgaaaatacatataggaaaggaattaatgtccatatgatacgtgtttcagtttttttagagttccaattacaaaagtctttgttcattcgtggatgaaagtataacttttgagagaatactttctgcagaacctaataagcgaaatgattataattgatgttcataaagccctttacaattcaaaaagaattgtacatgtattatttaatgtaccttacagaaaaaccttcgggtaggtattccaccttacacacaactgaacagattnnnnnnnnnnnnnnnnnnnnnnnnnnnnnnnnnnnnnnnnnnnnnnnnnnnnnnnnnnnnnnnnnnnnnnnnnnnnnnnnnnntactgtttgcacaagttcaatccaaaattttaatatcccacaggaagattcttttcaagggttaacagaagcttcttaaaacagacttctgctgttcaaacttttaaatgctgttttccaaacactaaaaataattattttaaactattatacaggaggcattccgtcagacaaaactgtcaggaaatgactatcatctcttttattaagataaaaacaaagttatcttaataaaaaaaatagtcctgtgtctttaggcaatgataacccgatcaggaactcaagtcatatttgacagcaacaaacacgttttaagagtttagataagacatgttccacgtttttacgctctttaaagtagtaggattttttccaatttatttaacaacccttaattggcccaaacaagaaaatataaagcaaaaaatccaaacgctatttccttcatactaacctacaaaaatgaattttcgatgagaaaactatacatacaagttagaagaaaatgaaggctgacattaaacactgttcttttctccaagtgtgttacacgcaaaata

SEQ ID NO: 355917 - DNA, 1653 bp, Homo Sapiens
  misc_feature (5)..(5): n is a, c, g, or t
  misc_feature (7)..(7): n is a, c, g, or t
  misc_feature (19)..(19): n is a, c, g, or t
  misc_feature (22)..(22): n is a, c, g, or t
  misc_feature (24)..(24): n is a, c, g, or t
  misc_feature (26)..(26): n is a, c, g, or t
  misc_feature (39)..(40): n is a, c, g, or t
  misc_feature (47)..(47): n is a, c, g, or t
  misc_feature (55)..(55): n is a, c, g, or t
  misc_feature (61)..(61): n is a, c, g, or t
  misc_feature (74)..(74): n is a, c, g, or t
  misc_feature (83)..(84): n is a, c, g, or t
  misc_feature (104)..(104): n is a, c, g, or t
  misc_feature (107)..(107): n is a, c, g, or t
  misc_feature (127)..(127): n is a, c, g, or t
  misc_feature (130)..(130): n is a, c, g, or t
  misc_feature (134)..(134): n is a, c, g, or t
  misc_feature (152)..(152): n is a, c, g, or t
  misc_feature (154)..(155): n is a, c, g, or t
  misc_feature (183)..(183): n is a, c, g, or t
  misc_feature (193)..(193): n is a, c, g, or t
  misc_feature (287)..(287): n is a, c, g, or t
  misc_feature (302)..(302): n is a, c, g, or t
  misc_feature (317)..(317): n is a, c, g, or t
  misc_feature (1065)..(1082): n is a, c, g, or t
ggatngntattgaccagcnacngntngccggttcagganncgcaagnggagagangtgtgngttgaaggagccngcacgaccnntgaacgcctcaagtgacccncgncctttctgccctcctccatnctnccgngcgaccattcccccccancnnggcctctgtgtgaccacctgcgccgccngttctccgcnactcactagctgtggtggcgccaatttagaggtttacaaacaaacaggttgaaggaatagccctccaatcaatgatcagttctagaagaggggntgagatgctgtcttntcacactgtacctgnacagtcacatgatatgttggtgcatgtagacaatgaagcatcaatcaaccaaacaaccctggagctgagcacaaagagtcatgtgacggaagaggaggaggaggaagaggaagaagaatcagattcctaaaggagggggaaagccaggctggtcagttatacaaattgcatttctaaggctcaggctacttctcctcaaggaaatcatcttgccctgggccctgtgatctgcttgaaaggaaagcaagaactataaggaggatgtgtagttgcaaaaatggctccatcggtaactcaagcttcagaatgttatgacatacagaaaatcaaagatgctgtgtcttagcattgagtaatatgggtggtgctgtctgtaatctggtcagattcagttaactgttcagaacaaaatttcctctgaaatactgttgagaaagtctgtcatttgcaaaaagagcagagtttaaatacaagccagtctttccagtcaacaatgcctctttgaagaaaaccaattaaagactgtttgcatgccgctgaacccttgtgagcagttaggacacagtctaggacagaaagatgacaaggggaaggactgagggccatctgagagcacaagctgtttctacctctcagaggcattgaaatattgcatgctataaactgctttgtgtatctgttaccacctctcacttgagacatcactcactggtaaaatgttttataaataaattataagtagccatcnnnnnnnnnnnnnnnnnnctcgaggcatctatgccggggtgcggacaaagaggaaatgaaatggcacttggccatagctgtctcctgacccagctttcctggtaaaagagggaaaattgcccggcccccctatagtgcgtccttacctactttcccataccccaggctatcctgctttaattgaaccccctggaaacccccgcacaattatcccactcacaggagccggacctctcctccacagaccccaagcaaccctcctaacacaccccttgcaacccctagctttcgtccggtccctgccgccggataaaatatgcgcctcccttatgcgctttagtctcctaaactcatttgtcgctgcctctgcaatccaccgtactagatctccaccataactcttgcagtgacgttgtaaccatgtcaccatctgaacccaacaccactaccctcaccactcgatattgctgctcactaatcgccttacgacatgctccgacctgctcaatcacagcgctctcctgaaagaaggcctacatcccatcacgacaatggcgggcctgcccccctcgcgcgcgtccctacccgt

SEQ ID NO: 355918 - DNA, 1066 bp, Homo Sapiens
gttcctgggatgaaagaactcatattaatccagctcctgactcctaaaaaaacagtaactcttgtaattaaaatgggcagagtccatcaagaagcagtgtccagaagcactgggccatgtggcgagcagcagtgtcaccaggaaacatgccgagctgggtcaggaactgcgcaaggaggaggagacactgctcctgttgaaggcagccctcgcatgacctgctgaatcacatcaaggttgaagcattggccctccaatcaatgattagttctgggagaggggatgaggtgctgtcttctccaacttctccaactgtgcctgaacagtcacacgtcatgtcagtgcatatagagaatgaagcatcagtcaaccaaactacgctggagtggagcatagagtcctgtgacagaagaggaggaggaagagaaagaagaatcagatccctaaaggagggaaaaagccaggattcattatacaaattaaatttctaagtctcaggctctttctccccaaggaaatcatcttgccatgagccctagggcctgcttgaatggagagcaagaactataggaggatgtgtagctgcaaaaatttctcatcaataactcaatcttcagaacgttatgacatacagaaaatccaagatgctgtgtcttagcattgagcaatatgggtggtgctatgtctgtagtctggtcaaattcagtaactgtgttcaaaacaaaatttcctctggaatactattgagaaaatctggcatttgcaaaaagggcagagtttaaatatgagccagtctttccaatcaacaatacctcttttaagaaaaccaactaacagctgtttgcatgccgttgaatccttgtgagcagttaggccacagtctaggacagaaagatgacacggggaaggactgagggccatctgagaacaaaagttgttgctacttctcagaggcattgagacacactgcatgctgtagactgctttgtgtaactgttatcacatcttgcttgagatgtcattggcagaatgttcttaaaaataaattatagataaatagccaaaa

SEQ ID NO: 355919 - DNA, 1613 bp, Homo Sapiens
  misc_feature (899)..(899): n is a, c, g, or t
  misc_feature (930)..(930): n is a, c, g, or t
  misc_feature (936)..(936): n is a, c, g, or t
  misc_feature (956)..(956): n is a, c, g, or t
  misc_feature (1067)..(1067): n is a, c, g, or t
  misc_feature (1105)..(1105): n is a, c, g, or t
  misc_feature (1124)..(1124): n is a, c, g, or t
  misc_feature (1216)..(1216): n is a, c, g, or t
  misc_feature (1508)..(1508): n is a, c, g, or t
  misc_feature (1517)..(1518): n is a, c, g, or t
  misc_feature (1526)..(1526): n is a, c, g, or t
  misc_feature (1528)..(1528): n is a, c, g, or t
  misc_feature (1534)..(1535): n is a, c, g, or t
  misc_feature (1537)..(1538): n is a, c, g, or t
  misc_feature (1540)..(1540): n is a, c, g, or t
  misc_feature (1542)..(1542): n is a, c, g, or t
  misc_feature (1551)..(1552): n is a, c, g, or t
  misc_feature (1559)..(1559): n is a, c, g, or t
  misc_feature (1574)..(1574): n is a, c, g, or t
  misc_feature (1577)..(1577): n is a, c, g, or t
  misc_feature (1587)..(1588): n is a, c, g, or t
  misc_feature (1603)..(1603): n is a, c, g, or t
  misc_feature (1608)..(1608): n is a, c, g, or t
cctgctgctgcgtccgccggcagaagtttaaccaagagtataaagcctaaagaagccgggagacactctaggtcagtgggggagcctgaggtacagagaagagtgaggactgactcaaggtcacacagtgatccgggatcccagaactctggtctccaaattacagcccaggacacctttctctgccgcctgctgcatcagtgggtgacccccttcccgggctgcactttgggtccagctgtggaagccagaagttgggcggtttcagggacagccgagaataatgttgacctgtcagatcaacaaatcttcactgagcatgtattttgtgccacaccctgctctgggcactgggaatgctgggaaatgagatacattcccgccctcaagaatctcccagtctggtaggagagagtgctgcagagccacgtggccgccacgcagtgtgcttagggcctgaggtgtgaaagcccagggctccagagctcggcaggccccgctggtttggtgtggtgagtcctgccccggctgtgccagggtgagggagggccaagcccaggaggatttgtctgagacatttccaagcagactgtttgtcacgtcttctgataatgactttcagtctctctgaaaaatgaaaagcttaggaccggaagagagaattggagctgtacgagtgtgtctcggatctggtgtcgacaggtgagagccacggcggctcaagcaagagtctggttaaaggggtccagaccagcactggaccataccgttctcctgctctggcacttgccctcctcccttcctggcactctcaatgttgcataccctgaccccagtgctgctctaagcaccgtccctgcccagccccacttctccatcgcagccccaccttggctgcngagccaggagctaaaaccttagatatctggntctgtnttgcacccagcttggcagangtggatttgaatccaagccttgtgtctgcccctatgtgacagcactatattttatccccgttttataaaagaggaaactgaagtgctgaaaatctccttccagggccccanctaactaatgccataggtgagattcaaaccttcatccntctgtctccagggcctganctttaccactgcaggggctgcaggccgtataagtggacaggaagtggccccacatagcccgagcagggtctggaagcatcctgtgctgtgcnacctgctctctcctctctcccaggcaggcagctgcaggcgctctcctccttctctgcctgtttccctcctcccttcctttccaccctggtgtgggttctcctgttctctctgtgctcttgcattctctcattcccttttcctctattgagcagagcctggagtttgagactatggaatccaacctccccattgcacagatggggaaactgaggcttaggaagagaatgaaacttgtggaagagcttatacagagcctctgggggaaaaaagagcccttatttgtgggggganattgggggnnggacagangntgtgcnncnncncnatcacatcnnagataangtggctccaaattcnttntgtgctcacnngcaagatttttttcncttanaaaaa

SEQ ID NO: 355920 - DNA, 1118 bp, Homo Sapiens
  misc_feature (16)..(16): n is a, c, g, or t
  misc_feature (32)..(32): n is a, c, g, or t
  misc_feature (37)..(37): n is a, c, g, or t
  misc_feature (50)..(50): n is a, c, g, or t
  misc_feature (58)..(58): n is a, c, g, or t
  misc_feature (61)..(61): n is a, c, g, or t
  misc_feature (63)..(64): n is a, c, g, or t
  misc_feature (80)..(80): n is a, c, g, or t
  misc_feature (149)..(149): n is a, c, g, or t
  misc_feature (169)..(169): n is a, c, g, or t
  misc_feature (184)..(184): n is a, c, g, or t
  misc_feature (198)..(198): n is a, c, g, or t
  misc_feature (230)..(230): n is a, c, g, or t
  misc_feature (293)..(293): n is a, c, g, or t
  misc_feature (301)..(301): n is a, c, g, or t
  misc_feature (305)..(305): n is a, c, g, or t
  misc_feature (353)..(353): n is a, c, g, or t
  misc_feature (363)..(413): n is a, c, g, or t
tttataaagagaaatnaagtctgaaatctctnccagncccagttactaanccatagtnaantnnaaccttcaccttcttntccaggcctgtttttaccactgcagggctgcagccgttaagtgaacaggaagtgccccacatagcccgngcaggtctggaagcatcctngctgtgcacacctgntctctcctttctcncaggcaggcagctgcaggcgctctcctccttntctgcctgtttccctcctcccttcctttccaccctggtgtgggttctcctgttctctctgtgntcttgcantctntcattcccttttcctctattgagcagagcctggagtttgagactatgnaatccaaccnnnnnnnnnnnnnnnnnnnnnnnnnnnnnnnnnnnnnnnnnnnnnnnnnnntggagagcttatacagagcctctgggggaaaaaagagcccttatttgtggggtgagattgggggttggaccagagtgatgtcctctctcagctatcacatcacaagataatgctggctccaaacttcctttctgtgcctcatcatgcaaggttcttttttccctcttacaaaaacaggtaaaaagcctcacccagatgacccccatccctcataccatggagtcatgagctgtctgggatagaatggacgtgctgggatccaacttcaagaccttgttttgctgtcttctatcatcttatctctgtgcttggcccacagtctggctcatgatgtgggctcagtaatgtgcgagaaagtgaaaatgccactctctccaccccattttacagaggagaacaccaaggcccagaggaagttaagggagagtcaatgggcagagtccagggctaggccctggtggtgtgtggagcacccaggcagacccagtcctggttgggatcacacccacgggtgctactgcacgtaacactcctccttaggcctggaggccaaggtgtgggtccccacgcctgatctttgaaaacactacacagggctgctgtcacttcccagggcccaggccgcagcccaggcctcgggaccaactctttgtaattaacccctaccctgacagtgtatttacaaaacctaaatttttgggagac

SEQ ID NO: 355921 - DNA, 1118 bp, Homo Sapiens
  misc_feature (687)..(687): n is a, c, g, or t
  misc_feature (958)..(958): n is a, c, g, or t
  misc_feature (974)..(974): n is a, c, g, or t
  misc_feature (1008)..(1008): n is a, c, g, or t
  misc_feature (1026)..(1026): n is a, c, g, or t
  misc_feature (1041)..(1041): n is a, c, g, or t
  misc_feature (1045)..(1045): n is a, c, g, or t
  misc_feature (1048)..(1048): n is a, c, g, or t
  misc_feature (1051)..(1051): n is a, c, g, or t
  misc_feature (1057)..(1057): n is a, c, g, or t
  misc_feature (1065)..(1065): n is a, c, g, or t
  misc_feature (1076)..(1076): n is a, c, g, or t
  misc_feature (1080)..(1080): n is a, c, g, or t
  misc_feature (1090)..(1090): n is a, c, g, or t
  misc_feature (1093)..(1093): n is a, c, g, or t
  misc_feature (1095)..(1095): n is a, c, g, or t
  misc_feature (1101)..(1101): n is a, c, g, or t
  misc_feature (1107)..(1107): n is a, c, g, or t
  misc_feature (1111)..(1111): n is a, c, g, or t
cgggatcactccgctcggctcaccatgtgtcactctcgcagctgccacccgaccatgaccatcctgcaggccccgaccccggccccctccaccatcccgggaccccggcggggctccggtcctgagatcttcaccttcgaccctctcccggagcccgcagcggcccctgccgggcgccccagcgcctctcgcgggcaccgaaagcgcagccgcagggttctctaccctcgagtggtgagtatcgccgaagtgggcattcgcggggtgcgctgccctggagtcactggggaacgacccgactccagaggcctcgacctgacctgtctcctgttttgtctccccttaggtccggcgccagctgccagtcgaggaaccgaacccagccaaaaggcttctctttctgctgctcaccatcgtcttctgccagatcctgatggctgaagagggtgtgccggcgcccctgcctccagaggacgcccctaacgccgcatccctggcgcccacccctgtgtcccccgtcctcgagccctttaatctgacttcggagccctcggactacgctctggacctcagcactttcctccagcaacacccggccgccttctaactgtgactccccgcactccccaaaaagaatccgaaaaaccacaaagaaacaccaggcgtacctggtgcgcgagagcgtantccccaactgggacttccgaggcaacttgaactcagaacactacagcggagacgccacccggtgcttgaggcgggaccgaaggcgcacagagaccgaggcgcataagagaccgaggcaccagcccagctggggctaggcccggtgggaaggagagcgtcgttaatttatttcttattgctcctaattaatatttatatgtatttatgtacgtcctcctaggtgatggagatgtgtacgttatatttattttaacttatgcaagggtgtganatgttcccctgctgtnaatgcaggtctcttggtatttattgagctttgtngggctggtggaagagggnacttggaactgcggnaaantanganaaaaanggggaggntcgggtggggnggantccggctggnatnantttggngtggtntaanttagagg

SEQ ID NO: 355922 - DNA, 1506 bp, Homo Sapiens
  misc_feature (1228)..(1228): n is a, c, g, or t
  misc_feature (1230)..(1348): n is a, c, g, or t
  misc_feature (1405)..(1445): n is a, c, g, or t
ctccgctcggctcaccatgtgtcactctcgcagctgccacccgaccatgaccatcctgcaggccccgaccccggccccctccaccatcccgggaccccggcggggctccggtcctgagatcttcaccttcgaccctctcccggagcccgcagcggcccctgccgggcgccccagcgcctctcgcgggcaccgaaagcgcagccgcagggttctctaccctcgagtggtccggcgccagctgccagtcgaggaaccgaacccagccaaaaggcttctctttctgctgctcaccatcgtcttctgccagatcctgatggctgaagagggtgtgccggcgcccctgcctccagaggacgcccctaacgccgcatccctggcgcccacccctgtgtcccccgtcctcgagccctttaatctgacttcggagccctcggactacgctctggacctcagcactttcctccagcaacacccggccgccttctaactgtgactccccgcactccccaaaaagaatccgaaaaaccacaaagaaacaccaggcgtacctggtgcgcgagagcgtatccccaactgggacttccgaggcaacttgaactcagaacactacagcggagacgccacccggtgcttgaggcgggaccgaggcgcacagagaccgaggcgcatagagaccgaggcacagcccagctggggctaggcccggtgggaaggagagcgtcgttaatttatttcttattgctcctaattaatatttatatgtatttatgtacgtcctcctaggtgatggagatgtgtacgtaatatttattttaacttatgcaagggtgtgagatgttccccctgctgtaaatgcaggtctcttggtatttattgagctttgtgggactggtggaagcaggacacctggaactgcggcaaagtaggagaagaaatggggaggactcgggtgggggaggacgtcccggctgggatgaagtctggtggtgggtcgtaagtttaggaggtgactgcatcctccagcatctcaactccgtctgtctactgtgtgagacttcggcggaccattaggaatgagatccgtgagatccttccatcttcttgaagtcgcctttagggtggctgcgaggtagagggttgggggttggtgggctgtcacggagcgactgtcgagatcgcctagtatgttctgtgaacacaaataaaattgatttactgtctgcaaaanannnnnnnnnnnnnnnnnnnnnnnnnnnnnnnnnnnnnnnnnnnnnnnnnnnnnnnnnnnnnnnnnnnnnnnnnnnnnnnnnnnnnnnnnnnnnnnnnnnnnnnnnnnnnnnnnnnnnnncctttgggggggcgcccccgggccccccaaaaaaactttcttaaacacttttctttnnnnnnnnnnnnnnnnnnnnnnnnnnnnnnnnnnnnnnnnnctactacctggttttccccaggaaaaacccgcggggcagggaaccaaagggcggggggatt

SEQ ID NO: 355923 - DNA, 1837 bp, Homo Sapiens
  misc_feature (16)..(16): n is a, c, g, or t
  misc_feature (23)..(23): n is a, c, g, or t
  misc_feature (132)..(183): n is a, c, g, or t
  misc_feature (1219)..(1219): n is a, c, g, or t
  misc_feature (1329)..(1329): n is a, c, g, or t
  misc_feature (1352)..(1352): n is a, c, g, or t
  misc_feature (1393)..(1393): n is a, c, g, or t
  misc_feature (1399)..(1399): n is a, c, g, or t
  misc_feature (1458)..(1458): n is a, c, g, or t
  misc_feature (1477)..(1478): n is a, c, g, or t
  misc_feature (1498)..(1498): n is a, c, g, or t
  misc_feature (1513)..(1513): n is a, c, g, or t
  misc_feature (1545)..(1545): n is a, c, g, or t
  misc_feature (1589)..(1589): n is a, c, g, or t
  misc_feature (1592)..(1592): n is a, c, g, or t
  misc_feature (1596)..(1597): n is a, c, g, or t
  misc_feature (1601)..(1601): n is a, c, g, or t
  misc_feature (1603)..(1604): n is a, c, g, or t
  misc_feature (1621)..(1621): n is a, c, g, or t
  misc_feature (1628)..(1628): n is a, c, g, or t
  misc_feature (1636)..(1636): n is a, c, g, or t
  misc_feature (1639)..(1639): n is a, c, g, or t
  misc_feature (1665)..(1665): n is a, c, g, or t
  misc_feature (1675)..(1675): n is a, c, g, or t
  misc_feature (1682)..(1682): n is a, c, g, or t
  misc_feature (1684)..(1684): n is a, c, g, or t
  misc_feature (1692)..(1692): n is a, c, g, or t
  misc_feature (1697)..(1697): n is a, c, g, or t
  misc_feature (1714)..(1714): n is a, c, g, or t
  misc_feature (1823)..(1824): n is a, c, g, or t
  misc_feature (1834)..(1834): n is a, c, g, or t
tgcaggctgtacgccncgagtantggatggtggccagagcaaggcaagtttcgcccgggacccgcccagtctggccgggagccaggtagcagggaagggccggctggcgcgagcaccgccacgcggagccannnnnnnnnnnnnnnnnnnnnnnnnnnnnnnnnnnnnnnnnnnnnnnnnnnnaggcagcatgctaaaccgggtgcgctcggccgtggcgcacctggtgagctccgggggcgctccgcctccgcgccccaaatccccggacctgcccaacgccgcctcggcgccgcccgccgccgctccagaagcgcccaggagccctcccgcgaaggctgggagcgggagcgcgacgcccgcgaaggctgttgaggctcgagcgagcttctccagaccgacctttctgcagctgagccccggggggctgcgacgcgccgatgaccacgcgggccgggctgtgcaaagccccccggacacgggccgccgcctgccctggagcacaggctacgccgaggtcatcaatgctggcaagagtcggcacaatgaggaccaggcttgctgtgaagtggtgtatgtggaaggtcggaggagtgttacaggagtacctagggagcctagccgaggccagggactctgcttctactactggggcctatttgatgggcatgcagggggcggagctgctgaaatggcctcacggctcctgcatcgccatatccgagagcagctaaaggacctggtagagatacttcaggacccttcgccaccacccctctgcctcccaaccactccggggaccccagattcctccgatccctctcacttgcttggccctcagtcctgctggtcttcacagaaggaagtgagccacgagagcctggtagtgggggccattgagaatgccttccagctcatggatgagcagatggcccgggagcggcgtggccaccaagtggagggggggctgctgtgcactggttgtgatctacctgctaggcaaggtgtacgtggccaatgcaggcgatagcagggccatcattgtccggaatggtgaaatcattccaatgtcccgggagtttaccccggagactgagcgccagcgtcttcagctgcttggcttcctgaaaaccagagctgctaggcagtgaattcacccaccttgagttcccccgcagagttctgcccaaggagctgaggcagaggatgttgtaccggnaccagaacatgaccggctgggcctacaaaaagatcgagctggaggatctcaggtttcctctggtctgtggggagggcaaaaaggctcgggtgatggccaccattggggtnacccgacgcttgggagaccacanccttaaggtctgcagttccaccctgcccatcaagccctttntctccngcttccctaaggtacgagtgtatgacctgacacaatatgagcactgcccagatgatgtnctagtcctgggaacagatnncctgtgggatgtcactactnactgtgaggtagctnccactgtggacagggtgctgtcggcctatgancctaatgaccacagcaggtatacagctctggcccaagctctggnccngggnncccngnntaccccccgagaccgtngctggcntctccccnacnacaagctgggttccggggatgacatntctgtcttcntcatccncntgggaggnccatntatttactcttgagggnttgaactccattcctccttctagcctctccattttactcctctcacagcccaaattctgaagttgtctccctgacccttctttagtggcaacttaactgaagaaggganntccgctatancca

SEQ ID NO: 355924 - DNA, 1167 bp, Homo Sapiens
  misc_feature (858)..(858): n is a, c, g, or t
  misc_feature (908)..(908): n is a, c, g, or t
  misc_feature (913)..(913): n is a, c, g, or t
  misc_feature (1005)..(1005): n is a, c, g, or t
  misc_feature (1015)..(1015): n is a, c, g, or t
  misc_feature (1017)..(1017): n is a, c, g, or t
  misc_feature (1024)..(1024): n is a, c, g, or t
  misc_feature (1049)..(1049): n is a, c, g, or t
  misc_feature (1102)..(1102): n is a, c, g, or t
  misc_feature (1104)..(1104): n is a, c, g, or t
ggtccggaattcccgggatggccttcctccagttccctgcctctgatattgactaagccacgggactgttggcacatctcctctccgcatttggagtatcgtcttcataatgctaatttccatgcagctccttccatagccatttggtcttatgaaacttggcaggtctgaatttggatttgactttttctatgtggttggtgatatggcacttatagttacctgaaagttctttgacactggtgggacctgcccaatcaaaacagatgcaagagtgtttttccttcttggtcgtagaaagcatttgaggtggaacgccaagagctactggccagtaataagaagaaatgggagcaagcccttcaggctcataatgccaaagagctggagtatcttaacaaccgcatgaagaaagtagaggactatgagaagcagctgaacaggcagaggatctgggattgcgaagaatacaacatgatcaagatcaagctggagcaggatgtgcagattcttgagcagcagcttcagcagaggaaagcaatttatcagctaaaccaagagaaattagagtacaacttgcaggtggctgaagaagagagatgaagaaagcacagtaattaaatcccagcagaagaggaagatcaatcgcctggcatgatatacttaacaatctgagatcaaaatatgccaagcaaataaagcagtttcagcgaggagaaccagtctctaagcctccggcacctacacaacagtcttagtgcatgctaattcaaggacgctacagaaagcgcgatgaggcattttgctcattatctcgcatgatgagaagatgtatacgcggagagtgtatgagctgangaatgaagaggaggcgaaggcacctaatagccagagcctttgcatgtggncaggntcatccacacccatcatctggggcttccctgggcagcacctgatttctggttcctgaacaatgttgggcctatttctcagtatcccaaaaantccgccaaananatagtanaagaaatgcttatgcgctcagacanaggaggaggcagaagaggccgccgcggaaccagagtcctagcgtggatttggngnagcaaatttctgaaaaaacataccaagatgatcactgtatgctcctgtgatgtacgagatcgg

SEQ ID NO: 355925 - DNA, 1544 bp, Homo Sapiens
  misc_feature (76)..(76): n is a, c, g, or t
tcgtccctgttggaggcaagggtctgcccccagctcttacttaaggagcgggacgggggacgagagcgtgcgcggncgtcacacgcacgcttagccaccccccaagaagccgccgccgcgctcaagctccgcgcgctcaggaccaggtagcgtgtagctgtcgtgaagctccctttgctccggttgggactggctgcggatacctgtccgttatccccggcaccaatgagagggacgaacaggaccacctgcaccgcccaccaccctcgctaacaacgctttaaggcctaacgcaggcggcagctggtgcgaatttacaaatcgggtttttcacccccgcgtggctgcaatgtccgcccagttcgagccccacattctcccgctggctccgcctgggggtcgggccaactcttgctgctaaggaagcctcaccagtccccttcccgtttgctacctaaatgtcctcggcgggaaactgctgagaacaatttggggaagcctgaacttgttcctagttccgcgctttattacttgtgatcatgactggtcaaaactccgcccggagcctccatttgttcatctgaaaaatggggttgagaagctcaagtaccagaatgtgaaaacgctttctaaaggcgaaggcatggtatcttgtgagatagtaattccttcaaactcacgcataggctattcctattcctaactttgcgatctgctttcactaggcaatccctttccctttgtatccttataattttcacctatagattttaacccccagggttttttaatgccctctgaacattatttccatttcagttaagcttgtctggccaaatttggttgtcctccagagtctgacctctttttgcttggcgcttgtttcaccaggttgaagtggtcctttaggtctcagtttttcccgtatggggtgctttacttaaaccaaggtgcctcggggccagtgctagtttcctagatactggaggaaagcaagcaaggaaggagtagagaatccagtcacttgacttcattatcctcttcaaaccgaaattttgaaggacaaggaaaagtttcaaggctgcagcctttcacagtcctctgagggacaaaactcaaatatagttcttgccttgaaggtggtcacaaacaaaaagggtaaatgatcctaaggtttaaatatagacctaaaagagagatatatacaatggaaatttaatcttgtaattctttgcaggcagcagtaatttataggttaaagtcctggttgtagtttaattataaaatatgttcttttattagtatttatcactatggtgacttctttagccaaagagtatctaaactgaactctcagagctaacagaagtaactatgttgcagtgagagcaacagtcctgggtctctacctcttgttttctatgtgaccttggcaattcaaccaacatctttgaggctgtatatttttggtaaggaatggaaagaacatatggcaacagggatttgtaaagtaccgtataaatatatatatttaaattaaaaaa

SEQ ID NO: 355926 - DNA, 1101 bp, Homo Sapiens
aatttggtcttcttggttctactgagtgggcagaggagaattcaagactccttcaagagcgtggcgtggcttatattaatgctgactcatctatagaaggaaactacactctgagagttgattgtacaccgctgatgtacagcttggtacacaacctaacaaaagagctgaaaagccctgatgaaggctttgaaggcaaatctctttatgaaagttggactaaaaaaagtccttccccagagttcagtggcatgcccaggataagcaaattgggatctggaaatgattttgaggtgttcttccaacgacttggaattgcttcaggcagagcacggtatactaaaaattgggaaacaaacaaattcagcggctatccactgtatcacagtgtctatgaaacatatgagttggtggaaaagttttatgatccaatgtttaaatatcacctcactgtggcccaggttcgaggagggatggtgtttgagctagccaattccatagtgctcccttttgattgtcgagattatgctgtagttttaagaaagtatgctgacaaaatctacagtatttctatgaaacatccacaggaaatgaagacatacagtgtatcatttgattcacttttttctgcagtaaagaattttacagaaattgcttccaagttcagtgagagactccaggactttgacaaaagcaacccaatagtattaagaatgatgaatgatcaactcatgtttctggaaagagcatttattgatccattagggttaccagacaggcctttttataggcatgtcatctatgctccaagcagccacaacaagtatgcaggggagtcattcccaggaatttatgatgctctgtttgatattgaaagcaaagtggacccttccaaggcctggggagaagtgaagagacagatttatgttgcagccttcacagtgcaggcagctgcagagactttgagtgaagtagcctaagaggattctttagagaatccgtattgaatttgtgtggtatgtcactcagaaagaatcgtaatgggtatattgataaattttaaaattggtatatttgaaataaagttgaatattatatatt

SEQ ID NO: 355927 - DNA, 1970 bp, Homo Sapiens
  misc_feature (453)..(503): n is a, c, g, or t
  misc_feature (1951)..(1951): n is a, c, g, or t
gccacagcccagctgttccctccgcggattctccggggctggttcatcacctccgaatattcctgtgacaggagacgcttgcaaaacccgcctccagcctccagcagcaaataaatagaaggcttgcagcccagaaggagccagaagaagtttctaggcgcgcgtgccctgggtttattaagctcctggctccgctctagacctcagcggttctggctgccagcctgggcagcctgggaagcctgggaggacggtggcttgccggtctgtcgtgaggcagtgcggacggggaccctctgggattctgctggatctgccccgggggttacctttgggggctgggaccccagtcgaggggacacaaccgtccctggcagtggttggttctgcttctccctgcagaaaagcagcattttcggaagctgaagaataagctagcccagccacaccgcnnnnnnnnnnnnnnnnnnnnnnnnnnnnnnnnnnnnnnnnnnnnnnnnnnntctctgagctgagcagccaccatggctgacggtcagatgcccttctcctgccactacccaagccgcctgcgccgagaccccttccgggactctcccctctcctctcgcctgctggatgatggctttggcatggaccccttcccagacgacttgacagcctcttggcccgactgggctctgcctcgtctctcctccgcctggccaggcaccctaaggtcgggcatggtgccccggggccccactgccaccgccaggtttggggtgcctgccgagggcaggagccccccaaccttccctggggagccctggaaagtgtgtgtgaatgtgcacagcttcaagccagaggagttgatggtgaagaccaaagatggatacgtggaggtgtctggcaaacatgaagagaaacagcaagaaggtggcattgtttctaagaacttcacaaagaaaatccagcttcctgcagaggtggatcctgtgacagtatttgcctcactttccccagagggtctgctgatcatcgaagctccccaggtccctccttactcaacatttggagagagcagtttcaacaacgagcttccccaggacagccaggaagtcacctgtacctgagatgccagtactggcccatccttgttttgtccccaaccctagggcttctctgattccaggatacattactttagctgaactcagatttagtgcaagtaaaatgttagagggtgcgggggtgaggactgaccacagattccctggatagtgtagtggtagatttctccacaggatagcgcaattggcaaatcatgcttggttgtgttaggccaaaatactagttttgctttctttaccttttctatcttgatgaaaatgttgcacattctatagtggcaaaacacataaaaggggacttaacatttcacgttgtatctaacttgcagtgaatgcaagggaaacttttctctggggacctcccccatcacccaggttcctactctgggctcccgattcccatggctcccaaaccatgccgcatggtttggttaatgaaacccagtagctaaccccactgtgcttccacatgcctggcctaaaatgggtgatatacaggtcttatatccccatatggaatttatccatcaaccacataaaaacaaacagtgccttctgccctctgcccagatgtgtccagcacgttctcaaagtttccacattagcactccctaaggacgctgggagcctgtcagtttatgatctgacctaggtcccccctttcttctgtcccctgtgtttaagtcgggatttttacagagggagctgtctccagacagctccatcaggaaccaagcaaaggccagatagcctgacagataggctagtggtattgtgtatatgggcgggacgtgtgtgtcattattatttgagttatgctgttgtttaggggtaaatanacagtaaataattaataat

SEQ ID NO: 355928 - DNA, 957 bp, Homo Sapiens
  misc_feature (227)..(291): n is a, c, g, or t
ctggctgccagcctgggcagcctgggaagcctgggaggacggtggcttgccggtctgtcgtgaggcagtgcggacggggaccctctgggattctgctggatctgccccgggggttacctttgggggctgggaccccagtcgaggggacacaaccgtccctggcagtggttggttctgcttctccctgcagaaaagcagcattttcggaagctgaagaataagctagnnnnnnnnnnnnnnnnnnnnnnnnnnnnnnnnnnnnnnnnnnnnnnnnnnnnnnnnnnnnnnnnntctctgagctgagcagccaccatggctgacggtcagatgccccttctcctgacactacccaagcctgcctgcgccgagacccccttccgggactctcccctctacctctcgcctgctggatgatggctttggccatggacccccttcccagacgacttgacagcctcttggcccgactgggctctgcctcgtctctccctccgcctggccaggcaccctaaggtcgggcatggtgccccggggcccactgccaccgccacggtctggggtgcctgccgagggcaggaagccgccccaaccttccctggggagacctggaaagtgtgtgcgaactgtgcacaggcttcaagccagaggagtagatggtgaaagaccaaagatgcgatacgtggaggtgtctggcaaacatgaagagaaaccagcaagaaggtgggcatgtttctaagaacttcacaaaagaaaaatccaggcttcctgctggaggtggatcctgtgacagtattttggctcactttccgcagagggtctgctgaatcattcggaagtccccaggtccctccttactcacaatttggagagaagcggtttcaacaacggagctttcccacggaccagcccaggagtccccgtactgagatgcagtactggccatctgttttgcccaac

SEQ ID NO: 355929 - DNA, 1012 bp, Homo Sapiens
  misc_feature (570)..(634): n is a, c, g, or t
tgctctctccaaatggggataaggaggacctggggagctttcgatgatcagcagaccctctggggaagtggagccaaatgctggtcacagatccacctctgcagcaagctgaattttctttgcgaagttcctttagcgacattgccaccgtccttgcctgtttctgcgtcatgtttgccagacacctgccacgtatccatctttggtcttcaccatcgactcctctggctttgaagcctgtgcacattcacacacactttccagggctccccagggaaggctggggcgctcctgccctcggcaggcacccctaacctggcggtggcagtggggccccggggcaccatgcccgaccttagggtgcctggccaggcggaggagagacgaggcagagcccagtcgggccaagaggctgtcaagtcatctgggaaggggtccatgccaaagccatcatccagcaggcgagaggagaggggagagtcccggaaggggtctcggcgcaggcggcttgggtagtggcaggagaagggcatctgaccgtcagccatggtggctgctcagctcagagannnnnnnnnnnnnnnnnnnnnnnnnnnnnnnnnnnnnnnnnnnnnnnnnnnnnnnnnnnnnnnnnctagcttattcttcagcttccgaaaatgctgcttttctgcagggagaagcagaaccaaccactgccagggacggttgtgtcccctcgactggggtcccagcccccaaaggtaacccccggggcagatccagcagaatcccagagggtccccgtccgcactgcctcacgacagaccggcaagccaccgtcctcccaggcttcccaagctgcccaggctggcagccagaaccgctgaggtctagagcggagccaggagcttaataaacccagggcacgcgcgcctagaaacttcttctggctccttctgggctgcaagccttctatttatttgctgctggaggctggaggcgggttttgcaagcgtctcctgtcacagga

SEQ ID NO: 355930 - DNA, 1790 bp, Homo Sapiens
ggagacaatgacaacggcagccgccattttattgccaatcagccatgagccccgccttccatacacaatgacatttcatccccacaatcgattaccacaaccatgatagccatgaactcccaactcctccagctgctagtgctcaacggagagagtcccctccaggtctgtctcattgcagagcccatattctttctgcctggccagcagttactctcctcaatgagcaggcactggtgcagtcttgggtgggcaccagtcacccctatggaaatccttgatggatgttacaggacaggattggatgtgaggggtcttggaaatggggctcaagaatcttcatcatgaggcgtttctgcgcctactgacctgagatacagagaggaagttccatggacaccaacacccagttccaaggaggcacacattaaccttcccatgatgtggatgtgtgggaacacatgggcttttaatcacacgccatgcaatccacagaagagctgacccagcctgggggcatacacgcactcatgtgtactcaacgttcacatgcactcacaccctggctcggctctggggacgctgaggccgctgtgagaagaaggacggctctggctccgtcagatgaggctggcaatgctggatgtggtctcgtgacgccggccagcagacaactgtcctgagatgctgaagatgctgccaatggccgccatggccactgtgggtggagggagtggccatacagatggaggggcagtgtccgctcacacccacttgatacagcagcaggcccagcagcaaaagcgagcccaaggcagccagagcaatgcccacagacagcatggcggccagcggccgagcaggggcaggggcggcggccagcccggccagggtcaggccggtgaccagcagcacgaggccactgagcagcaccacgagggcgtcggcccctccaccactgcgcagcagggccacatggtgggcctggcggatgcagttcatgtcctgcacagccgagctcatcagctgtttcaccagaaccagcagagccagcaaacagagcacagtgcccgttgctagccgccattcacctgagcggctgctggtggttgacagcagtgccacgccgcccgcgccacagcctgccacgaggcccacggccacgacgaagcagagcgccgagcgccgcggctgctgggaccaccacagctccacctgctctgccagcatgtccgggggcagcccccggccccctggggcttgagcctcctgttcagacatggcttggtcaggcaggggtcagggtaggaggtcaatgtcaggggtcagagggtgcagatcacagcctggagcacctgccacctgcttggcagctacaggcccagagtcccattcctctcacagtccaggatatggtcaccctcacctctctgcctctggctctctcagtcgctggtcccatcccggctggctgagggagctggtgccacggtggacgatgggacgaacagccagagataaagcctcattcaggatcctactcacatggcctcagctgtcaccactggttcctcgggaggaggagaagcctggatgtgctggatccgatccgagaaggcagggccgagcaggtggggcactctagcttggtttccggggagacacttcacctgcctaacctgcactcaggtgagcctccatcccttggccctaggctgcagcctccaaaagccccgtgctcattctccctcaaatgcctggcttgccccacagactggatcctactgggg

SEQ ID NO: 355931 - DNA, 1762 bp, Homo Sapiens
agcggggcgtgtgctttagttgcagtggaaaggaaatgtgtcatctgtggtttggttttaaaagtggaaaactagctgcacatatccttttttactgcagatttactttaaggctcatattctccaagtctattctgctttaaaaagaagacaagaaaagaagtggtttatcaaaatcacgttataatcagattttgaccaagcattttgtaagattgccaagtatgcccacggacatggaacacacaggacattacctacatcttgcctttctgatgacaacagttttttctttgtctcctggaacaaaagcaaactatacccgtctgtgggctaacagtacttcttcctgggattcagttattcaaaacaagacaggcagaaaccaaaatgaaaacattaacacaaaccctataactcctgaagtagattataaaggtaattctacaaacatgcctgaaacatctcacatcgtagctttaacttctaaatctgaacaggagctttatataccttctgtcgtcagcaacagtccttcaacagtacagagcattgaaaacacaagcaaaagtcatggtgaaattttcaaaaaggatgtctgtgcggaaaacaacaacaacatggctatgctaatttgcttaattataattgcagtgctttttcttatctgtacctttctatttctatcaactgtggttttggcaaacaaagtctcttctctcagacgatcaaaacaagtaggcaagcgtcagcctagaagcaatggcgattttctggcaagcggtctatggcccgctgaatcagacacttggaaaagaacaaaacagctcacaggacccaacctagtgatgcaatctactggagtgctcacagctacaagggaaagaaaagatgaagaaggaactgaaaaacttactaacaaacagataggttagtgaagaaaaatgcaaagtagcaatgagaaggcttatggagtaaaaatgaagtcagttggtatttaatcccaaagtgttgttctgattatctaaaatttgacatggtagaccttgcaatttagaatcaagcaggtgagacagggagaagtatgcctgcttaattatttaaactgtgtacttttgttttgacactgaatattttaaaaagcaaataataaaataactaagcatttgaggaaaattttaaggataaattgaggaaactgattaatagagatagcaagggataattaaataaatattccctatgtagcaacagtggttagatgatctttgtctgaatgtaattaaactttgaatagttttagtgtgtccttaaagccaagtatatgctttaacatcaaatggaagtcaaattcctaatgcatagatagagagagctaaactgtgtaatttaatggtatcttctttgctggatgtggcagaatccacaccagcttatcaaccaacacagctaattttagaatagatcctttatctttccatatggcacacgtaagaaagtgtttttctactattaatattaaattaaaacctttacttttgtataataaattaaaactcagaataaacctgtgaccacgtatatttgcattcactttattactttagagaacacattgtaaagatcaataagaaatagagcacaactaaaataaataagatttatagccacaccaataggctaagtgtaaacgcaaagtatgtttcactgtttatgattaataatattcatcttttctataaatactacttactggaacatt

SEQ ID NO: 355932 - DNA, 2327 bp, Homo Sapiens
  misc_feature (75)..(75): n is a, c, g, or t
  misc_feature (121)..(121): n is a, c, g, or t
  misc_feature (163)..(163): n is a, c, g, or t
  misc_feature (218)..(218): n is a, c, g, or t
  misc_feature (286)..(286): n is a, c, g, or t
acgtgtatgtgactgaaaacaagtgcctggcgcctacatctacgcggtgagcgccaccgaccgggatgagggcgncatcgcccagcttgcctactctatcctcgagtgccagatccagggnatgagcgtcttcacctacgtttctatcaactctgagaacggntacttgtacgccctgcgctccttcgactatgagcagctgaaggacttcagttttncaggtgaaagcccgggacgctggcaagcccccaggcgctggctggtaacgccactgtcaacatcctcnatagtggatcaaaatgacaacgcccctgccatcgtggcgcctctaccagggcgcaacgggactccagcgcgtgaggtgctgccccgctcggcggagccgggttacctgatcacccgcgtggccgccgtggacgcggacgacggcgagaacgcccggatcacttacagcatcgtgcgtggcaacgaaatgaacctctttcgcatggactggcgcaccggggagctgcgaacagcacgccgagtcccggccaagcgcgacccccagcggccttatgagctggtgatcgaggtgcgcgaccatgggcagccgcccctttcctccaccgccaccctggtggttcagctggtggatggcgccgtggagccccagggcgggggcgggagcggaggcggagggtcaggagagcaccagcgccccagtcgctctggcggcggggaaacctcgctagacctcaccctcatcctcatcatcgcgttgggctcggtgtccttcatcttcctgctggccatgatcgtgctggccgtgcgttgccaaaaagagaagaagctcaacatctatacttgtctggccagcgattgctgcctctgctgctgctgctgcggtggcggaggttcgacctgctgtggccgccaagcccgggcgcgcaagaagaaactcagcaagtcagacatcatgctggtgcagagctccaatgtacccagtaacccggcccaggtgccgatagaggagtccgggggctttggctcccaccaccacaaccagaattactgctatcaggtatgcctgacccctgagtccgccaagaccgacctgatgtttcttaagccctgcagcccttcgcggagtacggacactgagcacaacccctgcggggccatcgtcaccggttacaccgaccagcagcctgatatcatctccaacggaagcattttgtccaacgagactaaacaccagcgagcagagctcagctatctagttgacagacctcgccgagttaacagttctgcattccaggaagccgacatagtaagctctaaggacagtggtcatggagacagtgaacagggagatagtgatcatgatgccaccaaccgtgcccagtcagctggtatggatctcttctccaattgcactgaggaatgtaaagctctgggccactcagatcggtgctggatgccttcttttgtcccttctgatggacgccaggctgctgattatcgcagcaatctgcatgttcctggcatggactctgttccagacactgaggtgtttgaaactccagaagcccagcctggggcagagcggtccttttccacctttggcaaagagaaggcccttcacagcactctggagaggaaggagctggatggactgctgactaatacgcgagcgccttacaaaccaccatatttgacacggaaaaggatatgctagtcaattctacaggacttacctgaagcagcatgatttgcacaaagtcgaccaacaaaagcatcaacttttcaacttcattatcttggccatccagttagtcatgtgtaactgagtattagatttcggatggagtcatcatggccaattataggacctaattgctctcagcaggcctgagaaatgagttgaaatgtgcagaactgtagaaactttagaggcaacagattttgcctccccgatcagtgtgtgcctgtttacagcactatctatctttctctctccaaatgtcactgagccctttagatgtttatattcaccacgagaagccagtcataaagataaaggaaatttgtgcattataaatgcaatatcactgttttaaacttgactgttttatattatttttgtgtgatcaagtgttccgcaagctattccaactttacaagagaaattgtgattatgttcttttcacctgtgggttataaaaaatgttgtattctgaagacccacaaaatatcaaagacattctgtagtttatacaccgtgttgcaaagtgtttactgtactatttcaaagcttctaaataaatataaaatatatatattaa

SEQ ID NO: 355933 - DNA, 1708 bp, Homo Sapiens
  misc_feature (4)..(4): n is a, c, g, or t
  misc_feature (1168)..(1168): n is a, c, g, or t
  misc_feature (1173)..(1174): n is a, c, g, or t
  misc_feature (1184)..(1184): n is a, c, g, or t
  misc_feature (1198)..(1198): n is a, c, g, or t
  misc_feature (1202)..(1202): n is a, c, g, or t
  misc_feature (1213)..(1213): n is a, c, g, or t
  misc_feature (1221)..(1221): n is a, c, g, or t
  misc_feature (1227)..(1227): n is a, c, g, or t
  misc_feature (1234)..(1234): n is a, c, g, or t
  misc_feature (1236)..(1236): n is a, c, g, or t
  misc_feature (1238)..(1238): n is a, c, g, or t
  misc_feature (1242)..(1242): n is a, c, g, or t
  misc_feature (1251)..(1252): n is a, c, g, or t
  misc_feature (1258)..(1258): n is a, c, g, or t
  misc_feature (1262)..(1262): n is a, c, g, or t
  misc_feature (1267)..(1267): n is a, c, g, or t
  misc_feature (1271)..(1271): n is a, c, g, or t
  misc_feature (1275)..(1275): n is a, c, g, or t
  misc_feature (1278)..(1278): n is a, c, g, or t
  misc_feature (1337)..(1337): n is a, c, g, or t
  misc_feature (1344)..(1344): n is a, c, g, or t
  misc_feature (1347)..(1410): n is a, c, g, or t
  misc_feature (1486)..(1486): n is a, c, g, or t
  misc_feature (1490)..(1490): n is a, c, g, or t
  misc_feature (1494)..(1494): n is a, c, g, or t
  misc_feature (1501)..(1501): n is a, c, g, or t
  misc_feature (1504)..(1505): n is a, c, g, or t
  misc_feature (1509)..(1509): n is a, c, g, or t
  misc_feature (1513)..(1515): n is a, c, g, or t
  misc_feature (1526)..(1526): n is a, c, g, or t
  misc_feature (1639)..(1639): n is a, c, g, or t
cgcnccgccggccctagtctgcctgttttcgactcgcgctccggctgctgtcacttggctctctggctggagcttgaggacgcaaggagggtttgtcactggcagactcgagactgtaggcactgccatggcccctgtgctcagtaaggactcggcggacatcgagagtatcctggctttaaatcctcgaacacaaactcatgcaactctgtgttccacttcggccaagaaattagacaagaaacattggaaaagaaatcctgataagaactgctttaattgtgagaagctggagaataattttgatgacatcaagcacacgactcttggtgagcgaggagctctccgagaagcaatgagatgcctgaaatgtgcagatgccccgtgtcagaagagctgtccaactaatcttgatattaaatcattcatcacaagtattgcaaacaagaactattatggagctgctaagatgatattttctgacaacccacttggtctgacttgtggaatggtatgtccaacctctgatctttgtgtaggtggatgcaatttatatgccactgaagagggacccattaatattggtggattgcagcaatttgctactgagactttgatcctggcctttctctttaatgaaatcatttgtaaaaactttgattccttcagacactcttgggctctctgacgtctcctatttggagtcaacaagcaggttaattcccatgtatcatttaaatgatcagcttatatgaagggtatagtaagattttataatctttggagactagttggctagaaggtcaaattaagtgcccgtcaacctagatttttagttaatgacttactgatctggttttgtcagcataaacacaatgtgttctttcattttgggacccttcccataatattcctcaagcttaagtctcactttgctcttagtaataaatcagggttattcccttcctgctttctgacaggttaattctaaagaagagctcctgggaataagaaaatagaaacaattcgaggttgtggattgttgcaataaattctgggatttaatttcttttcttaccaaattcaaaattgcattaggcttacctgaccactacgaagtatagatctttactacctgtgaaaatccttagttgatggagaagattcncttgnnttcctcctcncttttctttggggncccnttgcctcttcnttaaaccngggcangctttcncngntgcngtgaagtgnnaggggngcgngaggnggtntgtnggnggggagacagcattttaaaacaaaatgaattaaaatgatatcattagtaatttatctgntcataanagnnnnnnnnnnnnnnnnnnnnnnnnnnnnnnnnnnnnnnnnnnnnnnnnnnnnnnnnnnnnnnnncagggaaatacattattcctctggaaactctcacatggttttaattcttttctctgggaacactgtccctctgggnattnttanttggttntannattnattnnnagagtagagtntatttaagacagagacatgtgccttcagaacagaatttattagaaactcactaaaatttgagagtggtcacacttaggtcttgccataagtagcacctaatgaagagttatgnatagattaggactgcagtagatgcattttaagtgaatcaaggaatttagaataggaatgtatctgctta

SEQ ID NO: 355934 - DNA, 1135 bp, Homo Sapiens
  misc_feature (182)..(191): n is a, c, g, or t
  misc_feature (449)..(457): n is a, c, g, or t
  misc_feature (796)..(809): n is a, c, g, or t
  misc_feature (1064)..(1064): n is a, c, g, or t
tttctgaacagtgattgtcccgttaatagcccctcagaagatgttccctgctgataacagcatcctattttacttacttttatagcattactgtgcctagtcgtggggaaagagatggggctgtatagattatctgaatcatttgtctaagaggtacattcttccagatggaatcaataacnnnnnnnnnnccaggttcccgtgcttgctatcacagtatcattgttaagtgacacttttgtctctcataacaccatcacactcttccttccaagtctgagctgtgctggggtttgaactaaaagccatatgtggaatattgacatgtgtaagaagcactttcagaatgttgtcctttttaagaaatgattctcaaaataccagtttttattccaaaaatttagagaacaaacccggaatatgaagtgcagattgtaacatggagctannnnnnnnncctaatcccataatacagctcctaaaagttgtgtgggatttgcgttgcataaatagccatgtgaattccacaagaagcaccagggaaagtttagagatttgcggcaatggaccgaagaacgggccaggaagtcctccaatttcctttggtctttccaggagattggactacacattgtaaagactgactgggtttcaactagtcaaaaagcactttcttctgttttcaatccctgttcgatttgtgcttctgtgcttgtaggagagatggccagggtggcagccctcatgcaggttgaagtatatgtagcctcagcctgatattcttggtgcgaaggtnnnnnnnnnnnnnntaaataaaaccattggcctggttgagggcgtgaccaccaagacatatatgttgtgcccgtgttcatcctgtgtatttatactgtatatgtagagtctagatttatatactgcaatgtaaaatcatatatatcatttaccttttttacaagacaatgcgaaattccaagtagctaaaacttagcttcatttatttaatgccactcttaaatctcttaaatcttgtttcctcggtgcacagccgggtaatgcttttngctgctcgcatgcttctctttctgcatctccatcatctgtttaccttttcgttaaactaataaactatttt

SEQ ID NO: 355935 - DNA, 1672 bp, Homo Sapiens
  misc_feature (193)..(253): n is a, c, g, or t
  misc_feature (913)..(913): n is a, c, g, or t
  misc_feature (1107)..(1107): n is a, c, g, or t
cgggatgcgccaccgccacgagagcccgggacgcgggaaagaccgaaaggaagaggaagaggcaccggtggccatggggctggaggcggcgcgcgactggagtgcgcggcgctgggcacgctgctgcgggatccgcgggaggcggaacgcacgctgctgctggactgccgccccttcctggccttctgccggnnnnnnnnnnnnnnnnnnnnnnnnnnnnnnnnnnnnnnnnnnnnnnnnnnnnnnnnnnnnngccctcctgccgccgttctcgcctgcctgctgcccgaccgcgcgctgcgtgacgcgcctggtccgcggggagctggcgcgggccgtggtgctggacgagggcagtgcctcggtggcggaccccggcccgacagcccggctcatgtgctgctggccgcgctgctgcacgagacccgcgcggggcccactgccgtgtacttcctgcgaggaggcttcgacggcttccagggctgctgtcccgatctgtgctctgaggcccccgcccctgcgctgccgccaacaggggacaaaaccagccgctccgactccagggctcctgtctacgaccagggtggccctgtggagatcttgccctacctgttcctgggcagctgcagtcactcgtcagacctgcaggggctgcaggcctgtggcatcacagccgtcctcaacgtgtccgccagctgccccaaccactttgagggccttttccgctacaagagtatccctgtggaggacaaccagatggtggagatcagtgcctggttccaggaggccataggcttcattgactgggtgaagaacagcggaggccgggtgctggtgcactgccaggcgggtatctcgcgctctgccaccatctgtctggcatacctcatgcagagtcgccgtgtgcggctgngacgaggcctttgacttcgttaagcagcgccggggggtcatctccctccaacttcagtttcatggggcagctgctgcagtttgagacccaggtgctgtgtcactgaggtggtgcccctctgcctgcctgccccactgtgctggcaggagctgactgtggactggtgggctccccctctgggccagcacagtccncctcaccctctggcagggctgctacctccttcagagtgttgcagagagcccccacatgggggctctaggaatgccggcatgctggtctttccgacctggtgctcttctgctgggggactgaggctggccctcattcggggtcgggaaccgagggtgtgtctgctctttccctccccatcctctggcagaaatcagctagacgctataccgtggactctccctggtccaccaccatgttgaagcccttggcagcctgagagctccaaggaacaagctgtgacaaccaggagccctgtctgtgggttcgtctgcccagggcctggagcccaagccctgtgttcctggggaagctggggacttgggaagtgatgggtgtgtcatgttgcgtgtgtctgtctgtgagcctttcacacctgtgctggcgctggaaaattatttgtgctcagctgacatttaacactccctcccccgcttcctcctagccctgtgggcaggggttggaaacttagcactttatatttatacagaattcaggatatgtcaataaaatattgttatatttacc

SEQ ID NO: 355936 - DNA, 906 bp, Homo Sapiens
  misc_feature (793)..(793): n is a, c, g, or t
gggatactggacttgtggtgcgctgccagggctccgcagcgttgccggttgtattcgctggataccagagggcggaagtgcagcagggttcagctccgacctccgcgccggtgctttttgcggctgcgcgggcttcctggagtcctgctaccgcgtccccgcaggacagtgtgtcaggcgggcagcttgccccgccgccccaccggagcgcggaatctgggcgtccccaccagtgcggggagccggaaggaggagccatagcttggagtaggtttggcttgggttgaaataagaatttagcctgtatgtactgctttaactcctggaagaatgacagatgacaaagatgtgcttcgagatgtgtggttgggacgaattccaacttgtttcacgctatatcaggatgagataactgaaagggaagcagaaccatactatttgcttttgccaagagtaagttatctgacgtaggtaactgacaaagtgaaaaagcactttcagaaggttatgagacaagaagacattagtgagatatggtttgaatatgaaggcacaccactgaaatggcattatccaattggtttgctatttgatcttctgtgcatcaagttcagctcttccttggaacatcacagtacattttaagagttttccagaaaaaagaccttctgcactgtccatctaaggatgcaattgaagctcattttatgtcatgtatgaaagaagctgatgctttaaaacataaaagtcaagtaatcaatgaaatgcagaaaaaagatcacaagcaactctnggatgggatggcaaaatgacagatttgaccagttttgggccatcaatcggaaactcatggaatatcctgcagaagaaaatggatttcgttatatcccctttagaatatatcag

SEQ ID NO: 355937 - DNA, 1012 bp, Homo Sapiens
  misc_feature (958)..(958): n is a, c, g, or t
  misc_feature (960)..(960): n is a, c, g, or t
  misc_feature (964)..(964): n is a, c, g, or t
  misc_feature (970)..(970): n is a, c, g, or t
  misc_feature (972)..(972): n is a, c, g, or t
  misc_feature (974)..(975): n is a, c, g, or t
  misc_feature (981)..(981): n is a, c, g, or t
  misc_feature (997)..(997): n is a, c, g, or t
  misc_feature (1000)..(1000): n is a, c, g, or t
  misc_feature (1002)..(1002): n is a, c, g, or t
  misc_feature (1010)..(1010): n is a, c, g, or t
gtgacgtcatctccgggcgccgagggtgactggacttgtggtgcgctgccaggctccgcagcgttgccggttgtattcgctggataccagagggcggaagtgcagcagggttcagctccgacctccgcgccggtgctttttgcggctgcgctgggcttcctggagtcctgctaccgcgtccccgcaggacagtgtgtcaggcgggcagcttgccccgccgccccaccggagcgcggaatctgggcgtccccaccagtgcggggagccggaaggaggagccatagcttggagtaggtttggctttggttgaaataagaatttagcctgtatgtactgctttaactcctggaagaatgacagatgacaaagatgtgcttcgagatgtgtggtttggacgaattccaacttgtttcacgctatatcaggatgagataactgaaagggaagcagaaccatactatgcattatccaattggtttgctatttgatcttcttgcatcaagttcagctcttccttggaacatcacagtacattttaagagttttccagaaaaagaccttctgcactgtccatctaaggatgcaattgaagctcattttatgtcatgtatgaaagaagctgatgctttaaaacataaaagtcaagtaatcaatgaaatgcagaaaaaagatcacaagcaactctggatgggattgcaaaatgacagatttgaccagttttgggccatcaatcggaaactcatggaatatcctgcagaagaaaatggatttcgttatatcccctttaggaatatatcagacaacgactgaaagacctttcattcaggaaggctgtttcgtcctgtgggctgcagatgggacagttggcacacactaggagatctcctcaaagaagtttgtcctttctgctattgatcctgaagatggggaaaaaaagaatcaagtgatgatcatggantnagcnatgttngnannccctgngtggctgagtgacatntancnccggatantt

SEQ ID NO: 355938 - DNA, 1313 bp, Homo Sapiens
aagatgtgcttttagatgtgtggtttggacgaattccaacttgtttcacgctatatcaggatgagataactgaaagggaagcagaaccatactatgcattatccaattggtttgctatttgatcttcttgcatcaagttcagctcttccttggaacatcacagtacattttaagagttttccagaaaaagaccttctgcactgtccatctaaggatgcaattgaagctcattttatgtcatgtatgaaagaagctgatgctttaaaacataaaagtcaagtaatcaatgaaatgcagaaaaaagatcacaagcaactctggatgggattgcaaaatgacagatttgaccagttttgggccatcaatcggaaactcatggaatatcctgcagaagaaaatggatttcgttatatcccccttagaatatatcagacaacgactgaaagacctttcattcagaagctgtttcgtcctgtggctgcagatggacagttgcacacactaggagatctcctcaaagaagtttggccttctgctattgatcctgaagatggggaaaaaaagaatcaagtgatgattcatggaattgagccaatgttggaaacacctctgcagtggctgagtgaacatctgagctacccggataattttcttcatattagtatcatcccacagccaacagattgaaggatcaactatttgcctgaacagaatcatccttaaatgggatttatcagagcatgtcacccttttgcttcaatcaggtttggtggaggcaacctgaccagaaacacttcgctgctgcaagccagacaggaaaaagattccatgtcagataaggcaactgggctggtcttactttgcatcacctctgctttcctccactgccatcattaaacctcagctgtgacatgaaagacttaccggaccactgaaggtcttctgtaaaatataatgaagctgaaacctttggcctaagaagaaaatggaagtatgtgccactcgatttgtatttctgattaacaaataaacaggggtatttcctaaggtgaccatggttgaactttagctcatgaaagtggaaacattggtttaattttcaagagaattaagaaagtaaaagagaaattctgttatcaataacttgcaagtaattttttgtaaaagattgaattacagtaaacccatctttccttaacgaaaatttcctatgtttacagtctgtctattggtatgcaatcttgtaactttgataatgaacagtgagagatttttaaataaagcctctaaatatgatttgtcatttaaaaaaa

SEQ ID NO: 355939 - DNA, 801 bp, Homo Sapiens
ggagaaacagaggtgatgcaagttaagccagcccagttgccttatctgacatggaatcttgttccggtctggcttgcagcagcgaagtgtttctggtcaagtgttccttcccgcaaaccctgattggaagcaaaagggtgacatgctctgaataaatcccatttaaggatgattctgttcaggcaaatagttgatccttcaatctgttggctgtgggatgatactaatatgaagaaaattatccgggtagctcagatgttcactcagccactgcagaggtgtttccaacattggctcaattccatgaatcatcacttgattctttttttccccatcttcaggatcaatagcagaaggacaaacttctttgaggagatctcctagtgtgtgcaactgtccatctgcagccacaggacgaaacagcttctgaatgaaaggtctttcagtcgttgtctatttgaaaaaggaaaaaatgattcaagcaattaagtctttgttgctgccaattacaaattgtatatatcataaactgttatgttggcattaggtgccttttgatacggtgttagcataatttacacaacatcacagatgtggtatcactgtgaaaaatgtttaacatgataaattcaggtaaatctaattctgaggaaacagacaaatccaaagttgggtgggacattctaaagataattggctgggacccttcaaaaacttaaagacattaaaaagcaaaaacacaaaaagatatcaaaaaagcattttgttctcagtatctcttaaagagactaacaagccgct

SEQ ID NO: 355940 - DNA, 1597 bp, Homo Sapiens
  misc_feature (10)..(10): n is a, c, g, or t
  misc_feature (12)..(15): n is a, c, g, or t
  misc_feature (17)..(17): n is a, c, g, or t
  misc_feature (402)..(402): n is a, c, g, or t
  misc_feature (486)..(486): n is a, c, g, or t
  misc_feature (525)..(525): n is a, c, g, or t
  misc_feature (534)..(534): n is a, c, g, or t
  misc_feature (1268)..(1268): n is a, c, g, or t
  misc_feature (1493)..(1524): n is a, c, g, or t
  misc_feature (1526)..(1539): n is a, c, g, or t
gatctgggcngnnnngnggggggggcctgtgaccacctgagacatacgctcgtgacactgccccaccccagccacctccacttgcttcctcctccttccctccgctgctctttccccacggcccagaatttagctgctctgacagccacttttgagaccagctggctttgcagtcacttcagagagctggagcggctgcccactgggccctgactgggagtcccctgccagctcctgatcaggcgctgcgccctggtggcagtgatgactgggagtcccctgccagctcctgtccaggcgctgcatcctggtaacagtgaggccatgttgctgtcatctccacctctgcattcttgctgcctgtgggtcctttttctttcatggagcctgctgggttttgtntcacctgtgctgagctcctctggggttttgatttcttccttccttatcaggccctttggggtaagcctgctggttgtacctganatagggaggcagttaggggcagtccctggtggggccgcnctggcagcntcaagctggcaaatcgtgtgcctggtttccctgcaacacctgcctctctgtccctgctgctgcttggctcaggcccaacaggcagcgtgcatggaggtggttacacacagctgtttccgtgagggtgaccgtgtctgcagcacgcttccgtctccgcatgcacggctgcctctccagccacctctgatacttctctcttggggccatcagagcctcccttgggctgtcacctcccagctcacacacactcttcagtggtttcctctcttcattctcttatagggcgtggcccttcttatttatctaaagggctgaatttaggagactttttacccaggggcaaaaggctcttagggtaatgagatggatggtggcccaggtgcattttccagggcctgggttctccagatcccgtggcttctgttgagtggaggcaactttgctctgtgtgaacctcgcccctgtccctctgccgggcacccctggcaggaagcagaactcccatcctcaccctgacttagactgtcctctgagtcagctcctctccaagacaggagtgggcagccctgggcagtcttctggccccttgctaaagtgaggggcaggaagctggggctgccctccagaaagccggggtaggaactctgaaaaatacctcctctaaacggaagcagggctctccagttccacttggcgccccctcccacaaggcccttcctccctgaggaccccancccccctaccccttccccagcagcctttggaccctcacctctctccggtgtccgtgggtcctcagcccagggtgagctgcagtcaggcgggatgggacgggcaggccagaggtcagccagctcctagcagagaagagccagccagaccccaaccctgtctcttgtccatgccctttgtgatttcagtcttggtagacttgtatttggagttttgtgcttcaaagnnnnnnnnnnnnnnnnnnnnnnnnnnnnnnnnannnnnnnnnnnnnnatacagagcagctgatcaatttgtatttatttattttaacattttactaaataaagcc

SEQ ID NO: 355941 - DNA, 854 bp, Homo Sapiens
tacaccaccacagccccactctcagagagcacggacgccggacacgcacgagtcttcttgagagcaatggcgaccaccgcgatggcgctctccccctcgtccttcgccgggaaggcggtcaaggacctgccgtcgtcggcgctcttcggggaggcgcgcgtcaccatgcgcaagaccgcggccaaggccaagccggtgtcgtccggcagcccgtggtacgggtccgaccgcgtgctctacctcggcccgctctccggcgaccccccgagctacctcaccggcgagttccccggcgactacgggtgggacaccgcggggctgtcggccgaccccgagaccttcgccaagaaccgggagctggaggtgatccactgccggtgggccatgctgggcgcgctcggctgcgtcttccccgagctgctcgcccgcaacggcgtcaagttcggcgaggccgtgtggttcaaggccggctcccagatcttcagcgagggcggcctcgactacctcggcaaccccagcctggtccacgcgcagagcatcctcgccatctgggcctgccaggtcgtgctcatgggcgccgtcgaggggtaccgcgtcgccggcggcccgctcggcgagatcgtcgacccgctctaccccggcggcagcttcgaccccctgggccttgccgacgaccctgaggcgtcgcggagctcaaggtgaaggagatcaagaacggccgcctcgccatgttctccatgttcggcttcttcgtgcaggccatcgtcaccggcaagggccccctcgagaacctcgccgaaaactcgccgacccgtcaacaacaacgcctgggccttcgcaccacttcgtgccgg

SEQ ID NO: 355942 - DNA, 974 bp, Homo Sapiens
  misc_feature (885)..(885): n is a, c, g, or t
cctcattcttggagaacaacacagaacctagtcaatcagaatggccgcaaccaccatgtcactctcttccccagccttcgccggcaaggcagtgaagaacttgccatcgtcatctctttttggggaggctcgcgttaccatgcgcaagacggcagcaaaggccaagcaggttgcctcccgcagcccgtggtacggctctgaccgcgtgctctacctcggcccgctttctggtgagcccccgagctacctgaccggtgaattccccggcgactatgggtgggacaccgctgggctgtcggctgaccccgagaccttcgccaagaaccgcgagctggaggtgatccactgccgttgggccatgcttggcgcgctcggttgcgtcttccccgagctgctcgcccgcaacggtgtgaagttcggcgaggctgtttggttcaaggctggatcccagatcttcagcgagggcggcctcgactacctcggcaatccaagccttgtgcacgcgcaaagtatccttgccatctgggcttgtcaggtcgtgctcatgggcgccgtcgagggctaccgcattgccggtgggccgctcggtgagatcgtcgacccgctctacccgggtggcagtttcgacccgctcggcctttgctgacgaccctgaggcgtttgccgagctcaaggttaaggagatcaagaacggtcgctcgccatgttctccatgtacggtttcttcgtgcaagccatcgtcaccggcaagggtccactcgagaaccttgctgaccacgttgccgaaccccgtcaacaacaagcgcatggggcattcggcaccaactttgtccccggcaagtaacgggtgtgcacgagcattgcggggaaagtaatcccgatgangccggggtgacgttgtactaccatggatgttacattacccacgatatcgcatgggctgcaattaaaatgcgaggaatttcagtggcaac

SEQ ID NO: 355943 - DNA, 1085 bp, Homo Sapiens
ggccttcaggtttccatttaatggccaagccagcactgccaagatgtcctcctgcctgagaagcccacccacgctggcacccctcagcctcactagcggcatcccagtccagtcctggtgtggggcctcatctcagctccttcagcaagctgttgacagagcccagcagctcctggaagtagccctcgtcctcaccatcctgcagctccaggctggccagcacctggtactcagcctgcaggctggccagtgtcctgccgagctgggggtcctgacggtagcggtcccggcaggtggtcaggaggacgcccagtgtctgcagcaccttctcacgggcatcatgctcgggcagcgccaggaggtgggccgtgatctcgcaccagccctgttcccacaggcctggcaggaggtgtacctggcgatactgctgcagcttctctggggacatctcctgggtcagctcagcctcctcctcggcgaacatcttctccgtgaccaggtcgtagagcagtgtgaccacgcgcacggcgagcacctccgtgcccttctcctgcaccagggtcctcaggacctgcagccccccgagcttcaggaactgccgctgggcataggggaagtggcgcagcagggagcacagtgcaaacaggaccttcttctttgcagtgagcggctgctccgtggccaggatgaccagcagcttctgcagggctcccccttcgatggcctccacctggaccttggggttgctggaaaaggcagcgcccagcacaaacgcagcatactccttcacgaggggctctgtgctgttcagcccattgatcaccacttgaagaccaccaaaggaaagcaggtcctgcgcattgtccatctgatggacataatattcaagatcaaagagcgcacaaatcttctcttccaaactggagctggaactattgaacttgttgatcagccgtaccatgatctgcatgtcagtctcaatgacaacattcagctcatcaaagtctttcttcagttcctcaatggggcggaagagccgcttgacctcagcctcgtgccgattcaccccccggtcctcgcgccaa

SEQ ID NO: 355944 - DNA, 1327 bp, Homo Sapiens
  misc_feature (1022)..(1065): n is a, c, g, or t
atcaggccaaatcggccgagctcgaattcgtcgagagcgggcctggaattgtgggagttgtgtctgccactcggctgccggaggccgaaggtccctgactatggctccccagagcctgccttcatctaggatggctcctctgggcatgctgcttgggctgctgatggccgcctgcttcaccttctgcctcagtcatcagaacctgaaggagtttgccctgaccaacccagagaagagcagcaccaaagaaacagagagaaaagaaaccaaagccgaggaggagctggatgccgaagtcctggaggtgttccacccgacgcatgagtggcaggcccttcagccagggcaggctgtccctgcaggatcccacgtacggctgaatcttcagactggggaaagagaggcaaaactccaatatgaggacaagttccgaaataatttgaaaggcaaaaggctggatatcaacaccaacacctacacatctcaggatctcaagagtgcactggcaaaattcaaggagggggcagagatggagagttcaaaggaagacaaggcaaggcaggctgaggtaaagcggctcttccgccccattgaggaactgaagaaagactttgatgagctgaatgttgtcattgagactgacatgcagatcatggtacggctgatcaacaagttcaatagttccagctccagtttggaagagaagattgctgcgctctttgatcttgaatattatgtccatcagatggacaatgcgcaggacctgctttcctttggtggtcttcaagtggtgatcaatgggctgaacagcacagagcccctcgtgaaggagtatgctgcgtttgtgctgggcgctgccttttccagcaaccccaaggtccaggtggaggccatcgaagggggagccctgcagaagctgctggtcatcctggccacggagcagccgctcactgcaaagaagaaggtcctgtttgcactgtgctccctgctgcgccacttcccctatgcccagcggcagttcnnnnnnnnnnnnnnnnnnnnnnnnnnnnnnnnnnnnnnnnnnnnccgctaccgtcaggacccccagctcggcaggacactggccagcctgcaggctaagtaccagtgtgctggccagcctggagctgcaggatggtgaggacgagggctacttccaggagctgctgggctctgtcaacagcttgctagaaggagctgagatgaggccccacaccaggactgaactgggatgccgctagtgaggctgaggggtgccagcgtgagctggcttctcaggcaggaggcatcttaagcgcggtgccataat

SEQ ID NO: 355945 - DNA, 1858 bp, Homo Sapiens
tgggttttaaagacacgcccagagcggggaggaggtagaggcggagagctgcagacctaccgctgacttacgatgtaccccagagctggccctcctgcctctgtcatggcctcatcagtttcctggggttcttgctgctgttggtcaccttccccatttctggctggtttgccctgaagattgtgcccacctacgagcggatgattgtgttccgcctgggccggatccgcaccccccagggacctggcatggttctgctcttgcccttcattgactcctttcagagggtggatctgaggacacgagccttcaacgtccctccctgcaagctggcctctaaggacggggctgtgctgtccgtgggagccgatgtccagtttcgcatctgggacccggtgctgtcggtgatgactgtgaaagacctgaacacagccacacgcatgacagcccagaacgccatgaccaaggccctgctcaagaggccgctgcgggagatccagatggagaagctcaagatcagcgaccagcttctgctggagatcaacgatgtgaccagggcctgggggctggaggtagaccgcgtggagctggcagtggaggccgtgctccagccgccccaggacagcccagctgggcccaacctggacagcaccctccagcagctggccctgcacttcctgggaggaagcatgaactcaatggcaggaggtgccccgtccccggggccagacaccgtggagatggtgagtgaagttgagccacctgcccctcaagttggtgccaggtccagtccgaagcagcctctggcggaggggctactgactgctctacagcccttcctgtctgaggccctggtcagccaagtcggggcctgctaccagttcaatgtcgtcctgcccagcggcacccaaagcgcctacttcctggacctcactacaggacgaggaagagtgggacacggggtgcctgatggcatccctgatgtggtggtggagatggccgaggcagacctgcgggccctgctatgcagagagctgcggcccctgggggcctacatgagtggacggctgaaggtgaagggcgacctggctatggccatgaagctggaggctgtcctcagggccttgaagtagcagccttggctgactttccagagcccagtcccaagcctggcaccaagcctgaggggcctcttggaggaggaggtgttcatctgcaccacagagagttgaggccctaacaaatttcaggcccagccaagagcccatgaatggaggctgcaggaggctgagtccggctgccatgcacgtctcccctacagtggttctctggacaaggctttgtccatcccggtccccagctgagtgcccagcgctgagctgggtgcacggtgtgattccaggaggagagccaggcctgccctgccctgctggcttcctgactggagagacaggacccacagaaacagcctgacagcagctggtttggtccttgtgtgagggaccaagcatgtggcccaggctctaagctctgcggggattggagagggatggggagggaagggaaggcagctccaagaagaggtccctgtggcgaagttacctggggatcctggctggcccaccttcctggctgcagtccaggcccgtgctggcgggattgggcatgggaaggagcagggcctgctgcttccctggcgctgctcccaaagatttctgactcatctgccagctctgtcctgcatgcctggcgagctggggcccagggcagcatgaaggagagccctgcgttctgtgcttcttaccagaggtttgcaagcctcagacaaataaatgtggtgtttacaatgtaaaaaaaa

SEQ ID NO: 355946 - DNA, 974 bp, Homo Sapiens
gtcagtagcccctccgccagaggctgcttcggactggacctggcaccaacttgaggggcaggtggctcaacttcactcaccatctccacggtgtctgctggccccggggacggggcacctcctgccattgagttcatgcttcctcccaggaagtgcagggccagctgctggagggtgctgtccaggttgggcccagctgggctgtcctggggcggctggagcacggcctccaccgccagctccacgcggtctacctccagcccccaggccctggtcacatcgttgatctccagcagaagctggtcgctgatcttgagcttctccatctggatctcccgcagcggcctcttgagcagggccttggtcatggcgttctgggctgtcatgcgtgtggctgtgttcaggtctttcacagtcatcaccgacagcaccgggtcccagatgcgaaactggacatcggctcccacggacagcacagccccgtccttagaggccagcttgcagggagggacgttgaaggctcgtgtcctcagatccaccctctgaaaggagtcaatgaagggcaagagcagaaccatgccaggtccctggggggtgcggatccggcccaggcggaacacaatcatccgctcgtaggtgggcacaatcttcagggcaaaccagccagaaatggggaaggtgaccaacagcagcaagaaccccaggaaactgatgaggccatgacagaggcaggagggccagctctggggtacatcggcccctgtccccacgccgccccgctccggggacaagcagcccttctgcgagcccagaaagccgaagctcgactgctggaagcggtcaaaatcacccaggggcagcgcccggtacccagacctgccgagcatggcttttgacaggagacacgccccgcgcctccgcgcggcgccctcactggccagtgggccctacgcggccaccgcccccactccgct

SEQ ID NO: 355947 - DNA, 488 bp, Homo Sapiens
  misc_feature (468)..(468): n is a, c, g, or t
cggcaggtctgggtaccgggcgctgccctgggtgattttgaccgcttccagcagtcgagcttcggctttctgggctcgcagaagggctgcttgtccccggagcggggcggcgtggggacaggggccgatgtaccccagagctggccctcctgcctctgtcatggcctcatcagtttcctggggttcttgctgctgttggtcaccttccccatttctggctggtttgccctgaagctggcctctaaggacggggctgtgctgtccgtgggagccgatgtccagtttcgcatctgggacccggtgctgtcggtgatgactgtgaaagacctgaacacagccacacgcatgacagcccagaacgccatgaccaaggccctgctcaagaggccgctgcgggagatccagatggagaagctcaagatcagcgaccagtttctgctggaggatcaacgatgtgaccagggcctnggggtgggaggtagaccgcg

SEQ ID NO: 355948 - DNA, 2330 bp, Homo Sapiens
  misc_feature (1183)..(1183): n is a, c, g, or t
  misc_feature (1196)..(1196): n is a, c, g, or t
  misc_feature (1204)..(1204): n is a, c, g, or t
  misc_feature (1210)..(1210): n is a, c, g, or t
  misc_feature (1230)..(1230): n is a, c, g, or t
  misc_feature (1235)..(1236): n is a, c, g, or t
  misc_feature (1242)..(1244): n is a, c, g, or t
  misc_feature (1323)..(1323): n is a, c, g, or t
  misc_feature (1397)..(1397): n is a, c, g, or t
  misc_feature (2109)..(2155): n is a, c, g, or t
ggtccggaattccctcgatgcgggcgttcgggggcggggctgttccctctgctctgggtctccgccggcgcccgccccgccagcctcacctgcgcggcacgtgacccgcaccgcccgtgggcaccttgaaggcggatcccgcgcgcccccgctcctgcaggctgtttttcttcaaataaagaacatggtgaaactgattcacacattagctgatcatggtgacgatgtcaactgctgtgccttctccttttccctcttggctacttgctccttggacaaaacaattcgcctgtactcgttacgtgactttactgaactgccacattctccattgaagtttcatacctatgctgtccactgctgctgtttctccccttcaggacatattttggcatcgtgttcaacagatggtaccactgtcctatggaatactgaaaatggacagatgctggcagtgatggaacagcctagtggcagccctgtgagggtttgccagttttccccagactccacgtgtttggcatcaggggcagctgatggaactgtggttttgtggaatgcacagtcatacaaattatatagatgtggtagtgttaaagatggctccttggcggcatgtgcattttctcctaatggaagcttctttgtcactggctcctcatgtggtgatttaacagtgtgggatgataaaatgaggtgtctgcatagtgaaaaagcacatgatcttggaattacctgctgcgatttttcttcacagccagtttctgatggagaacaaggtcttcagttttttcgaattggcatcatgtggtcaggattgccaagtcaaaaatttggattgtttcttttacccatatcttaggttttgaattaaaatataaaagtacactgagtgggcactgtgctcctgttctggcttgtgctttttcccatgatgggcagatgctagtctcagggtcagtggataagtctgtcatagtatatgatactaatactgagaatatacttcacacattgactcagcacaccaggtatgtcacaacttgtgcttttgcacctaatacccttttacttgctactggttcaatggacaaaacagtgaacatctggcaatttgacctggaaacacgttgccaagcaaggcgcacagaacatcagcggaagcaataaaccgaagattggncagaggaggatgnctcaacanggcttngtgcacaagattaaaaagancttgnnggtatnnncaagaggaataacattgatggaaaagaactgttgaatctaacaaaagaaagtcgggctgaggatttgaaaattgaatcnctaggactgcgtagtaaagtgctgaggaaaattgaagagctcaggaccaaggttaaatccctttcttcaggaanccctgatgaattgatatgtccaataactagagaacttatgaaagacccggccatcgcatcagatggcaattcatatgaaaaggaagcaatggaaaatgggatcagcaaaaagaaacggacaagtcccatgacaaatcgtgccctgccgtcagcggaacttacaccaaataggactctgaaaatggccagcaatagatggcgggagacacacccaaaagtaaaattgttgatattgtataatttatattttcagtgatctcatttgaatgatttataggtaaatactaatcagacattattaaaagcaaaacaggaaaaaggtaaacttcttaaatttagttacctataaaaattgtcaattttcattctttaaaaacacatggacttactataaaagcctttttgtactagtgaaaagaatcttcagctatatagaaataaagttatactttaaattgcagtgtcctaagttttttaaattcctcttactatcattcccaacagtgcccacatttattcttgttagatgtaggtcatctctctttataactaaaggttggactactctagaataacagatgtttacattctaggtaatagccattcattcaataactctttggaggccttttaaagagaccattttgtagcaaaatggttgtagattgtttatgattaaatggagaaaaatcacttcagatgttgaagcaannnnnnnnnnnnnnnnnnnnnnnnnnnnnnnnnnnnnnnnnnnnnnnccaaacctaggtacaagttagatgaaataaattctgagtaagtcaagttgactttgctgaaatatataacgtgacaaactctagcctcccttcagaatgaagaattattaaatgttctcacatataattctaagctggagtaactatacaaaggcatttttacacaatagcctcc

SEQ ID NO: 355949 - DNA, 591 bp, Homo Sapiens
  misc_feature (419)..(419): n is a, c, g, or t
  misc_feature (576)..(576): n is a, c, g, or t
ttttgcatgatccactggcttcgttcccagcaatccagggatctgtggtggggatgagagtgagaaaagggagtagaaggggaggaaggaggcatggtgggggtggggaagtggagtaacatggttgttgagaagctcgtggccccctaggcctgggcctcactgtctttactcctccatactacaagagtgatgaggaaggggatgaggcagatgggggctatgatcatggccaggagtacatcctctggggggtcagagaaggtgggctgcaccagggagcagttggcaaagtggatctggtgagtctcaaagatgatcctctctgccaagggattggggaagcccaggtcaaacaactctgcaaagtgctccagacaatatcgcagagatgctataaggccttctgacccatggtngtgcctgtggtgggaagagaatgagccagagcctcgtggagattcaggacagcgcccagcagaaggaggaggcggagcgctgccggccgcccgactcgggtcctagggagacgcgggcgcgccggcgcgctccacccggagcgaggccatcgtgcancaaggaggcgaggag

SEQ ID NO: 355950 - DNA, 868 bp, Homo Sapiens
  misc_feature (65)..(108): n is a, c, g, or t
agcggggggggagccgcgggcgccaggcgcgggtgaggcagcgactccccctccagccgcgggcnnnnnnnnnnnnnnnnnnnnnnnnnnnnnnnnnnnnnnnnnnnntccgaggaagcgggcggttcctgcctggctgggatataggcgcccccacacccgggcccggctcagcgccgccgccgctcctcgcctccttgctgcacgatggcctcgctccgggtggagcgcgccggcggcccgcgtctccctaggacccgagtcgggcggccggcagcgctccgcctcctccttctgctgggcgctgtcctgaatccccacgaggccctggctcagcctcttcccaccacaggcacaccagggtcagaaggggggacggtgaagaactatgagacagctgtccaattttgctggaatcattataaggatcaaatggatcctatcgaaaaggattggtgcgactgggccatgattagcaggccttatagcaccctgcgagattgcctggagcactttgcagagttgtttgacctgggcttccccaatcccttggcagagaggatcatctttgagactcaccagatccactttgccaactgctcccatggtgcagcccaccttctctgaccccccagaggatgtactcctggccatgatcatagcccccatctgcctcatccccttcctcatcactcttgtagtatggaggagtaaaaacagtgaggcccaggcctagggggccacgagcttctcaacaaccatgttactccacttccccacccccaccaggcctccctcctcccctcatagctcccttttctcacatctatccccaccacagatcctggatttacggcatgagccagtg

SEQ ID NO: 355951 - DNA, 899 bp, Homo Sapiens; identical to SEQ ID NO: 78785
  misc_feature (722)..(722): n is a, c, g, or t
  misc_feature (728)..(729): n is a, c, g, or t
  misc_feature (740)..(742): n is a, c, g, or t

SEQ ID NO: 355952 - DNA, 836 bp, Homo Sapiens
  misc_feature (29)..(29): n is a, c, g, or t
  misc_feature (81)..(117): n is a, c, g, or t
ggaaaacttggaaattacggaatccactnaatagggggcgaacctcccgggagtttcacaaacccggcgtggtggcggcgnnnnnnnnnnnnnnnnnnnnnnnnnnnnnnnnnnnnnatcaggccaaatcggccgagctcgaattcgtcgagagcggggcgaagttctgcgctggtcggcggagtagcaagtggccatggggagcctcagcggtctgcgcctggcagcaggaagctgttttaggttatgtgaaagagatgtttcctcatctctaaggcttaccggaagctctgatttgaagagaataaatggattttgcacaaaaccacaggaaagtcccggagctccatcccgcacttacaacagagtgcctttacacaaacctacggattggcagaaaaagatcctcatatggtcaggtcgcttcaaaaaggaagatgaaatcccagagactgtctcgttggagatgcttgatgctgcaaagaacaagatgcgagtgaagatcagctatctaatgattgccctgacggtggtaggatgcatcttcatggttattgagggcaagaaggctgcccaaagacacgagactttaacaagcttgaacttagaaaagaaagctcgtctgaaagaggaagcagctatgaaggccaaaacagagtagcagaggtatccgtgttggctggattttgaaaatccaggaattatgttataacgtgcctgtattaaacaaggatgtggtatgaggatccatttcataaagtatgatttgcccaaacctgtaccatttccgtatttctgctgtagaagtagaaataaaattttcttaaataacaaac

SEQ ID NO: 355953 - DNA, 1095 bp, Homo Sapiens
  misc_feature (44)..(96): n is a, c, g, or t
  misc_feature (106)..(106): n is a, c, g, or t
  misc_feature (126)..(126): n is a, c, g, or t
  misc_feature (134)..(207): n is a, c, g, or t
  misc_feature (222)..(222): n is a, c, g, or t
  misc_feature (226)..(226): n is a, c, g, or t
  misc_feature (228)..(228): n is a, c, g, or t
  misc_feature (1001)..(1020): n is a, c, g, or t
ggatggcgcttcccggtggcggcggaggagcccggagacgcagnnnnnnnnnnnnnnnnnnnnnnnnnnnnnnnnnnnnnnnnnnnnnnnnnnnnnagaggccgcntggccaccttccctggcgcncggggaannnnnnnnnnnnnnnnnnnnnnnnnnnnnnnnnnnnnnnnnnnnnnnnnnnnnnnnnnnnnnnnnnnnnnnnnnacacagccaggcgcncctncncgccgcggtgcccgccgcctgaaggccgcctgggcgcgggagccggtgccagctcggagcgggcgctggaggcagctcgaggcgcgatgtcggtgccgctgctcaagatcggggtcgtgctgagcaccatggccatgatcactaactggatgtcccagacgctgccctcgctggtgggcctcaacaccaccaagctctcggcggccggcggcgggacgctggaccgcagcaccggcgtgctgcccaccaaccctgaggagagctggcaggtgtacagctctgcccaggacagcgagggcaggtgtatctgcacagtggtcgccccacagcagaccatgtgttcacgggatgcccgcacaaaacagctgaggcagctactggagaaggtgcagaacatgtctcaatccatagaggtcttggacaggcggacccagagagacttgcagtacgtggagaagatggagaaccaaatgaaaggactggagtccaagttcaaacaggtggaggagagtcataagcaacacctggccaggcagtttaagggctaacttaaaagagttttttcaatgctgcagtgactgaagaagcagtccactcccatgtaaccatgaaagagagccagagagctttttgcaccatgcatttttactattattttccaatacttagcaccatttcactaaggaaccttgaatacaaccaggatcctcctttgcatgcgactgtagctgcatttcatgaatagtttgaacccttgtcaatgcattttttgnnnnnnnnnnnnnnnnnnnncttcgtgtatgtgactcaaagcatgtaaccttaagatgttgcattctaaactgacaataaagacctttcccaaat

SEQ ID NO: 355954 - DNA, 1106 bp, Homo Sapiens
  misc_feature (3)..(3): n is a, c, g, or t
  misc_feature (10)..(10): n is a, c, g, or t
  misc_feature (38)..(38): n is a, c, g, or t
ccnccctccnccccgggagacagcgaggcgcgcggggncccacagcgccacccccgcccccgccccttccgagcaaacttttggcacccaccgcagcccagcgcgcgttcgtgctccgcagggcgcgcctctctccgccaatgccaggcgcgcgggggagccattaggaggcgaggagagaggagggcgcacgcccgcccagcccagccctgcccagccctgcccggaggcagacgcgccggaaccgggacgcgataaatatgcagagcggaggcttcgcgcagcagagcccgcgcgccgcccgctccgggtgctgaatccaggcgtggggacacgagccaggcgccgccgccggagccagcggagccggggccagagccggagcgcgtccgcgtccacgcagccgccggccggccagcacccagggccctgcatgccaggtcgttggaggtggcagcgagacatgcacccggcccggaagctcctcagcctcctcttcctcatcctgatgggcactgaactcactcaagtgctgcccaccaaccctgaggagagctggcaggtgtacagctctgcccaggacagcgagggcaggtgtatctgcacagtggtcgccccacagcagaccatgtgttcacgggatgcccgcacaaaacagctgaggcagctactggagaaggtgcagaacatgtctcaatccatagaggtcttggacaggcggacccagagagacttgcagtacgtggagaagatggagaaccaaatgaaaggactggagtccaagttcaaacaggtggaggagagtcataagcaacacctggccaggcagtttaaggcgataaaagcgaaaatggatgaacttaggcctttgatacctgtgttggaagagtacaaggccgatgccaaattggtattgcagtttaaagaggaggtccaagaatctgacgtcagtgcttaacgagctgcaagaggcaaattggcgcctatgactacgatgaacttcaagagcagagtggtccaatcttgaagaaaggctccggccttgctgcaaaaattgcttgcggaaagttgaccgggcatcagtgacccgggactgtcaagacctc

SEQ ID NO: 355955 - DNA, 992 bp, Homo Sapiens
  misc_feature (48)..(84): n is a, c, g, or t
ggatgtatagatactatagggcgaacggagctctacgcggggcggcgnnnnnnnnnnnnnnnnnnnnnnnnnnnnnnnnnnnnnatcaggccaaatcggccgagctcgaattcgtcgagagcggagacgcgccggaaccgggacgcgataaatatgcagagcggaggcttcgcgcagcagagcccgcgcgccgcccgctccgggtgctgaatccaggcgtggggacacgagccaggcgccgccgccggagccagcggagccggggccagagccggagcgcgtccgcgtccacgcagccgccggccggccagcacccagggccctgcatgccaggtcgttggaggtggcagcgagacatgcacccggcccggaagctcctcagcctcctcttcctcatcctgatgggcactgaactcactcaagtgctgcccaccaaccctgaggagagctggcaggtgtacagctctgcccaggacagcgagggcaggtgtatctgcacagtggtcgccccacagcagaccatgtgttcacgggatgcccgcacaaaacagctgaggcagctactggagaaggtgcagaacatgtctcaatccatagaggtcttggacaggcggacccagagagacttgcagtacgtggagaagatggagaaccaaatgaaaggactggagtccaagttcaaacaggtggaggagagtcataagcaacacctggccaggcagtttaagggctaacttaaaagagttttttcaatgctgcagtgactgaagaagcagtccactcccatgtaaccatgaaagagagccagagagctttttgcaccatgcatttttactattattttccaatacttagcaccatttcactaaggaaccttgaatacaaccaggatcctcctttgcatgcgactgtagctgcatttcatgaatagtttgaacccctggtcaatgcatttttgacaaacgacaaactaaaaaactctccagggctgg

SEQ ID NO: 355956 - DNA, 891 bp, Homo Sapiens
gatgacattgggggtcatccttctccgatgtcccatccgccagttttgtcaccttccgtccccattcttgggatgggataaaaggtaaccagagaaggagaatttctgctggagtgaacaccaaatgcaagtgggtaacacaaatgggtcctttgacacactaagatcaagacaggtactggctatagttaaaaggaaagaacactttagtcttcagccttataagttataaatattctaagaaactcaagagtaagacacaaggtgatctgaagacactttttggtcatctaaacaggacctgaagcacatgaaagaagatgatgttctcagctaagcatcctatatatattttatttctgaaagaataaactatctgtgtgtgttcttaagattacaaaatgaaataaaagggtccaaaggttttattcacatggttcatgttttcaaagagaatagaaccataattaaacataatccagtatattttcaccagttaagcagactgtcttccaggaatctggtttgatcaaagtttttttcttcatcttctggtgatttctgaagggacgccagtaagatggttgctgcctccggaatagttagtagttggggatttgggcttcgtctttccggcagtggccggtcggagaggtcctttctccggctctggtcggagatgaagcggcgaccctgtgcccctttcaggtagagcatagcttgaggagtccagttccttctctccaacagtctctgcggagcgcagctggagtttcccaggaaaacaaacaccaggaaaagagccaaggttgttgctgccagacttctgagtcccttcatgttctgcgtcttttcagaacctgaaataactataacttatctgtgagtttt

SEQ ID NO: 355957 - DNA, 1758 bp, Homo Sapiens
agtcggcctaggcggggatcgggcggcgccgagctgaggtggtgagggactagctcccggatgtggagaagctggggagaaggcgtgggaggaagatggactcggtggagaagggggccgccacctccgtctccaacccgcgggggcgaccgtcccggggccggccgccgaagctgcagcgcaactctcgcggcggccagggccgaggtgtggagaagcccccgcacctggcagccctaattctggcccggggaggcagcaaaggcatccccctgaagaacattaagcacctggcgggggtcccgctcattggctgggtcctgcgtgcggccctggattcaggggccttccagagtgtatgggtttcgacagaccatgatgaaattgagaatgtggccaaacaatttggtgcacaagttcatcgaagaagttctgaagtttcaaaagacagctctacctcactagatgccatcatagaatttcttaattatcataatgaggttgacattgtaggaaatattcaagctacttctccatgtttacatcctactgatcttcaaaaagttgcagaaatgattcgagaagaaggatatgattctgttttctctgttgtgagacgccatcagtttcgatggagtgaaattcagaaaggagttcgtgaagtgaccgaacctctgaatttaaatccagctaaacggcctcgtcgacaagactgggatggagaattatatgaaaatggctcattttattttgctaaaagacatttgatagagatgggttacttgcagggtggaaaaatggcatactacgaaatgcgagctgaacatagtgtggatatagatgtggatattgattggcctattgcagagcaaagagtattaagatatggctattttggcaaagagaagcttaaggaaataaaacttttggtttgcaatattgatggatgtctcaccaatggccacatttatgtatcaggagaccaaaaagaaataatatcttatgatgtaaaagatgctattgggataagtttattaaagaaaagtggtattgaggtgaggctaatctcagaaagggcctgttcaaagcagacgctgtcttctttaaaactggattgcaaaatggaagtcagtgtatcagacaagctagcagttgtagatgaatggagaaaagaaatgggcctgtgctggaaagaagtggcatatcttggaaatgaagtgtctgatgaagagtgcttgaagagagtgggcctaagtggcgctcctgctgatgcctgttctactgcccagaaggctgttggatacatttgcaaatgtaatggtggccgtggtgccatccgagaatttgcagagcacatttgcctactaatggaaaaggttaataattcatgccaaaaatagaaattagcgtaatattgagaaaaaaatgatacagccttcttcagccagtttgcttttatttttgattaagtaaattccatgttgtaatgttacagagagtgtgatttggtttgtgatatatatatattgtgctctacttttctctttacgcaagataattatttagagactgattacagtctttctcagatttttagtaaatgcaagtaagaacatcatcaaagttcactttgtattgtaccctgtaaaactgtgtgtttgtgtgctttcaaagatgttgggattttatttatctggggacagtgtgtatggtaagacatgaccttctattaataaaactacatttctcaaacttgaa

SEQ ID NO: 355958 - DNA, 1005 bp, Homo Sapiens
ttatttcattcctgattcaaataagtcagctataaaaggacattttgagacagctgggggtatctcaacatatactaggttattagaggatattaaggaactattactgattttgtgggtttaatgatattctgtcagataaaaaattatatttatcagagataaatattgaagagtttttggataaaatattatgtctgggaattccttcttctccctttccccaaataaactagggggcagtgcatagaaaacaatattactaagtgattttaaattctgataaattttcaatataaaattggggttctcgcatatgtttgaaattttgcttaatgaaaaatttaaataacttacttagaattcatatataaaatttctaacatttgtaatatgcatggcaggtagcaattatgctccattcttcttctctagctcataagagtttatttttgattgcttagggaaaaccctggacctcaattatactgtaaaatatttttgttccatctaatctttagtattcttatatgcagtgcccctaggtcttactgaagttgccagagttacctgttggttgctgtctgcattatttagctagaatattctttgtctctttaaatgtttgctcagtatttattttacttgataggaaatgaagtgtctgatgaagagtgcttgaagagagtgggcctaagtggcgctcctgctgatgcctgttctactgcccagaaagctgttggatacatttgcaaatgttaatggtggccgtggtgccaatccgagaatttgcagagcacatttgcctactaaatggaacaggttcataattcatgccaaaaatagaaattagcgtaatattggagaaaaaatgattacagcttcttcaggcagtttgctttttatttttgattaagtaaatcccatgtgtactgttacagcagagtgtggattggcggggatatatatatattggggcccaactttctcttaggcagaaaatta

SEQ ID NO: 355959 - DNA, 705 bp, Homo Sapiens
ggcggcgccgagctgaggtggtgagggactagctcccggatgtggagaagctggggagaaggcgtgggaggaagatggactcggtggagaagggggccgccacctccgtctccaacccgcgggggcgaccgtcccggggccggccgccgaagctgcagcgcaactctcgcggcggccagggccgaggtgtggagaagcccccgcacctggcagccctaattctggcccggggaggcagcaaaggcatccccctgaagaacaataagcacctggcgggggtaccgctcattggctgggtcctgcgagcggccctggattcaggggccttccagaagtgcgcatgtgcgagagtgggcggcccggcctgggcgggggtcggcaaagggagtcgggctgctggaggggctggggcctccggggccaccgctattggaaaggggccatctctcatgccagggatgtgcaagatccggggtgactggggccgggctgagagcccaggaggaagggctccagctccttccttgttccgtagctgccaatggtcataacctgggacagttcctgtctccgcccttgagaatcatccgtaaaaggggagattacacctccccaaccgtcccctcctcccgggttgaccttacggggaaaagtaaaggaggccaccccggtgcaacatctgtgataatatgtgaacttctttgg

SEQ ID NO: 355960 - DNA, 1620 bp, Homo Sapiens
ggctggtacggtcggagattttggatcgcgcttcgcgtgtagaagcgtccgggtggcggaggccgcaggccgcaggagtgctggtggaggggcttccagaaagaccctgcggcagcgccccccctcggctctccccgcaggagagcgggcacctgcgcggcgccgggtgaaggcgagagcctcggcgagccctctgcagcggagccccctgcccatttggttttggaaccaccgggaggaactgggccattctaacacccgttgctaccatgctggccacccgcctctccagacccctgtcacggctcccaggaaaaaccctaagtgcctgtgatagagaaaatggagcaagacgcccactattgcttggttctacttcctttatcccgattggccgtcggacttatgccagtgcggcggagccggttggcagcaaagctgtcctggtcacaggctgtgactctggatttgggttctcattggccaagcatctgcattcaaaaggcttccttgtgtttgctggctgcttgatgaaggacaaaggccatgatggggtcaaggagctggacagcctaaacagtgaccgattgagaaccgtccagctcaatgtctgcagcagcgaagaggtggagaaagtggtggagattgtccgctcgagcctgaaggaccctgagaaaggcatgtggggcctcgttaacaatgccggcatctcaacgttcggggaggtggagttcaccagcctggagacctacaagcaggtggcagaagtgaacctttggggcacagtgcggatgacgaaatcctttctccccctcatccgaagggccaaaggccgcgtcgtcaatatcagcagcatgctgggccgcatggccaacccggcccgctccccgtactgcatcaccaagttcggggtagaggctttctcggactgcctgcgctatgagatgtaccccctgggcgtgaaggtcagcgtggtggagcccggcaacttcatcgctgccaccagcctttacagccctgagagcattcaggccatcgccaagaagatgtgggaggagctgcctgaggtcgtgcgcaaggactacggcaagaagtactttgatgaaaagatcgccaagatggagacctactgcagcagtggctccacagacacgtcccctgtcatcgatgctgtcacacacgccctgaccgccaccaccccctacacccgctaccaccccatggactactactggtggctgcgaatgcagatcatgacccacttgcctggagccatctccgacatgatctacatccgctgaagagtctcgctgtggcctctgtcagggatccctggtggaaggggaggggagggaggaacccatatagtcaactcttgattatccacgtgtggattatccaccatgccaggaagacccataactggttttaacactaactagagggaatgacttctttgcatagtgagtgacttgggccttcacaaacagggtgtggagtggcaggcagaggcctctaaatctcagggcaaacatggtgaatctatctctccggagataatttcatacagagattttaagaaaacatctttatattaaaaacagatctcatttgatcctt

SEQ ID NO: 355961 - DNA, 839 bp, Homo Sapiens
cgcgcttcgcgtgtagaagcgtcgggtggcggaggccgcaggccgcaggagtgctggtggaggggcttccagaaagaccctgcggcagcgccccccctcggctctccccgcaggagagcgggcacctgcgcggcgccgggtgaaggcgagagcctcggcgagccctctgcagcggagccccctgcccatttggttttggccagtcagcctggaaatctgcctgtagtcagctgatgcagagtcaccctgcagttcctactttgaggggttgcagaagcacatatttcactatggagggccgcctgcaggcctcgcgctgacaggatcttttgtgacgctgcaaatgtcctgaaccaccgggaggaactgggccattctaacacccgttgctaccatgctggccacccgcctctccagacccctgtcacggctcccaggaaaaaccctaagtgcctgtgatagagaaaatggagcaagacgcccactattgcttggttctacttcctttatcccgattggccgtcggacttatgccagtgcggcggagccggttggcagcaaagctgtcctggtcacaggctgtgactctggatttgggttctcattggccaagcatctgcattcaaaaggcttccttgtgtttgctggctgcttgatgaaggacaaaggccatgatggggtcaaggagctggacagcctaaacagtgaccgattgagaaccgtccagctcaatgtctgcagcagcgaagaggtggagaaagtgggtggagattgtccgctcgagcctgaaggaccctgagaaaggcatgtggggcctcgttaacaatgccggcatctca

SEQ ID NO: 355962 - DNA, 791 bp, Homo Sapiens
  misc_feature (56)..(64): n is a, c, g, or t
  misc_feature (209)..(209): n is a, c, g, or t
  misc_feature (211)..(211): n is a, c, g, or t
  misc_feature (225)..(225): n is a, c, g, or t
  misc_feature (390)..(390): n is a, c, g, or t
aaaagccccttttaaagcatctacttgaagattggtataattttcataaaatgtcnnnnnnnnnagtgtcccaaagatatcttagataaactattttgaagttcagatttcagatgaggcaacattttcttgagataattacccaagtttcatccatgttgaatggtacaaaatatttctgtgaaactaacaggaagatattgtcatgnancgataactaggatnacgggttgctttgttacccagcctaatttgaacgagtggcagaggctactacaaaaagcaaccttttcattttcactaagagtttaaaagctattgtattattaaaaagtctttacaatgcttgtttcaaagaaccaacagaaaaaaaagctaagaaaactgagnactaacattaaaaaaattaaatttagaataagaatgatttctttaatttgtcctttttttctttggtctaaaacattattaaatttttgtaaatattttgatttaatgtgtcttagatcctcattattttaatacaggaaaagaaaagatttagtaatttcttaccatgctaatatgtaaagttcatgccatccaggcatttaagagcgatcctcatcccttcagcaatatgtatttgagttcacactatttctgttttacagcagttttgaaaaacacatactatgccaccaattgtcatattatttttagatgatgtaacatagccatcaaaattaatattatgtaatgcctaatacttagtatgtaaatgtcacgagatcatttttacattaaacgtg

SEQ ID NO: 355963 - DNA, 410 bp, Homo Sapiens
ttttgttcctttttttcctgaccttcggtttatgttttccatttctttggagtaatgctgctctagattgttctaaatagaatgtgggcttcataatttttttcccacaaaaacagagtagtcaacttatatagtcaattacatcaggacattttgtgtttcttacagaagcaaaccataggctcctcttttccttaaaactacttagataaactgtattcgtgaactgcatgctggaaaatgctactattatgctaaataatgctaaccaacatttaaaatgtgcaaaactaataaagattacattttttattttattgtttgcccagtcactttttgttaacagaatattctaatgatatggagattttttacattacaaattgggggagaaggggagcgcgcgcaca

SEQ ID NO: 355964 - DNA, 1716 bp, Homo Sapiens
  misc_feature (492)..(533): n is a, c, g, or t
  misc_feature (597)..(611): n is a, c, g, or t
  misc_feature (1196)..(1222): n is a, c, g, or t
ccccagctcactttaaggctgtcacggggctgcgcagatccccactcctcagtagcgcacggttaaaggagaaaccagactccctgacctaaatcactcccagtcctctctggatgcgggacagctgtcgactagcagtgacacaaccagccatcaagtgaagaatcgttgcgactgcagtctgtgtgcaggtggagcccgtgagaatgacagtctaatttcggtcatccaacggcttttccttattttcctaaataatcgtgctcgctaagtatacagttgtctggattagcctgcctgccatgcagtcctcatcaactctggctggaaatcagggtgccaggcaagccgcctttagccctggctcctttctgcgtgatgctatgcagctaggatgggtcatgctgacaacaaagaaggaagcagaaagcatcactttctcttctcttgtgatgttagcggaacataactcttcttcgcagtgatgccctnnnnnnnnnnnnnnnnnnnnnnnnnnnnnnnnnnnnnnnnnntttaattcatctaatcgaagagcccaacaaatatcatcatggatgtgatttttaataatttggnnnnnnnnnnnnnnngacagcctgtggagacagcgattcgaaacagcggcacatttaggttattgccaatttgaaatacttggtttgtgaagctgagccctaagggacaagctcggtaactgaggaagagatcgtagataaagaaataaaaatgacaagcgtaatggaggctctgcgaagggactgtcagagcatcagttcatggatggcaatttcaccaggctgagattgaataattcatagattgaaattaccctgctttcacctttcccatttaagccggcatgatctgaatctctcataaattttcaagataaagtaaaatgccaatttgaatctgaagagcttttaaaaccagatgctgcatccctgaatctttcggtatctttcacaattatcctatgagaacagcacttcatcacgaagcaccattaccagggaaaattacggtgattacaatagcaacaatagaataccatcaaatgatctctaatttacctaatttgctaagactgactgtacggttttgatatccattgtatgtcaccatgcaccggcacccgtgaagctatctcgcactggaacaaaagtggcatcggnnnnnnnnnnnnnnnnnnnnnnnnnnncacgcacaccctgctaccttaactgtgaatgcctagcaaagaacattctcctaggttacaatatttctttcctttggttcacattttcgcttttttccaatgcctctaccccaaatgtgtttggggaaatggagagcctgtcatgggttgggagactgttttttgatacagaagagcattgacttgttaatttatataccctctttattttaatgtatacaagcctgtgtttactaaaagggagggaggatgctgttctgggagagtaattttaaaatgcagccgagatgtagcatatgtgtttgtttcttctttgaaacccctgtctgtctctttcaggttagaaatcctttcagggaagtttagtcctggtgtgatgtgtcaaaaacctctcagattgcaaagaagctcaggagatacaatcagtaataactctgtacagcttttattaaaagcactgcatgttccattcaggtgattaaatgaaggcctcg

SEQ ID NO: 355965 - DNA, 987 bp, Homo Sapiens
  misc_feature (889)..(914): n is a, c, g, or t
  misc_feature (917)..(917): n is a, c, g, or t
  misc_feature (923)..(923): n is a, c, g, or t
  misc_feature (937)..(937): n is a, c, g, or t
  misc_feature (945)..(945): n is a, c, g, or t
  misc_feature (962)..(962): n is a, c, g, or t
  misc_feature (964)..(964): n is a, c, g, or t
  misc_feature (973)..(973): n is a, c, g, or t
  misc_feature (980)..(980): n is a, c, g, or t
gtcgcaatgcagcaaagcagaagcagacaactaggcacaaagcaacagagttttaaagttttcttctcctgctactacttagcatgtcttacatgaggagtatttacctttgtttagccaggagcagagatgcatcctgaatgtacacgatggcttctaacttggcagcgtgaattttcagctgagcaggtactgctcggagacttgtaaccaaaccgcctctgatggagcacggctggtctcccaccatgtgtgtgaatagtttgggggcttcttatgccacgctgctctacctgcaggaataaaggctaggacaaaggagaggatgcttgctatggtttgtctggctggggcctgtgcgagcgactcaccgcactgatgctgtgtgactccccagctcacatttaaggctggtcacggggctggcgcagatccccactcctcagttagcgcacggtttaaaggagaaaccagactccctgacctaaatcactcccagtcctctctggatgcgggacagctgtcgactagcagtgacacaaccagccatcaagtggagaatcgttgcgactgcagtctgtgtgcaggtggagcccgtgagaatgacagtctaatttcggtcatccaacggcttttccttattttcctaaataatcgtgctcgctaagtatacagttgtctggattagcctgcctgccatgcagtcctcatcaactctggctggaaatcagggtgccaggcaagccgcctttagccctggctcctttctgcgtgatgctatgcagctaggatgggtcatgctgacaacaaagaagggaagcagaaagcatcactttctcttctcttgtgatgttagcggaacataactcttcttcgcagtgatgccctnnnnnnnnnnnnnnnnnnnnnnnnnnctntgtgtntatatgttttattnatctaatngagagcccaaaaatatntnatgggtgtnattttanaatttgg

SEQ ID NO: 355966 - DNA, 692 bp, Homo Sapiens
tttctaagccttcattgcatattaataaaacaaatctttgaatatacagcaatgtaaaacttttaaaaatattaaattcctataactggggaccgttggtatgaagaagggatgatgagcactggtacagagcactctgtaccaacacacagaatttactgttctgcaaatgaccaatagtaaaaattttaaagatggcacaatcctagcaggcattttttcttttgttacaagatacaagagtttaacagttatttaaatgtaatcctgaagcagcctgcaaattttaccttttgcttttagttctgtcagtgtggtccctatctttggggtacctatccctgtccttttctccttctctgagcttacttatctataggtctttgcccttctcatagacttcacttttaggtttatctgacttcttgtctacattcctactatctctggttgcttttccatctgttcctcgatcaccatgtgaatacagtgccctcttctttatcttagggcccttcctccctgctttttgtgtctcatttcttgctttgaattctgactctttcgttttgccctttcaaatttttggtcccattccttttcaatgtcgctctttttttcaaacggtacctatccattattaaaatcctctgtgcgttccccctttaccctcctgttaatttgtcctttcc

SEQ ID NO: 355967 - DNA, 1631 bp, Homo Sapiens
  misc_feature (61)..(61): n is a, c, g, or t
  misc_feature (84)..(84): n is a, c, g, or t
  misc_feature (231)..(231): n is a, c, g, or t
  misc_feature (260)..(260): n is a, c, g, or t
  misc_feature (270)..(270): n is a, c, g, or t
  misc_feature (284)..(284): n is a, c, g, or t
  misc_feature (331)..(331): n is a, c, g, or t
  misc_feature (362)..(362): n is a, c, g, or t
  misc_feature (398)..(411): n is a, c, g, or t
  misc_feature (416)..(489): n is a, c, g, or t
  misc_feature (525)..(525): n is a, c, g, or t
  misc_feature (544)..(673): n is a, c, g, or t
ctgggctgggtgggctccgcacttccttcccgctccgtgccgcgcgtcccggcacccttangcccactccgggaggggtctgcntcctgggcccgcctgccggctgttccgtgtcccgccgtgcccgtcgcgggcggcctcgcgcctgttccgctgcaggttggccccggcggcgggagcgcccccgatccggacaaaaaaacgagcgctcggtgcgactagcggcgcggngcggctttgccagcgcgcgtgtgcttgtntccgcgagtntgcgtgtgtgtgtncatttggatgtggaatgccgggtgtttcgggagcaatgaggcaactnaggcccgggagggagcccagtcatataccancatctaggattggtttgtgtgatttgaacccactannnnnnnnnnnnnngagannnnnnnnnnnnnnnnnnnnnnnnnnnnnnnnnnnnnnnnnnnnnnnnnnnnnnnnnnnnnnnnnnnnnnnnnnctcaggtgatcctcccagctcagcctcctgaataantaggaccacaggcgtacannnnnnnnnnnnnnnnnnnnnnnnnnnnnnnnnnnnnnnnnnnnnnnnnnnnnnnnnnnnnnnnnnnnnnnnnnnnnnnnnnnnnnnnnnnnnnnnnnnnnnnnnnnnnnnnnnnnnnnnnnnnnnnnnnctgagccaccgcgcccagcctgaaccccctacttaatgtcagaaatttgatttgacttcacagggaaagccctgagaaactaccagaacggggtccctggggccagtgttgggagcgtacggtgaagtggcagggctgctgcgcccgtgcggaactccgctgtggaagattagcccctttggtgactcgtcggttctggccgctttgggaccctctactgtgcagtctgaactttcagcaggtggaggagggcagagagagagctgagatcgttggtccatgccagtgcgagagccagtacggccggaagccatgatgggactttcagttcctttcttggtggaggccagcacaggggagagggggtgcccacagatgctagaagcttaaaggctgctgggggctagcggcctcagaacataaggttaccagacagcacgggacaggtggtaagacaactgtagctcgtcagtatgagcgggaaacaagcccccgcgcagtcggtgtcgctgtgaacgaaaaagggccttccttacacagaaaacggggtctctgggggatccagtaacgtgcccaaccacagagaccaggtgagactggctgatggtgtctggggctgcaggtgacttagttgggggacctgctcttggcctccagactgggcctgatggcgtgggcgcctgcctgtgtgcaggcccaagggctcagctgcctctgtctgttcccagacccctcctcctgtagagagtggtgctgccctctcgggatgtacctgcaggtggagacccgcaccagctcccgcctccatctgaagagggctccaggcatccggtcctggtccctgctggttggtaaggctctccacgtccctccccagaaccccagaaccggaagcctgactttcaaaaagggtgaaaatgaaacaaaatattttctcttttttctatgacctaaattt

SEQ ID NO: 355968 - DNA, 2068 bp, Homo Sapiens
  misc_feature (1512)..(1611): n is a, c, g, or t
  misc_feature (1638)..(1638): n is a, c, g, or t
gtcggctcggctccgctccaatcccggaagtgcgcgcggccccgcccccgccggttcgcgtctctctgctgcggcgcggggaccgctgtgctctcgacccctcctcctgtagagagtggtgctgccctctcgggatgtacctgcaggtggagacccgcaccagctcccgcctccatctgaagagggctccaggcatccggtcctggtccctgctggttggaatcttgtcgattggcctggctgctgcctactacagcggagatagcctgggctggaagctcttctacgtcacaggctgcctgtttgtggctgtgcagaacttggaggactgggaggaagccatcttcgacaagagcacagggaaggttgttttgaagacgttcagcctctacaagaagctgctgactcttttcagagctggccacgaccaggtggtggtcctgctccatgatgtccgtgatgtgagcgtggaggaggagaaggtccggtacttcgggaaaggctacatggtggtgctccggcttgcgacgggcttctcccaccccctcacgcagagtgcagtcatgggccaccgcagtgatgtggaagccatcgccaagctcatcaccagcttcctggagctgcactgccttgagagccccacagagctgtctcagagcagcgacagtgaggccggtgaccctgcaagccagagctgacagccccactgtgcctgagcccgtgcaccgcccacaggacccatggcacattcccggtgtgcctgagcccgtgcaccgcccacaggacccgtggcacattcccggtgtgcctgagcccgtgcaccgcccacaggacccgtggcacattcccggtgtgcctgagcccgtgcaccgcccacaggacccgtggcacattcccggtgtgcctgagcccgtgcaccgcccacaggacccgtggccttggcttcagttggtgcctccagccgagttggcctattgcctgctcatgctgctgcttgcacactgcatgaaacagcaggccagaccaggacatccagactttctccatcgtgaggcctgggcctgcctttctgcagccggaggtctcgccagccctggactcctgctttgggccacagcaagacctcgggcgagtggagaggcggggccaggccgggcccttgtgggtgctgatgctgcatgttgtccccgacacagcgtcctctccctggtggacatccccagcggtcaggtgcttccccaagggcagtgaggggtgaacatccagggcctacctggctgtgcacgctgcagccacactgtggaagctgcccctccccgaggacccgcctcccttgctgatgccaggatctcggcgcatagaccactcttgccccagcggtcgtcacagaaaggtctctctgttcctcacactcagcttcagcataagctgtgaggccagaaaaaaggtcagctcttctagtatcgtgcagtgcttaaaaaccgggagctccagccgggcgcactggttcannnnnnnnnnnnnnnnnnnnnnnnnnnnnnnnnnnnnnnnnnnnnnnnnnnnnnnnnnnnnnnnnnnnnnnnnnnnnnnnnnnnnnnnnnnnnnnnnnnngtaaaaaaactaaccaaacaggaaaanactgggagattttctgcagaaattgagttccagcctctctcgaacctgggaagacctggcaggagggggctgggctctcggctacagacttctccccaccccgtaggagctgaacgccaaccatcctgacccgccagtgctcttggtctcctgagtgtacccaggtcctcccaggtgcggtgtgcaccgagcgcgcctggcctgatgccctggcctgtgagctggggactcctgggccctgtgagcccctaggcggcaggcccaggaatggctgggtaggacagggaacacctttgccccacgtctggctgtgacctcggtgaaagccgacaggagagagatgggaccctcctcctcagtagtggctgccagtccctcgttgcaggacagggtcatcataaccataaataacccttcacgtgtcaaaaaa

SEQ ID NO: 355969 - DNA, 1107 bp, Homo Sapiens
gcctgggtggcgaattcggcacgaggtggtgatgcagctgtagctcgtgagtctgagcgggaaacagcccccgcgcagtcggtgtcgctgtgaacggaaaagggccttccttacacaggaaacggggtctctgggggatccagtgacgtgcccaaccacagagaccagacccctcctcctgtagagagtggtgctgccctctcgggatgtacctgcaggtggagacccgcaccagctcccgcctccatctgaagagggctccaggcatccggtcctggtccctgctggttggaatcttgtcgattggcctggctgctgcctactacagcggagatagcctgggctggaagctcttctacgtcacaggctgcctgtttgtggctgtgcagaacttggaggactgggaggaagccatcttcgacaagagcacagggaaggttgttttgaagacgttcagcctctacaagaagctgctgactcttttcagagctggccacgaccaggtggtggtcctgctccatgatgtccgtgatgtgagcgtggaggaggagaaggtccggtacttcgggaaaggctacatggtggtgctccggcttgcgacgggcttctcccaccccctcacgcagagtgcagtcatgggccaccgcagtgatgtggaagccatcgccaagctcatcaccagcttcctggagctgcactgccttgagagccccacagagctgtctcagagcagcgacagtgaggccggtgaccctgcaagccagagctgacagccccactgtgcctgagcccgtgcaccgcccacaggacccatggcacattcccggtgtgcctgagcccgtgcaccggccacaggacccgtggcacattcccggtgtacctgagcccgtgcaccgcccacaagacccgtggcacattcccgggatgtggcattgagcaccggtgcgacggcccacaaggaacccggtggcaccattcccgggtagttcccttgagcccgttgaacccgccccacaggaccccgtgggccttggatcaagtggggggctccacaagcggagtatggcgttataggcgtgcaaaacctgtggatggaccaggtgtgca

SEQ ID NO: 355970 - DNA, 606 bp, Homo Sapiens
cagttggcagcactgggccaggctgaaaggactcatgaggggctccgaggtgggagggccggccacggggaaagctgactcgcatcccattgtggcaactctgggaagaaagcactttggtgaagatagtcatggagagcttctaagagaaaaatgccttcggggaattccttggccaagaacggtcccagatgagtgcaggggccatgtcctgatgaacggagacctccaagcaggcaccaacgcttcaggacggggaggcgctaggccacccagggcccttcctcctcctttcattcccattgcaaaaaacccaggagctgaacagccctggactctgtcccacacccgagccggccttacctcccagtcctccaagttctgcacagccacaaacaggcagcctgtgacgtagaagagcttccagcccaggctatctggagatgggcatagggcgccagcctgtgagctccagggacatgcccacgggaggccccgcctagcacagcctcccccagacgctggccagagcccacgcttgcaaggaccccctgggcagcttcctgcgctgctgaccctgcccgcccactcaggacccacacgcgc

SEQ ID NO: 355971 - DNA, 398 bp, Homo Sapiens
aaaaaaggagaaagcagtttaaccacaaacagtgaaacagagctggcagacgcctgaaactccatggaaccatgcagctgtaccctagggctcctcccaggaaaagagagatgtcaacgttggcccaaggtgtcctgaagcactgggattggattaactcgagcgatggccttcccagccctccgtgctgcagagcctctgctcgctaggctgccttcatctcactctgtgtgctgtgcctgtgcacctgtcttgtcaataactgcatatattgtgttgcgttgcctgtcttgctggataactgcatatattgtgttcagttgtgtatttgttttgctttcagtctatatacagttgggtttccaacctctgattctggaataaacagttgcagcgtg

SEQ ID NO: 355972 - DNA, 1685 bp, Homo Sapiens
ttttttaacatattaccacatccaacttctttattcttgagaaaacaaaaaagtccaaaatcaaaggaaagcacccgttttaaaccctcatatctttctcagggctcactgcagtctggccatatctcaagcaggtctgtccaatggcttggaacatagacttttgcagtgaaactttaaaaacattacttgaattaggattacacaaaaaaaactaaattctaagtgagcacaactatcgctgagaccctgaaatttcaggaaataaacatggttcaaaactcaaactgttcatcaaaataattacgcaggtcagccaccactgcagaaccatcactgctcagaggaattgagtcagcaatgactgatctcatcatctcttcattagcacataagcggttcaacttgggatacgcaaggagtctctgcagaggtacgaaaaatttatctccaacacagaagggtgtgggagagttctctatcttggccttctcaacctctgtgaagactggtccaaagcatgggacaggggcctttgagccaccaatgtctttgggcttatcaccccgttccccagcctgttctttccgccttggcaggtggctcactcttaagctttccacttgttgggacacctcattaaccaacacaagtttaaagaacctttcctgctgtaagcttgggtatgaggtggtaaaaacagctttataaacatgctgatcatgctgctctgaaagacatgattctgttgcctttcctccatttttccggaagattcctatctgggtacagtatccaacattctcagctccagctggtggttccccgacaccagtaaactccacagagtaatcatagcgatttgccacatataaagcccaggtctgaaactccattctggtccactcaaatttatgatctgaatctcttaaggtcactgatggaaacaggggattgaattcagagtttggtgtgctgatgacaatcatggatggagacaggtacccaaataccacttcaggaaatctggccagatcacctgaatccaaatgttctattaattcaatacacgttatcaagtcaaatccaagcaaacgagagtctctctccacaacggagccatgatacaatgtgatggtcaaattcagatcccgaggtttcagaaaatcccccaggaaaggagctaacgaatcccctctccatcgtaatttatcctcattaatatctactccaacaagcaattcaatgcatggattgacttttagcagccttaagagtgaagtatcaccacatcccaggtctgcaaccttcttaggctcatgttgatccactaaatttttaacgaactggtaccgctgtctgtatagtggaggtttaaactgaattgccgtctccctgggaacttcttcaaaattaccgtcaaccacactactgcactgtagattattttcttccattttgtttcgaagttttgttgaaacaaaaatgaagatttatccttcaagctctatttgagagaatcagcactgactcagtgaaaccaacgcttctgtctttgtacgggccgtcgcttccatcatcctgcggtaagcagcatgcccaaccgaaaaaacaaagctcgtcgcggagccgccagcgtcctcaactcagcgccgccctgacgcccgcgcaatcccgggaattcc

SEQ ID NO: 355973 - DNA, 1219 bp, Homo Sapiens
  misc_feature (1160)..(1160): n is a, c, g, or t
acccgccccaccccgacccaaatggctggtaccggtccggaattctcgggatggctcccggggcccaaggccgaccgtgagagcgcacgagctgagtcagtgctgattctctcaaatagagcttgaaggataaatcttcatttttgtttcaacaaaacttcgaaacaaaatggaagaaaataatctacagtgcagtagtgtggttgacggtaattttgaagaagttcccagggagacggcaattcagtttaaacctccactatacagacagcggtaccagttcgttaaaaatttagtggatcaacatgagcctaagaaggttgcagacctgggatgtggtgatacttcactcttaaggctgctaaaagtcaatccatgcattgaattgcttgttggagtagatattaatgaggataaattacgatggagaggggattcgttagctcctttcctgggggattttctgaaacctcgggatctgaatttgaccatcacattgtatcatggctccgttgtggagagagactctcgtttgcttggatttgacttgataacgtgtattgaattaatagaacatttggattcaggtgatctggccagatttcctgaagtggtatttgggtacctgtctccatccatgattgtcatcagcacacccaaactctgaattcaatcccctgtttccatcagtgaccttaagagattcagatcataaatttgagtggaccagaatggagtttcagaccctgggctttatatgtgggcaaatcgctatgattacctctgtggaagtttactgggggtccggggaaaccacccagctgggagcctgaagcaatggttgggataactgggaacccccagataagggaattcctttcccggaaaaaaattgggaagggaaaaggggcgaaacaagcaaaatcctggggcctttttcccccaaacccacgcccctggtgaaccagccaagtgggtctttattaaacgacctggggtctttttttaacccgcccgttcatataacccccaagcgcttttttcctccttctagggaaaaagagggtttcatttccccaacacaccttgggccggtgatggggaggaaaaacaaagcgacgccggaacccgccaacagaccaacgggggtgcggcaaacncactctttaatcagactcggaaccgccccacacgcacgtgacacaaaaaggggaggggg

SEQ ID NO: 355974 - DNA, 2379 bp, Homo Sapiens
agactctcttctttgagttcttaaagtcactcaaagaagagagcatagagccagtaaaatctttagaaccagagatcctagaatcactgaagtctgcgggaagttcgacggagactctcttccttcccaggggctttggacatagagcagggtggaagctgcaagtactgggaaggaagagagtttcacagaaacaaagctttgtcacacagaaatgagttctgtctcactggtgacttcatccctcaggctccagctgagcagagattttaatcagcttccttaatgggtattgacactgctcaggaagcagtagaccctgtcagggacagctattgatcttttgtgttctgattagattggaaaatagatcaacttcattgtagtccaggaactgttggtcacagctactaggaatgaggtgatttctgagggctgagaaaaaacacagaatcttggccagcagccagcagctgcatggtgaaagatgcattcacttctcctttgagagttggggttgagggcaaacatagaacccaggtttggcttacaacccagtgtcccggaagccctccttcgggagaactgtaagtaagaggtgggtgtgtctaaagacaataccattaatgaatgttctggccttacctaaaaaggtttagcaatttggggataactcttggatctagcttatgtgcgttcacatgcacatttgctagcccagagcttttaaaatgaggtctggcatatacttgattacaaatgaaaactcagaaaccaattttatttattaaatcatatcttttgtttttccccctcccttctaatcccccaaaggacctatttgagctgttccccaattcatctgcttattttggaccatgaatctgccagagtgatattttctgttatttctcctccaaatttttccctgatgtttccaataaagatttacttgggtggccccttaaggtgacatcaggatgctcttatgtccttccagaataagcatacacttcactcctctccctttcatctccctctgcattcttaattccttgcttttctcacttggagccgagggtgctttagagaggtggttttccatgaatcagccaagattcctgtagaagttgggtataccaaccaccaccaccaccgccccctattccagtttcaaagctcctcggctatgctaatgtcccctcagagatgaggtttgacttttaggcccgtatgactcctccatagcctggccaaggagaccatgagtagccatgtctggtttactctttatcctgagactgtttgtttatagcttaaaacagaagtgtgtcttcccagcacaaacctaatcaatcagtgtatcagtgcatctggtggcaacagctcagcccattcaaagagcaaggattcaggaaaggcacactgatggtggggagcctcttaagagcctctaatgttctcccaaaaccagagttgagagtcggagtgccagtcgtcggggcccactattcctgaataagggacatgcaagggccagaagtagcttgactctcgcctaaatatctgtgcctttgcctgtcctttctcccactctactgaaacccggaacagattcccgcttgccttctgatgaagagaggttaggtaaagagagtttggaggaaaaaagacaccaggaggcaggctgtggggtaggagagggttctgagaggaggcagcaatccagaatacctccttttctagccagcatcccttgaacttttgaaaggttgtgcctaccactggctggcacaccagggcaatgatttccctgcagaaggaaggaaagaatgtttcacccttgcacccttcttggagaagctacagcctgtgctcagttgagtggttcacactcagactttggctttatggttttccttcccccttgtctttgccctgaccttgatcaacaggggtgaaaagaaccaccctgaggtttccatgcctctcccattttagtggtagcattttgtgtctttactccacccttcaccctagttccaccaaggttcacacaccagatgtaactgtttttcagctgagttgtatggattaacttcagtccactgtaaatacacctgggatggggtggggttggggttgtttagggagaagcagccagacttgctttgtgaactgaatgtatttttatgcaattttgagtggcctttcaaccctaagatgaatggttttgttttactggttgttgttatatagttttgagtattctgtgtttgaaagtttgggaataataatattcacttctatatgatgcctgtaaacacaacagtatttataaatgagtaaataaaactgtgttttaactttgaaaaaaaa

SEQ ID NO: 355975 - DNA, 2014 bp, Homo Sapiens
  misc_feature (1451)..(1451): n is a, c, g, or t
  misc_feature (1456)..(1456): n is a, c, g, or t
  misc_feature (1592)..(1593): n is a, c, g, or t
  misc_feature (1595)..(1595): n is a, c, g, or t
  misc_feature (1598)..(1598): n is a, c, g, or t
  misc_feature (1981)..(1981): n is a, c, g, or t
  misc_feature (1995)..(1995): n is a, c, g, or t
ggagcacagcttctgcgcaccgcacgatactgggagtccaggcgccaagggagggggaaggcaaaaggggaaacggtgcaaacggcgtggccgccatcttgcttgtgcccccgcttcgcgcgcgctccgttctccgtgacgcacacttccccctcccctccgccgcgcctgggcctctgcattgcccgactccgtaggagcgcgggggcggctcctgctcttcctggactcctgagcagagttgtcgagatgtccacagaaggaggatttggtggtactagcagcagtgatgcccagcaaagtctacagtcgttctggcctcgggtcatggaagaaatccggaatttaacagtgaaagacttccgagtgcaggaactcccactggctcgtattaagaagattatgaaactggatgaagatgtgaagatgatcagtgcagaagcgcctgtactctttgccaaggcagcccagatttttatcacagagttgactcttcgagcctggattcacacagaagataacaagcgccggactctacagagaaatgatatcgccatggcaattacaaaatttgatcagtttgattttctcatcgatattgttccaagagatgaactgaaacctccaaagcgtcaggaggaggtgcgccagtctgtaactcctgccgagccagtccagtactatttcacgctggctcagcaacccaccgctgtccaagtccagggccagcagcaaggccagcagaccaccagctccacgaccaccatccagcctgggcagatcatcatcgcacagcctcagcagggccagaccacacctgtgacaatgcaggttggagaaggtcagcaggtgcagattgtccaggctcagccacagggtcaagcccaacaggcccagagtggcactggacagaccatgcaggtgatgcagcagatcatcactaacacaggagagatccagcagatcccggtgcagctgaatgccggccagctgcagtatatccgcttagcccagcctgtatcaggcactcaagttgtgcagggacagatccagacacttgccaccaatgctcaacagattacacagacagaggtccagcaaggacagcagcagttcagccagttcacagatggacagcagctctaccagatccagcaagtcaccatgcctgcgggccaggacctcgcccagcccatgttcatccagtcagccaaccagccctccgacgggcaggccccccaggtgaccggcgactgagggcctgagctggcaaggccaaggacacccaacacaatttttgccatacagccccaggcaatgggcacagccttcctccccagaggacccggccgacctcagcgcctcctgcaggctaggacactggtgcactacaccccatgcctgggggccgagattctccagcagaaagatgcaatattttttgttccctnttttnccatttttttctctaaggaatcaatatttcaatatgttgagtgtgtgtccaatgctatgaaattaaaatattaaataacatatttatggcattttcttgaagagtgtggttgaagaaatatttctccctttgtttnncnttnttttttgtttgttactgccacttctttttaggagcaaatctccccaggggtgtacggtatttcttgactctgggaacagctgctacccccaagacttgccacgttgttctgccctcagatggaattaggtgaatgtgtgtagctgctttttcactcgtggtcctctccccatcccttgctctgaccccagagctctgtgtatttgcatccagaggccatggaaacattctttgcatttaagagacagatttattccctgtggagagtgggtggattcattgccacactcttttctcccagggacccaggaaactaggactttgtgtgtttgctgcccacctcccttttattttttaaatgcattaaaaactgtgcaagtctcnctttgcagtggacntcagagctgcatgaaatgc

SEQ ID NO: 355976 - DNA, 896 bp, Homo Sapiens
cccatccattagcaagtgtacagagatatcgtcctggcaattgtgcatctttctcctttgaccttagcagtttgcatggcagattgtgccaagatgaggcctgtccagggacccatgcaataaaagttgtcgagatgtccacagaaggaggatttggtggtactagcagcagtgatgcccagcaaagtctacagtcgttctggcctcgggtcatggaagaaatccggaatttaacagtgaaagacttccgagtgcaggaactcccactggctcgtattaagaagattatgaaactggatgaagatgtgaagatgatcagtgcagaagcgcctgtactctttgccaaggcagcccagatttttatcacagagttgactcttcgagcctggattcacacagaagataacaagcgccggactctacagagaaatgatatcgccatggcaattacaaaatttgatcagtttgattttctcatcgatattgttccaagagatgaactgaaacctccaaagcgtcaggaggaggtgcgccagtctgtaactcctgccgagccagtccagtactatttcacgctggctcagcaacccaccgctgtccaagtccagggccagcagcaaggccagcagaccaccagctccacgaccaccatccagcctgggcagatcatcatcgcacagcctcagcagggccagaccacacctgtgacaatgcaggttggagaaggtcagcaggtgcagattgtccaggctcagccacagggtcaagcccaacaggcccagagtggcactggacagaccatgcaggtgatgcagcagatcatcactaacacaggagagatccagcagatcccggtgcagctgaatgccggccagctgcagtatatccgcttagcc

SEQ ID NO: 355977 - DNA, 968 bp, Homo Sapiens
gcggtttggggatttccctggtttaaggatgttcggcggatcaccggcaggtcttcccaggccacttgggccttttgggcttgaccctggggctgaccttggaccaattgcaactggtggaccttctccaaccggcatgtcaacaggtgtgttctggcctgctggaggctgtgcgatgatgatctgcccaggctggatggtgtcgtggagctggtggtctgctggccttgctgctggccctggacttggacagcggtggttgctgagccagcgtgaaatagtactggactggctcggcaggagttacagactggcgcacctcctcctgagcgctttggagatttccaggtcatctcttggaacaatatcgatgagaaaatcaaactgatcaaattttgtaattgccatggcgatatcatttctctgtagagtccggcgcttgttatcttctgtgtgaatccaggctcgaagagtcaactctgtgataaaaatctgggctgccttggcaaagagtacaggcgcttctgcactgatcatcttcacatcttcatccagtttcataatcttcttaatacgagccagtgggagttcctgcactcggaagtctttcactgttaaattccggatttcttccatgacccgaggccagaacgactgtagactttgctgggcatcactgctgctagtaccaccaaatcctccttctgtggacatctcgacaacgggaactgcattaattttacatgtagttatttatacctccaccgactgggagaatttaagtcactcctatccctaccccccaaaggacggaggaaacaaaaggcagcaggagatgcagaaacatgagtctggaatgtccactccactgaaaacccgaacagctgtcctcccaccccccaacaaactattcgccatttttctttgtctttcagctaacccctgcctcaggacacactattgaaaaa

SEQ ID NO: 355978 - DNA, 549 bp, Homo Sapiens
  misc_feature (104)..(117): n is a, c, g, or t
tcaatatgttgagtggtgtgtcaatgctatgaaattaaaatattaaataacatatttatggcattttcttgaagagtgtggttgaagaaatatttctcctttgnnnnnnnnnnnnnngttgttactgccacttctttttaggagcaaatctccccaggggtgtacggtatttcttgactctgggaacagctgctacccccaagacttgccacgttgttctgccctcagatggaattaggtgaatgtgtgtagctgctttttcactcgtggtcctctccccatcccttgctctgaccccagagctctgtgtatttgcatccagaggccatggaaacattctttgcatttaagagacagatttattccctgtggagagtgggtggattcattgccacactcttttctcccagggacccaggaaactaggactttgtgtgtttgctgcccacctcccttttattttttaaatgcattaaaaactgtgctagtctcctttgcatggacttcaagctgcatgaaatgcaataaatctcattttagataaaaaaa

SEQ ID NO: 355979 - DNA, 1471 bp, Homo Sapiens
agcatggcggacaccgacctgttcatggaatgtgaggaggaggagttggagccatggcagaaaatcagtgatgtcattgaggactctgtagttgaagattataattcagtggataaaactaccacagtttctgtgagccagcagccagtctcggctccagtgcccatcgctgcccatgcttctgttgctgggcacctctctacatccaccaccgttagtagcagcggggcacagaacagcgacagtacaaagaagactcttgtcacactaattgccaacaacaatgctggcaatcctttggtccagcaaggtggacagccactcatcctgacccagaatccagccccaggtctgggcacaatggttactcaaccagtattgaggcctgttcaggtcatgcagaatgccaatcatgtgactagttcccctgtggcctcacaaccaatatttatcactacgcagggatttcctgtaaggaatgtccggcctgtacaaaatgcaatgaatcaggttgggattgtgctgaacgtacagcaaggccaaacggttagaccaattacactagttccagccccaggtacccagtttgttaagccgacagttggagttccacaagtgttctcccagatgacccctgtgaggccaggctccacaatgcctgtgaggcccaccaccaacaccttcaccaccgtcatcccggccactcttaccattcgaagcaccgtcccacagtcccagtcccagcagaccaagtccactcccagcacttctaccactcccactgccacacagccaacctcactggggcaactagctgttcagtctccaggccagtcaaaccagaccacgaatcccaagctagctccctccttcccctctccacctgcagtgagcattgccagctttgtcactgtgaagcgacctggtgttacaggcgaaaatagcaatgaagtggccaaattggtgaatacccttaacaccatcccttccctgggccagagtcctgggccagtggtggtgtccaacaacagctctgctcatggctctcaaagaaccagcggacctgagtcttcaatgaaagtactgttgcccagaaatggttgaataccagaagaaaggaaagtccctggattcagaacccagtgtcccatcagcagcaaagcccccatcccctgagaaaacagctcctgttgcttcccacacccctcttctacaccctattcctgctctgtcaccgccctaccaaaagtaccagaaccaaatgagaacgtgggcgatgccgtccagaccaaactcattatgcttgtagatgacttctactatggacgggatggtggcaaagtagcccagctcacaaatttccctaaggtcgccacatctttccgatgcccacattgtaccaaaaggctaaaaaacaatattcgattcatgaaccatatgaacaccacgcagacgcgctaatggaccgcta

SEQ ID NO: 355980 - DNA, 970 bp, Homo Sapiens
cagacaagtcactccagcacttctaccctccactgcccacagccaacctcactggggcaactagctgttcagtctccaggccagtcaaaccagaccacgaatcccaagctagctccctccttcccctctccacctgcagtgagcattgccagctttgtcactgtgaagcgacctggtgttacaggcgaaaatagcaatgaagtggccaaattggtgaatacccttaacaccatcccttccctgggccagagtcctgggccagtggtggtgtccaacaacagctctgctcatggctctcaaagaaccagcggacctgagtcttcaatgaaaggtacaataacctgaaagactctgagcagccagtcattcaaaaacattaataaagtgtttgttgtatcagagctttatactcagaaatagaaaaataaaataaaatacagctgctgtagtttgttcttacagaaactttagtaaggagaaagccacttacaaaaagtgtaactgaatcagctccaagaaattatgtgtgtaattgtgctttggagattagtgaaattgattgattaaagatgggtgagataatgaaagataacttcatggaagagatggatttctgagcaaggttttaaagttaggatttggtagagagatcttcaggttgagaatgatgagcatgagggttttcagtggtctagagcaggggtcggcaaatgttttctgtaaagggcctagtagtaaagttgtaggctttgtgcacaatatatagcctctgttgcagctattaactgtgctgttgtggtggggaagcagccacagatacataaacgaatgagcatggctgtgctccactaaaaactatttatggactctgaaatttaagtttcataaaattttcatgtgtcgaaaagttttattcttttatttcaaccatttaaaaataaaaaccgcaaggtatagtggctcacacctc

SEQ ID NO: 355981 - DNA, 927 bp, Homo Sapiens
  misc_feature (348)..(356): n is a, c, g, or t
  misc_feature (844)..(844): n is a, c, g, or t
cgaaaaggcggtgcttaaaccggaggaggcggaagtgagtcgacagacgaggcggctttcccggcagaatgctagcgcaggcgcaggggctcgagaggcctggacctgtggcgcatcctcagtgaggagggccgccctgcatccgtcgccggccccggtctccaggtgcctcacccgagtcatgccccgctattgcgcagcgatttgttgtaagaaccgccggggacgaaacaataaagaccggaagctgagtttttatccatttcctctacatgacaaagaaagactggaaaagtggttaaagaatatgaagcgagattcatgggttcccaggaaaagacccttctnnnnnnnnntcccagaagaaaaacttggaagatgagaaagaagtatgcccaaaagccaagtcagaagaatcatttgtattaaatgagacaaagaaaaatatagttaacacagatgtgccccatcaacatccagaattacttcattcatcttccttggtaaagccaccagctcccaaaacaggaagtatacaaaataacatgttaactcttaatctagttaaacaacatactgggaaaccagaatctaccttggaaacatcagttaaccaagatacaggtagagggtgttttcacacatgttttgagaatctaaattctacaactattactttgacaacttcaaattcagaaagtattcatcaatctttggaaactcaagaagttcttgaagtaactaccagtcatcttgctaatccaactttaccaagtaattccatggaaataaagtcagcacaggaaaaatccattcttattcagcacaattaatcaacacgttnaggattaaccccaattaaagatctgttattgccatttttggccctgctgaaaatcttaaccctcaataaatctttatatctgc

SEQ ID NO: 355982 - DNA, 657 bp, Homo Sapiens
  misc_feature (77)..(86): n is a, c, g, or t
ggcactctgtgaagatattggggactgacatcttaagctctcacctggctgcagtaggaaaggccaaactgacgacnnnnnnnnnnttctttataaagatgatatggtaacatgtatctttgccctgggtctgggtgggtccagtcagtctcagatttacaagcatttaggagcctaggtaaaagctgctagtattcttttaaaagttacatttatgacttgcaatgatagaaaactccttccaattaaatggcattttataatattatgtgtgtacttcacagtgttaaaaataccctcatacgttattgcatttgatcttcacagaaagtgcattttaaccagtactctgggtgcaataaataatatgtagaaatttaagtcctccaattccagcatatccagtgagttttgacagtgtgtttatgtggaatgtttaaggatatacaattgtactttatataaattggttcttgttcttcttaaatgtgacatgaaataattgtgctgctacattatactggaaattaacaggggaaaagggaagagctcttggctcccttgaggttctgctagtggtgttaggagtggttacaactgagcttttagtaaccatttaaccgtatgtaaacttggtttctaattaaaaaaaaattt

SEQ ID NO: 355983 - DNA, 3554 bp, Homo Sapiens
gccaagacttggctctttgtgacagctacatcagcaaggtagatgtgctgaatattttagttgctgctgcctatcgccacgtgccatctttggatcagatcttgcagccagctgcagtaaccaggctaaggaaccagcttttggaagccgagtactaccaactgggcgttgaggtctccacaaagactgggcttgataccaccggggcgtggcatgcttggggcatggcctgcctcaaagccgggaacctcactgctgcacgggagaagttcagtcgctgtctgaagcccccatttgacctcaatcagctgaatcatggctcaaggctggtgcaggatgtggttgagtacctagagtccacagtgaggccctttgtatccttgcaagatgacgattactttgccaccctgagggaactggaagctacccttcggacgcagagcctttctctggcagtgattcctgaagggaaaatcatgaacaacacctactaccaggaatgcctcttctacctgcacaactatagcaccaacctggccatcatcagcttctacgtgaggcacagctgcctgcgggaagctcttctgcaccttctcaacaaggagagtcctccagaagtttttatagaaggcattttccaaccaagctataaaagtgggaagctacacactttggagaacttgctagaatccattgatccaaccttggagagctggggaaagtacttgattgctgcctgccaacatttacagaagaagaactactaccacattctgtatgagctgcagcagtttatgaaggaccaagttcgggccgccatgacctgtattcggttcttcagtcacaaagcaaagtcatatacagaactgggagagaagctctcatggctacttaaggccaaggaccacctgaagatctacctccaagaaacatcccgcagctctggaaggaagaaaaccacattcttcagaaagaagatgactgcagctgatgtgtcaaggcacatgaacacacttcagctgcagatggaagtgaccaggttcttgcatcggtgcgaaagtgctgggacctctcaaatcaccactttgcctctgccaaccctgtttggaaataaccacatgaaaatggatgttgcctgcaaggtcatgctgggagggaaaaatgtagaagatggtttttggaattgctttccgtgttctgcaggacttccagctggatgctgccatgacctactgcagagctgcccgccagttggtggagaaagagaagtacagtgagatccagcaactgctcaaatgtgtcagtgagtcaggcatggcagccaaaagtgaacgggacaccatcctcctcaactgcctggaagcgttcaagagaattccgacccaggagctggagggcctgatccaagcaatacacaatgatgacaacaaggttcgggcctacctgatatgttgcaaactgcgttctgcctacttgattgctgtgaagcaagaacactcacgggccacagcccttgtccagcaggtgcagcaggccgccaagagcagcggggatgcagtagtgcaagacatctgtgcccagtggcttctgacaagccacccccggggtgcccatggcccaggctccaggaagtgaccttgggcagtggggccaggaacacgtggcctgagagctgggcaacagcagtgatggcgatgccctccacctctttcctccagtggagtgggacttctctggctctgccctagggtggaaagagttggattggaccctacttgccttcccgggcaaggataggacctttcacgcaagtgccatgtttctctaaaatggtggaatctatgtgtgtttgtctggagatggccagttctttctacctcagagtgagtgagtgagtatgtgtgcacacacgtgtgcatgttcctgtgcgctgatgtttacgcccaagcatttctgaacaaatgaaactcttctccatttaaaagaggcactttactttggacttgccactctgaaaaccttccctgcgttttggttcttgacccgggttgtcctgtttgtatagtcccccctctgtggacgtgctttagtagctcctcttacctagagggcttttacagagaattagagcaacaccaaaaggattgcctcttttccttccttcccattccaaaattcagagatggctttggggcaagtgctacctgtggaataaacctgttttccaggtgtctcttctcccaagcacaagaagtcctggagtctttggaaggtagtctgaatagaagggttttcaggtgcaggcatctgaaagctgtgggtatgtgtataaatgatcaggtctgtgaggctaacacgggcaagagggaaagaaaggctaaccatccaaacagggatacaggggaggcggtggggggtggtggggggagcgggtgctcacaagcacagagctgcctgttgtgaatgtccctgctgcaaagttggtgggtgagagaatgggacttcctctttgagagtctggggagagaaaaggtggccaggatcctaggactgaatgactcgattttacctatttgagctgcagtcctgtttgcgctccttgaattggttaggaagctgcttccttttccctcctgcttcccttcagtctcttcaggaccacaggatggatatgcagacatgtggggtcattgggaagggagtgcgcttcttttctctgtcttagaaaagggagtcaagggttggccttggaattgggcctctggacagagtcagaatgagggaataatgaataggtcacatctggttggtggaaaactaggtgaagtgcttctttaatatgcactgtcttgtcttcccacgcaagatgtgacaatgtttgagaaaaggtgtgtcatactcagtgacttcaatttgcaaatgtggggccctaaagcaaagctctgcagctctgaacctctcactggccagagctcagcactattggtcccatccatgacgctgagacaaacagaaactggaagctgaagtcagtgtctctggtgcttagaaaccctgtggatttccctctgaaccaagatttttagtagtaaaataaacaactcatggacatctgtcagatgagaagttttggtcctgttagagaggagaaagactgtaatgaaactactagacccatttgggctaaagtttggcttttccttccttgagtcatagaacatatccatctcccaggaaatgtccttctctggcgtctgcttgcccttctgagtctgccttttttgcactgaacataagcactttatactaatgggtcacaaatcttgcagcccttaatttgggataagaccagattttcctgacattttcctctaactcattgaactatcaaattataggcaaccactgactagactgatatgagatgaggctaaaagcctttgaacaccacgctgtagtctccaacagaaaaacaccaccaaaacagatacccatgttgaggggttgaatgttttactacaaacaagccacaataaagtgtctatcaacatgaa

SEQ ID NO: 355984 - DNA, 1598 bp, Homo Sapiens
  misc_feature (1585)..(1586): n is a, c, g, or t
  misc_feature (1588)..(1588): n is a, c, g, or t
  misc_feature (1590)..(1590): n is a, c, g, or t
gataaaaccgaatcagtttgaaccctacaaaggagcccagaatgatttctctttgtctcagaggcctgcctttctctctctgtctcagaggtttgcctccacctcccctgaaacttggcccagaagtttgccttctctctcttccttccccccttcttaaggtggcctctgaacccaagaatctgtcctggaagccaaatggaaattctacacagaagcccgtctaagtcttagcagcaatgttgtactcgttttcttctttaaaattaatgaatacacagccagaggtttattatgccacacacattgtgttcaccactcttcatgattaaaagtctcacttctggggtccaggacaacttcctaaattcatcaccgggaactgcattgcaacattgctgattctggccctatgattaattctacagcttttgaagaaacccaaactggacagacagttactgaatttttgtaatgtccgaggcttccaggaggagtgacacatatctctgctggatgagctcacagttccaatgagaagatacaagctgaaagattgcagcagaactgggaagtgaaagcacggagaggctgtgggacatggaggaggggcggtaagattgagaaagaggtaacagttggggtgactttggacctgagacctgggcaggcataagaagtctcactctctattccattcttggcaggggatgtttctttgtaccaggtagctttgcgcttgttttgttccataaaagtaaatctctgttcactaaggaattatggtagtgaatggtgactctccggaattatagggctaattccaaaataatcttagttttattcccccacattgtaatattaacacttgggaattttgtttatcgcgatgtttaataatttggccagcagagggcactgcatactgacagtctctccacaccagtcgctcaaatcctcaagagttcccgaagtgttaggcttaactcaggggtgtttgcaagtgctttgctcttctgtttcagacataaacatatgtcagaaattaaaagagggttgtgaagcaggaaattagattaacagtagcatataatttccctctatttgttaataaagagaaaaaatattggtatgtacacccatgtctacagggttttaaatgtagctgtattaattaatgtattaataatatgataacattacttcttgcataaatcaacataacttctaaattctctttgaaaatatttttggttttatattgtggtttaattctcaatcataaactagaaagtaaaaaaacctgatgcctaatgttatactttctttcaaaccttaagatagatattattgtttgaatagtatcaaaatattgtggttctgcacaaatgctttttataacttcttacgatgatattttaatttctatttccacatatggatatgagtattcgaaaacatttgacgcacaattttcttctcttcatctccccattataaaaaggtaaaggtggtgttttaaaaaccgtttgctcctggttaaaactgacaatgtggagacccctttggtagctggccctaaganncnangcacagcc

SEQ ID NO: 355985 - DNA, 1806 bp, Homo Sapiens
  misc_feature (134)..(134): n is a, c, g, or t
  misc_feature (178)..(178): n is a, c, g, or t
  misc_feature (234)..(234): n is a, c, g, or t
  misc_feature (276)..(276): n is a, c, g, or t
cgggattctgtcttaaaaaagaaaagaaatgaagcacatcgcattcaccattccctaggtcttgcgatcagtggaccgctggtcagcagggactctggagaactccatcctcaatgcctacctgcacaccatcngggagagccagcacttcctctacattgaggtctgactgggaggnggtgggggagagcatggaaggggtgtcccaggagagagacctggggaatgagtggngtcagtcattgagggctggtggagcagaagcagacgcctggngcctgggaccaaggctggaggccgaggacagggccaggggccaggctgctgatgtctgtctctgattcttgccccagaatcagttcttcattagctgctcagatgggcggacggttctgaacaaggtgggcgatgagattgtggacagaatcctgaaggcccacaaacaggggtggtgttaccgagtctacgtgcttttgcccttactccctggcttcgagggtgacatctccacgggcggtggcaactccatccaggccattctgcactttacttacaggaccctgtgtcgtggggagtattcaatcctgcatcgccttaaagcagccatggggacagcatggcgggactatatttccatctgcgggcttcgtacacacggagagctgggcgggcaccccgtctcggagctcatctacatccacagcaaggtgctcatcgcagatgaccggacagtcatcattggttctgcaaacatcaatgaccggagcttgctggggaagcgggacagtgagctggccgtgctgatcgaggacacagagacggaaccatccctcatgaatggggcagagtatcagggcgggcaggttttgccttgagtctgcggaagcactgccttcggtgtggattctttggagcaaatacccggccagacttggatctccgagaccccatctgtgatgacttcttccagttgtggcaagacatggctgagagcaacgccaatatctatgagcagatcttccgctgcctgccatccaatgccacgcgttccctgcggactctccgggagtacgtggccgtggagcccttggccacggtcagtccccccttggctcggtctgagctcacccaggtccagggccacctggtccacttccccctcaagttcctagaggatgagtctttgctgcccccgctgggtagcaaggagggcatgatccccctagaagtgtggacatagttgaggcccccgtcagggagaggtcaccagctgctgtgccccaccacgtctggctccctgccccttaaccccaaggactgagggcagtgccctttgagatctggggaggcaggcattcctgaagggaactagaggtgttacagaggacccttacgtgagaaatagctgaaaagggcactcccaaccctgggctggggaggaggagagagtcccagagctcatcccccctgctgcccagtgcaaaccacttctccatgctgcaaaggagaagcacagctcctgccagggtgagcagggtcaagcctcttattccaggagaagggggctctgccccaggccctactacccattgttcccttcctcttcctgcccttgaaccccctccctgtcccagggccctcccagcccattgctgccaaggtggagggaaggataaagccacttctggcttcagcccccaccaggggaaggaaggagggcacattaactccctccaccagcctgctgacagacactaactttgtatccgttcaataagcatttcataaataaaggtgtagaaaagg

SEQ ID NO: 355986 - DNA, 651 bp, Homo Sapiens
tggcaggtggggaattttaacaaagatcttgtgcagaaaaatgaattcatctcagaatactgtgaagagattatttctcaagatgaagctgacagaagagggaaagtgtatgataaatacatgtgcagctttctgttcaactggaacaatgattttgtggtggatgcaacccgcaagggtaacaaaattcgttttgcaaatcattcggtaaatccaaactgctatgcaaaagttatgatggttaacggtgatcacaggataggtatttttgccaagagagccatccagactggcgaagagctgttttttgattacagatacagccaggctgatgccctgaagtatgtcggcatcgaaagagaaatggaaatcccttgacatctgctacctcctccccctcctctgaaacagctgccttagcttcaggaacctcgagtactgtgggcaatttagaaaaagaacatgcagtttgaaattctgaatttgcaaagtactgtaagaataatttatagtaatgagtttaaaaatcaactttttattgccttctcaccagctgcaaagtgttttgtaccagtgaatttttgcaataatgcagtatggtacatttttcaactttgaataaagaatacttgaacttgtccttgttgaatc

SEQ ID NO: 355987 - DNA, 1098 bp, Homo Sapiens
  misc_feature (9)..(9): n is a, c, g, or t
  misc_feature (12)..(12): n is a, c, g, or t
  misc_feature (14)..(14): n is a, c, g, or t
  misc_feature (25)..(26): n is a, c, g, or t
  misc_feature (74)..(74): n is a, c, g, or t
  misc_feature (81)..(81): n is a, c, g, or t
  misc_feature (117)..(117): n is a, c, g, or t
  misc_feature (125)..(125): n is a, c, g, or t
ccaggacgntgntntggcgtctacnncgcctcccgccaccacatggagctgcccaggagctcatgagacttgtnccagatnaccggcagatggagacgggctgagtcccgagatcgncacttcanctttacccccagccgggccgtcgggacgtggaggtcaagccagcagacaggcacaacctgctgcggccagagaccgtggagagcctgttctacctgtaccgcgtcacaggggaccgcaaataccaggactggggctgggagattctgcagagcttcagccgattcacacgggtcccctcgggtggctattcttccatcaacaatgtccaggatcctcagaagcccgagcctagggacaagatggagagcttcttcctgggggagacgctcaagtatctgttcttgctcttctccgatgacccaaacctgctcagcctggacgcctacgtgttcaacaccgaagcccaccctctgcctatctggacccctgcctagggtggatggctgctggtgtggggacttcgggtgggcagaggcaccttgctgggtctgtggcattttccaagggcccacgtagcaccggcaaccgccaagtggcccaggctctgaactggctctgggctcctcctcgtctctgctttaatcaggacaccgtgaggacaagtgaggccgtcagtcttggtgtgatgcggggtgggctgggccgctggagcctccgcctgcttcctccagaagacacgaatcatgactcacgattgctgaagcctgagcaggtctctgtgggccgaccagaggggggcttcgaggtggtccctggtactggggtgaccgagtggacagcccagggtgcagctctgcccgggctcgtgaagcctcagatgtccccaatccaagggtctggaggggctgccgtgactccagaggcctgaggctccagggctggctctggtgtttacaagctggactcagggatcctcctggccgccccgcagggggcttggagggctggacggcaagtccgtctagctcacgggcccctccagtggaatgggtcttttcggtggagataaaagttgatttgctctaaaaaaaa

SEQ ID NO: 355988 - DNA, 2163 bp, Homo Sapiens
ctgttgacggcgctgcgatggctgcctgcgagggcaggagaagcggagctctcggttcctctcagtcggacttcctgacgccgccagtgggcggggccccttgtggccgtcgccaccactgtagtcatgtacccaccgccgccgccgccgcctcatcgggacttcatctcggtgacgctgagctttggcgagagctatgacaacagcaagagttggcggcggcgctcgtgctggaggaaatggaagcaactgtcgagattgcagcggaatatgattctcttcctccttgcctttctgcttttctgtggactcctcttctacatcaacttggctgaccattggaaagctctggctttcaggctagaggaagagcagaagatgaggccagaaattgctgggttaaaaccagcaaatccacccgtcttaccagctcctcagaaggcggacaccgaccctgagaacttacctgagatttcgtcacagaagacacaaagacacatccagcggggaccacctcacctgcagattagacccccaagccaagacctgaaggatgggacccaggaggaggccacaaaaaggcaagaagcccctgtggatccccgcccggaaggagatccgcagaggacagtcatcagctggaggggagcggtgatcgagcctgagcagggcaccgagctcccttcaagaagagcagaagtgcccaccaagcctcccctgccaccggccaggacacagggcacaccagtgcatctgaactatcgccagaagggcgtgattgacgtcttcctgcatgcatggaaaggataccgcaagtttgcatggggccatgacgagctgaagcctgtgtccaggtccttcagtgagtggtttggcctcggtctcacactgatcgacgcgctggacaccatgtggatcttgggtctgaggaaagaatttgaggaagccaggaagtgggtgtcgaagaagttacactttgaaaaggacgtggacgtcaacctgtttgagagcacgatccgcatcctgggggggctcctgagtgcctaccacctgtctggggacagcctcttcctgaggaaagctgaggattttggaaatcggctaatgcctgccttcagaacaccatccaagattccttactcggatgtgaacatcggtactggagttgcccacccgccacggtggacctccgacagcactgtggccgaggtgaccagcattcagctggagttccgggagctctcccgtctcacaggggataagaagtttcaggaggcagtggagaaggtgacacagcacatccacggcctgtctgggaagaaggatgggctggtgcccatgttcatcaatacccacagtggcctcttcacccacctgggcgtattcacgctgggcgccagggccgacagctactatgagtacctgctgaagcagtggatccagggcgggaagcaggagacacagctgctggaagactacgtggaagccatcgagggtgtcagaacgcacctgctgcggcactccgagcccagtaagctcacctttgtgggggagcttgcccacggccgcttcagtgccaagatggaccacctggtgtgcttcctgccagggacgctggctctgggcgtctaccacggcctgcccgccagccacatggagctggcccaggagctcatggagacttgttaccagatgaaccggcagatggagacggggctgagtcccgagatcgtgcacttcaacctttacccccagccgggccgtcgggacgtggaggtcaagccagcagacaggcacaacctgctgcggccagagaccgtggagagcctgttctacctgtaccgcgtcacaggggaccgcaaataccaggactggggctgggagattctgcagagcttcagccgattcacacgggtgagcacctgtcctccccccgcggtggccacggccacccgggccaccaggcacggcttggggctgtgggggctcaagcttggctcccctcctgggtggttggctgtgaacctggatccccggaaggggccgggctttcccgccaaccctcggggtgggccacaccggcaaccttggggggcccctgggattcccccatccccactgaagctttccggggtggggggacacaaaaaagacacttggagg

SEQ ID NO: 355989 - DNA, 978 bp, Homo Sapiens
ggggggaagggccccggaggcgggcacttggggggaaagttgagacgtgattaccgggttgggcgggccccatctgggaggggtttgtgggtgaactcggggtccaccgcccgctgaggagatggatgaggacgggcttcctctcatggggtcaggcatagacctgaccaaggtgccagctattcaacagaaaagaacggtggcttttctaaaccaatttgtggtgcacactgtacagttcctcaaccgcttttctacagtttgtgaggagaaactggcagacctttcacttcgtatccaacaaattgaaacaactctcaatattttagatgcaaagttgtcatctatcccaggcctagatgatgtcacagttgaagtatctcctttaaatgtcaccagtgtcacaaatggagcacatcctgaagccacttcagagcaaccacagcagaacagtacacaagactctggactacaggaaagtgaagtatcagcagaaaatatcttaactgtagccaaggatccaagatatgccagatatctcaaaatggttcaagtgggtgtaccagtgatggcaataagaaacaaaatgatatcagaaggactagacccagatcttcttgagaggccagatgctccagtgcctgatggcgaaagtgagaaaactgtagaagaaagttcagatagcgaatcttcttttagtgattaagcttaattttgataagaattacatatgcatgcataggggtacatttacattctgtaagagattgagcctgaactctcttagtcataaaaacatcaaatggccacatgtccactaccaagcttcttctatgttaaaaaaataataataaagcagttttaacctgccagtatgtcttgctgctaaaataaggggcctccacatgaaacatagggataccctaaataaagtacaattagtgctcaaaatactaagattgaatatcttcagagaac

SEQ ID NO: 355990 - DNA, 999 bp, Homo Sapiens
  misc_feature (996)..(996): n is a, c, g, or t
agcggggtttgccttcggggtgtccgcgtgagaattggctatatcctggagcgagtgctgggaggtgctagtccgccgcgccttattcgagaggtgtcagggctgggagactaggatgtcggacacgtggagctctatccaggcccacaagaagcagctggactctctgcgggagaggctgcagcggaggcggaagcaggactcggggcacttggatctacggaatccagaggcagcattgtctccaaccttccgtagtgacagcccagtgcctactgcacccacctctggtggccctaagcccagcacagcttcagcagttcctgaattagctacagatcctgagttagagaagaagttgctacaccacctctctgatctggccttaacattgcccactgatgctgtgtccatctgtcttgccatctccacgccagatgctcctgccactcaagatggggtagaaagcctcctgcagaagtttgcagctcaggagttgattgaggtaaagcgaggtctcctacaagatgatgcacatcctactcttgtaacctatgctgaccattccaagctctctgccatgatgggtgctgtggcagaaaagaagggccctggggaggtagcagggactgtcacagggcagaagcggcgtgcagaacaggactcgactacagtagctgcctttgccagttcgttagtctctggtctgaactcttcagcatcggaaccagcaaaggagccagccaagaaatcaaggaaacatgctgcctcagatgttgatctggagatagagagccttctgaaccaacagtccactaaggaacaacagagcaagaaggtcagtcaggagatcctagagctattaaatactacaacagccaaggaacaaatccattgttgaaaaatttcgctctcgaggtcgggcccaagtgcaagaattctgtgactatggaaccaaggaggagtgctgaaagcagttatgctgatcgacctgtngca

SEQ ID NO: 355991 - DNA, 1782 bp, Homo Sapiens
  misc_feature (102)..(102): n is a, c, g, or t
gcattcaggtttttttaatggttttggagggtagcagtagagatggggtctcactatgttgcccagtctagtcttgaactcctgggctacagttaccctccntaccatcggcttcccaaagtgctcggagttacaggtgtgagccactgtgcctagcctataatgatcattttaatgtttcccatgcactcatttagtttgaaccttcacagcaacccaatgaggtaatactcccatttcacatataatactgagagatgagttgcacaagattatacactgttaagtagcagagccagaatggacttcagaatcccaactacaatacaaatgtttatttaaataaagaagaaagctattgtacaaatatcactcttcaggtttagcttacagagccatggctatggattcttagctctgtaaggaagtgcttctataaattcttaggtttagagatgataccatctgggtacctttgcttgaaccgtgcaaccacatctgggtctagtaggtggatcccatccagttggtttccaagggtgatccagttgggttgcacattgtgtggtcgtccaaataactcaatcttgcgagtgccaggagatagtctttcaatcatgccatagatttcatctggtttatgactggtggaacgaacctcagctacgatcacatcacaatccagaccctggttgaagccttggggatttcctttgacaccaaccaagcagtgttccttcccatggttcaaccagtgacctgtacggcctgtccgaatgatgcgttgcagttgatttgtcttcacccaaataatttcatctacccgttcatacccccagaggtttagacattctctccccaactccatggccctgcctgtgacccagaggaagagaaagccatcatcctgtagtacgggtatgttgagcctgcgcatctcatcatctgtcagggtcccatagggcagttccatgtgaatatcccagggtgggtcagccatcacaactgcaaacttgcccaagatactgacgtccaggtagcggatatcacaacagatccactgaggtgggaagagtcggtctgcactggaatcacctccgacactctgtgtaagagcaagctcctggcttggcgtgtggtctttgctgccaggggcctcagaatccatgcaagcatcaatttcatagtgaacatacttgcaggtatccatgtggaaacatgtattaaggaaagagcagtcacctaaagactcatcagtgtgtttattgataattcgtctgaagtgcagcttgcgacagggtcgatcagcatcactggctttcatgcactcctccttggttccatagtcacagaattcttgcacttgggcccgacctcgaaagcgaaatttttcaacaatggattgttccttggctgttgtagtatttaatagctctaggatctcctgactgaccttcttgctctgttgttccttagtggactgttggttcagaaggctctctatctccagatcaacatctgaggcagcatgtttccttgatttcttggctggctcctttgctggttccgatgctcaatcaactcctgagctgcaaacttctgcaggaggctttctaccccatcttgagtggcaggagcatctggcgtggagatggcaagacagatggacacagcatcagtgggcaatgttaaggccagatcagagaggtggtgtagcaacttcttctctaactcaggatctgtagctaattcaggaactgctgaagctgtgctgggcttagg

SEQ ID NO: 355992 - DNA, 2189 bp, Homo Sapiens
cggtccggaattcccgggattcggggtgtccgcgtgagaattggctatatcctggagcgagtgctgggaggtgctagtccgccgcgccttattcgagaggtgtcagggctgggagactaggatgtcggacacgtggagctctatccaggcccacaagaagcagctggactctctgcgggagaggctgcagcggaggcggaagcaggactcggggcacttggatctacggaatccagaggcagcattgtctccaaccttccgtagtgacagcccagtgcctactgcacccacctctggtggccctaagcccagcacagcttcagcagttcctgaattagctacagatcctgagttagagaagaagttgctacaccacctctctgatctggccttaacattgcccactgatgctgtgtccatctgtcttgccatctccacgccagatgctcctgccactcaagatggggtagaaagcctcctgcagaagtttgcagctcaggagttgattgaggtaaagcgaggtctcctacaagatgatgcacatcctactcttgtaacctatgctgaccattccaagctctctgccatgatgggtgctgtggcagaaaagaagggccctggggaggtagcagggactgtcacagggcagaagcggcgtgcagaacaggactcgactacagtagctgcctttgccagttcgttagtctctggtctgaactcttcagcatcggaaccagcaaaggagccagccaaagaaatcaaggaaacatgctgcctcagatgttgatctggagatagagagccttctgaaacaacagtccactaaggaacaaccagagcaagaaagtcgggcccaagtgcaagaattctgtgactatggaaccaaggaggagtgcatgaaagccagtgatgctgatcgaccctgtcgcaagctgcacttaagacgaattatcaataaacacactgatgagtctttaggtgactgctctttccttaatacatgtttccacatggatacctgcaagtatgttcactatgaaattgatgcttgcatggattctgaggcccctggcagcaaagaccacacgccaagccaggagcttgctcttacacagagtgtcggaggtgattccagtgcagaccgactcttcccacctcagtggatctgttgtgatatccgctacctggacgtcagtatcttgcgcaagtttgcagttgtgatggctgacccaccctgggatattcacatggaactgccctatgggaccctgacagatgatgagatgcgcaggctcaacatacccgtactacaggatgatggctttctcttcctctgggtcacaggcagggccatggagttggggagagaatgtctaaatctctgggggtatgaacgggtagatgaaattatttgggtgaagacaaatcaactgcaacgcatcattcggacaggccgtacaggtcactggttgaaccatgggaaggaacactgcttggtgagcagcagtggggcccaattcaataggtggagcacaaagaagaatcatttgatttcttactgagaaaaagttcaaaggtgtggtttcataaggtaatctgttatctgtggtgagcaggttggtgtcaaaggaaatcgcccaaggcttcaaccagggtctggattgtgatgtgatcgtagctgaggtatgtgcttcccaggcctccaaagcttccacatttttgttggtatcagttattcatgttgggtgtattctcatcccagatttttctcatttagatcataaacataatagaaaagggctagaattgcaatcttgtgtaacttaaaaagcagctagtttttatttcctaggttcgttccaccagtcataaaccagatgaaatctatggcatgattgaaagactatctcctggcactcgcaagattgagttatttggacgaccacacaatgtgcaacccaactggatcacccttggaaaccaactggatgggatccacctactagacccagatgtggttgcacggttcaagcaaaggtacccagatggtatcatctctaaacctaagaatttatagaagcacttccttacagagctaagaatccatagccatggctctgtaagctaaacctgaagagtgatatttgtacaatagctttcttctttatttaaataaacatttgtattgt

SEQ ID NO: 355993 - DNA, 281 bp, Homo Sapiens
cccaactacaatacaaatgtttatgttaaataaagaagaaagctattgtacaaatatcactcttcaggtttagcttacagagccatggctatggattcttagctctgtaaggaagtgcttctataaattcttaggtttaggagatgataccatctgggtacctttgcttgaaccgtgcaaccacatctgggtctagtaggtggatcccatccagttggtttccaagggtgatcctgaaacagtgtaaaaggaggggcaaaccagaaatccagttgggttgc

SEQ ID NO: 355994 - DNA, 1014 bp, Homo Sapiens
gcgcgccttattcgagaggtgtcaggctgggagactaggatgtcggacacgtggagctctatccaggcccacaagaagcagctggactctctgcgggagaggctgcagcggaggcggaagcaggactcggggcacttggatctacggaatccagaggcagcattgtctccaaccttccgtagtgacagcccagtgcctactgcacccacctctggtggccctaagcccagcacagcttcagcagttcctgaattagctacagatcctgagttagagaagaagttgctacaccacctctctgatctggccttaacattgcccactgatgctgtgtccatctgtcttgccatctccacgccagatgctcctgccactcaagatggggtagaaagcctcctgcagaagtttgcagctcaggagttgattgaggtaaagcgaggtctcctacaagatgatgcacatcctactcttgtaacctatgctgaccattccaagctctctgccatgatgggtgctgtggcagaaaagaagggccctggggaggtagcagggactgtcacagggcagaagcggcgtgcagaacaggactcgactacagtagctgcctttgccagttcgttagtctctggtctgaactcttcagcatcggaaccagcaaaggagccagccaagaaatcaaggaaacatgctgcctcagatgttgatctggagatagagagccttctgaaaccaacagtccactaagggaacaacagagcaagaaggtcagccaggagatccttagagctattaaaatactacaacagccaaaggaacaatccattgctgaaacaatttcgctctcgaaggtcgggcccaagtggcaagattctgtgactatgggaccccaggaagagtgcatgcaagccagtggatgctgatcgaccctgtcccaagcctgcactttcggacgaattatcaataacccccctggataatccttttagggaaggcttctttcctttaaaacaggtt

SEQ ID NO: 355995 - DNA, 1014 bp, Homo Sapiens
  misc_feature (195)..(195): n is a, c, g, or t
  misc_feature (936)..(936): n is a, c, g, or t
cggtccggaattcccgggatcgcgtgagaatggctatatcctggagcgagtgctgggaggtgctagtccgccgcgccttattcgagaggtgtcagggctgggagactaggatgtcggacacgtggagctctatccaggcccacaagaagcagctggactctctgcgggagaggctgcagcggaggcggaagcagngactcggggcacttggatctacggaatccagaggcagcattgtctccaaccttccgtagtgacagcccagtgcctactgcacccacctctggtggccctaagcccagcacagcttcagcagttcctgaattagctacagatcctgagttagagaagaagttgctacaccacctctctgatctggccttaacattgcccactgatgctgtgtccatctgtcttgccatctccacgccagatgctcctgccactcaagatggggtagaaagcctcctgcagaagtttgcagctcaggagttgattgaggtaaagcgaggtctcctacaagatgatgcacatcctactcttgtaacctatgctgaccattccaagctctctgccatgatgggtgctgtggcagaaaagaagggccctggggaggtagcagggactgtcacagggcagaagcggcgtgcagaacaggactcgactacagtagctgcctttgccaggtcgttagtctctggtctgaactcttcagcatcggaaccagcaaaggagccagccaagaaatcaaggaaaacatgctgcctcagatggtgatctgggagatagagagccttctgaaccaaccagtccactaaggaaccacaggagcaaggaaggtcacgcaggaaaatcctaaagcctattaaatactacaacagcccaagaaacaatccattggttgaaaaatttcgctctcgaaggtccggcccccantgcaagaatttctgtgactatgggaacccaaggaggattgcatgaaaagccagttgatgcctgatcgaaccctggtca

SEQ ID NO: 355996 - DNA, 763 bp, Homo Sapiens
gtattgttaaaaaatgcataccaaatgaagactgcctatcatcatatcaaatatgccaattctaaaaagagcttaacattagaatagtatatggtagaattactagttcagaattggcatagattctggtgttaaaatagactggatctgtattatctgagggttagtaactaatgcttagccaggccctggcttcacagagttgctaccagggagtattctttggataagcaaaatgctagcagcatgtgttttaagctctgttaaggggtgaaagatgtaattattgacagattaaatagataacttcgtaaccaccagggggcagattcaatacatcacagaatggctgaggaagatcccttgggttgtgaaagagagtagaaaccctagggagcagtgcttttgggtcctagaacctgttgagtttctaatgaatatttgtagaatctcataaaacagtttaaatacaagcttaagtggcttatgaatcctgtgaagctcatttatggactagtgtaaaacaatgtgaagctctactaagttctgtccttaatcataaataatagccccttgaggactagcctgttctctggtcaccttaccagttgggttgcacattgtgtggtcgtccaaataactcaatcttgcgagtgccaggagatagtctttcaatcatgccatagatttcatctggtttatgactggtggaacgaacctaggaaataaaaactagctgctttttaagttacacaagaaaaaa

SEQ ID NO: 355997 - DNA, 811 bp, Homo Sapiens
  misc_feature (394)..(457): n is a, c, g, or t
ccaaatttgggacatgagagggttatataggggactatattatccaacacatattttcttattttgccacaaattcccacttaacaaataaaaaaagggcgaatgctgttttgcaatcagaaagtgaatttcttttgtggtagcgtacacgtggttcatgtggttctccacgtttaagcacaaaccacagcacaggaagccacaccccctccagcatctctgtcttgtggggtctttgaggagaaggaatcagaacatcgacacctgggaagagggaggcggggaacaccagctggactctggccaaggagtgatgtaagcaggtgacacttggctgtcagctgagcttctcaggtgcttctgacattgccagccccttgagatgagccaccgnnnnnnnnnnnnnnnnnnnnnnnnnnnnnnnnnnnnnnnnnnnnnnnnnnnnnnnnnnnnnnnnccgctgtgcctcccagaccgattaagtcagaacctctgggaggtgggtcgcaggcatcagtgcgtgcccgaggcctccgcgtgtttgggtgtgcagccgaggtggtgagctgtcgagccacagtgcagttctcttctcaccaaagctcaaatgagaatcagcttccatgttctttcctttaccagaaatttgcaataaaaagaaaaataaaattttcacataaatgtggtgtatgatttttaaattgaaaagtctttcagtgttgagctgaagacttaattaggtaaaatgccataggaaatatttctgtttgctctctgggaaacgctttaaggttaaaaaaggctcaagtcc

SEQ ID NO: 355998 - DNA, 266 bp, Homo Sapiens
  misc_feature (248)..(248): n is a, c, g, or t
acatgttgaaatcatcccagaggagttgggaaatctactgatgccccgctgtgcctcccagaccgattaagtcagaacctctgggaggtgggtcgcaggcatcagtgcgtgcccgaggcctccgcgtgtttgggtgtgcagccgaggtggtgagctgtcgagccacagtgcagttctcttctcaccaaagctcaaatgagaatcagcttccatgttctttcctttaccagaaatttgcaataaaaagnaaaataaaattttcacat

SEQ ID NO: 355999 - DNA, 480 bp, Homo Sapiens
  misc_feature (221)..(284): n is a, c, g, or t
aagcacaaaccacagcacaggaagccacacccccctccagcatctctgtcttgtggggtctttgaggagaaggaatcagaacatcgaacacctgggaagagggaggcggggaacactagctggactctggccaaggagtgatgtaagcaggtgacacttggctgtcagctgagcttctcaggtgcttctgacattgccagccccttgagatgagccaccgnnnnnnnnnnnnnnnnnnnnnnnnnnnnnnnnnnnnnnnnnnnnnnnnnnnnnnnnnnnnnnnnccgctgtgcctcccagaccgattaagtcagaacctctgggaggtgggtcgcaggcatcagtgcgtgcccgaggcctccgcgtgtttgggtgtgcagccgaggtggtgagctgtcgagccacagtgcagttctcttctcaccaaagctcaaatgagaatcagcttccatgttctttcctttaccagaaatttgcaat

SEQ ID NO: 356000 - DNA, 1384 bp, Homo Sapiens
agcgggtagttggaggacgggcggtcgcgcggcctttcccactagccggagtagcctctagttcgttagtcaaaacgtgaaaaaaaagacctgctttgccctgggaaatagtaaccctgccaaatacatcagcttgtaggagacagaggatgtgatggagctgcttgaagaagatctcacatgccctatttgttgtagtctgtttgatgatccacgggttttgccttgctcccacaacttctgcaaaaaatgcttagaaggtatcttagaagggagtgtgcggaattccttgtggagaccagctccattcaagtgtcctacatgccgtaaggaaacttcagctactggaattaatagcctgcaggttaattactccctgaagggtattgtggaaaagtataacaagatcaagatctctcccaaaatgccagtatgcaaaggacacttggggcagcctctcaacattttctgcctgactgatatgcagctgatttgtgggatctgtgctactcgtggggagcacaccaaacatgtcttctgttctattgaagatgcctatgctcaggaaagggatgcctttgagtccctcttccagagctttgagacctggcgtcggggagatgctctttctcgcttggataccttggaaactagtaagaggaaatccctacagttactgactaaagattcagataaagtgaaggaattttttgagaagttacaacacacactggatcaaaagaagaatgaaattctgtctgactttgagaccatgaaacttgctgttatgcaagcatatgacccagagatcaacaaactcaacaccatcttgcaggagcaacggatggcctttaacattgctgaggctttcaaagatgtgtcagaacccattgtatttctgcaacagatgcaggagtttagagagaaaatcaaagtaatcaaggaaactcctttacctccctctaatttgcctgcaagccctttaatgaagaactttgataccagtcagtgggaagacataaaactagtcgatgtggataaactttctttgcctcaagacactggcacattcattagcaagattccctggagcttttataagttatttttgctaatccttctgcttggccttgtcattgtctttggtcctaccatgttcctagaatggtcattatttgatgacctggcaacttggaaaggctgtctttcaaacttcagttcctatctgactaaaacagccgatttcatagaacaatcagttttttactgggaacaggtgacagatgggtttttcattttcaatgaaagattcaagaattttactttggtggtactgaacaatgtggcagaatttgtgtgcaaatataaactattataaaatctg

SEQ ID NO: 356001 - DNA, 733 bp, Homo Sapiens
agggttactatttcccagggcaaagcaggtcttttgtttcacgttttgactaacgaactagaggctactgcaaagaaagaagaaaaagaacagtattaacgcatttatttgcacagcaccccaatcttgaccctcaattttttcaatcgcccccacaaataaagcccggctgtttagacctggtgaaccgccaggagcctggagctctttgtattaagcagcttctcggttagggcgccctcccccggcgccatgcaaccaaacgctggcggcgcgctgtaacctaaggcccacacccgtcttttcttttctaggggatgtggagacgctggtagcggggccaggaaggctccggacggagcaggttttctggaccacagacacactgccccggcgccctccgcaggccgctcctccccaggcccatgacagtgccccgctggtttctgccgcgctgccggactggagctcagacggccttcgccagcccccccaacccacgcagatccctgctgacctgggcaactccccaccctcgctgaaggttcgaggaccaccccgctttcccgagaggaagccgggcggcgggtacttatctccgacctccggctagtgggaaaggccgcgcgaccgcccgtcctccaactacagggaccgcacggtacgcgccaagcacagccccaaaatggactcgcggctccggctagctccgcccccttccctctcccccgct

SEQ ID NO: 356002 - DNA, 887 bp, Homo Sapiens
ggcttggtcctgttgcattaataaacaaaaaggttaatctggtggcccccataacttggggggaccaaggttattttcttgtcagtattaagaataatggggtgtgcacccttcctatcaaatgagtccaacatttcaaaaaagatttcatcaaatcttcctatgccaacaaaacaagttccttcttgtttaaaatctcttaaccctcagtcccaacatattatatctctgaagagattttaagcttgtcttaaaaagccaaatttggaatcatcaagcctgttgaacctgatgggacagctttttgtcgagctttctggaagtaacaacttcagttgaaaagccctttgatcgcttcagaccgggacatgcccttcaattggcttattctcagtaaagctttatgtagactgtgacactgtatatgtgtgactcgtacaactttgacgtgtttctgaagtggtttaatcgtatttgttattagcttctttgtggaaatgcaatttttatactaaaaacattgcttatttgcaatgcaatatgttataaatttgttgtttatattactggtattagtcttagcctaatgaacctaattatttttctttctgtattctttgcttcctcaaatagcatctgcagcaattggaatgagaaatccagatatgtgtttcaagtagtacattgcctgaatcacaaatcacttgatcacagtattgtatataatccctgatcctatttgtttcattttattgtaaattcccatttgcatcaaaacctaatgatagtgattggtaagtaaaaacaaatggtgtattgcttttcatacaagtgttttcacaaaagccatttgcctaggcagcaaaaaatattaatttgttaaaaaa

SEQ ID NO: 356003 - DNA, 1213 bp, Homo Sapiens
  misc_feature (855)..(855): n is a, c, g, or t
ctgcacgggctgggcacggacagccacctggtggtgaagaagcaccaggccatggaggccatgctgctgtacctggccagccgtgtcggtgacaccaagcatggcatgatgaagttccgtgaggaccgcagcctcctgggcctgggcctgccctcaggtggcttccacgatcgctacttcatcctcaacagcagctgcttgcggctctacaaggaggtccggagccagaggccgtggagcggggcccctgagaccagtcaccggcctgagaaggagtggcctattaagagtctcaaagtctacctgggagtgaagaagaaactcaggccacccacctgctggggcttcacagtggtgcatgagacagagaaacatgagaagcagcagtggtacctctgctgtgacacacagatggagctccgggagtggttcgctacctttctgtttgtgcagcattgacggcctggtgtggccctcagagccctcacgcgtgtcccgggcagtgcctgaggtcccgccgggtagtgtgtcactgatcccccttcgaggtagtgaaaatgaaatgcgccggagtgtggctgccttcaccgcggaccctctgtctcttctgcgcaacgtctgagcacaggagcccatccttggctctaagattccgccgctggaagccttctgttcagacaccccttatgctccaaggcctgatgtgagccagcggggggtgcatgggaaactgcaccgcaaaccagatctccatcctgactgcagcatggggttccccggcaggggtgggaggcagcaggggtcagcctgggcaggaacctctcccaactctgtccaggtgttcagacctcttgngccaacctgctcaccccaccgggttcactgtccttgtggggctggagagatgggcattaagtcaggaaacttgcggaggaaccacacccttttcagaaggcgttgaggccttggggccctgccgggaagggaggccccttgttctaccaagaaactccaggaacaggagaaagcggtgttgtagaggagactcagtcaaggggaggggagctcttggttgaagttcttcaggggtgagaactggctttggggaattcaagcttcctttcagtctggggtgatggggggtccagatacctgatgccctttccacattggggatttggaaatctataatctgatatttaaaaacaaacac

SEQ ID NO: 356004 - DNA, 2784 bp, Homo Sapiens
  misc_feature (800)..(801): n is a, c, g, or t
caacaactaaacaaaacaacggctaggatcgaggcctggtggtgaattcggcacgagggtttgctaaggcattcgtgcctcccctagccgaggatctgctggcccgggattttgagcggctgggacgcctaccctacaaagctggcctgagcctacagcgggcccaggagggctggttctctctcagtggctcggagctccgtgctgtcttcccggaggggccctgcgaagagtccgctgcaactacggaaactgcaggagctttccatccagggggacagtgacgaaccaggtgctggtgctggtggacgcgaaggaggacaactgtacatacagggcgagcggcggctggcacttcatgggttggctgggggccatccagaaaagcagccgccagcatggggggacacgctgtcggagcacgcagcttggggactcggatatcccggtgatcgtgtaccgctgtgtggactacatcacgcagtgcggccctgaccctcgagggcatctaccgcaagtgtgggcagacatcgaagacacagcggctgctggaaagcctgcggcaagatgcgcgctctgtgcacctcaaggagggcgagcagcacgggggatgaggtttcctcggcgctcaagcgcttcctgcgcgacctgcctgatgggctcttcactcgcgccgagcgcctaacctggctggaggcctcaggtgggccctgcagcccgtgcccagcctcctcctcctccacccatccctccggactcctgcgcccttcccttgtggcacttgcactaggcttaccctnncccacaggctccagttgcctgcctctgcttctcattcccatcgccattccatactagagccaggggccctggaagaccgagagttccttaccctggttgaatgcctggcctgcattgacttggagggcacagggactgctgtcacccaccatgagaggcacagcagcccaggcggggtggggggaagatagttacagggggtttctgacttgatttatctttcccacccagagattgaggacgaggaggagaaggtctccaggtaccgagagctgctggtgcggctgccccctgtcaaccgggccacagtgaaggcccttatcagccacctgtactgtgttcagtgcttctcagacacgaaccagatgaacgtgcacaacctggcaattgtgtttgggcccacgctcttccagacagatgggcaggactacaaggctggccgtgtggtggaagacctcattaaccactatgtgtggtgtttagtgtggatgaggaagagctcaggaagcagcgggaggagatcactgccattgtgaagatgcgcgtggctggcactgccagtgggacccagcatgccggtgacttcatctgcacagtgtatctggaagagaagaaggcagagactgagcagcatatcaaggtcccagcatccatgactgctgaggagctcaccctggagatcctggatcgccggaacgtgggcatcagggagaaggactattggacctgctttgaggtcaacgagagggaggaggcagagcgccccctgcactttgcggagaaggtgctgcccatcctgcacgggctgggcacggacagccacctggtggtgaagaagcaccaggccatggaggccatgctgctgtacctggccagccgtgtcggtgacaccaagcatggcatgatgaagttccgtgaggaccgcagcctcctgggcctgggcctgccctcaggtggcttccacgatcgctacttcatcctcaacagcagctgcttgcggctctacaaggaggtccggagtcaccggcctgagaaggagtggcctattaagagtctcaaagtctacctgggagtgaagaagaaactcaggccacccacctgctggggcttcacagtggtgcatgagacagagaaacatgagaagcagcagtggtacctctgctgtgacacacagatggagctccgggagtggttcgctacctttctgtttgtgcagcatgacggcctggtgtggccctcagagccctcacgcgtgtcccgggcagtgccttgaggtccggctgggtagtgtgtcactgatcccccttcgaggtagtgaaaatgaaatgcgccggagtgtggctgccttcaccgcggaccctctgtctcttctgcgcaacgtctgagcacaggagcccatccttggctctaggattccgccgctggaagccttctgttcagacaccccttatgctccaaggcctgatgtgagccagcggggggtgcatgggaaactgcaccccacaaccccacatcctccatcctgactgcagcatggggttccccggcaggggtgggaggcagcaggggtcagcctgggcaggaacctctcccaactctgtccaggtgttcagacctcttggcccaacctgctcaccccaccgggttcactgtccttgtggggctggagagatgggcataagtcaggaacttgggaggaccaccaccctttcagaggcgtgaggccctggggccctgccggaagggagccccctgctcctcccaacaaactccagaacagcagaaagcgggtgctgtagaggagcactcagctcacggggagggagctcttggctgagcttctacagggctgagagctgcgctttggggacttcagccttccttccagtctgggctgagtggggggtccagactacctgatgccccttccccaatttggggactttttgataatataaatatatctgtatattttaccctaaa

SEQ ID NO: 356005 - DNA, 598 bp, Homo Sapiens
aattttattttggtagctaggttttatattgttcttaaatttattttactctattttatttttccatcacttctttgtcccagattcatgaaatttgctgatgtccattttatgtctacttttgaactcttctctttgtgtttgttttgttcttattacaaactccaagacatttcttagaattgtctacagatttcgtgtagctacttattggtagcttcttaatttcatacttgtccagaccattagacattattacatgctctgtcttgggcctatcattaacattagcttagggattctgatttcaaagacataaagaattggcaaaactcttcttacagaacttaaaacaagttttaaagttacatttctatacatctaatacataataccttcttagccattaatgtaattcctctggataaagataatatattcaaaaaatattgggaccaaaaaatgcacttgtttcttgctcatatatatatagatgtatattttttttaatttcttgtttgtttattttggttacattgaatacagatttgctgaacagttttgatgtttattttttaataaaatttgtattgttaaa

SEQ ID NO: 356006 - DNA, 733 bp, Homo Sapiens
  misc_feature (14)..(14): n is a, c, g, or t
  misc_feature (34)..(34): n is a, c, g, or t
  misc_feature (466)..(474): n is a, c, g, or t
aagttatacgaganagtcatggtccaaatatganacaagcaaaaatgtggcgtgatttggaacaattaatggaatgtaagaaacagtgctttctgaaacaacaaagccaaacttccattggtcaggtaattcaggagggtggggaggaccggctaatactgtgaattcttgtgtcatcgtttggggttttacttgataccactagctataagcctaatctcataatgtatttcttttttgaaactgatttgtatagcattttgttttcagaacagccattctttattaagttttcatagaaaataatgttaaggtagatttagtttgaatgttttttcatatgaaaaagaggcttttattcttttccatagtttagacatcactggcgtcttctgagttttatgagacaggaaactaactttactatctgtaaatgtaaacatatgtccattaagaaacatgtacnnnnnnnnnagaatgtaataacccagtggcttactgtttttcttaatctcttttaaaaaaactttagaagaatcttttaggaactaatatctcttgttctgaagaaacatttatctgacgttcagcagttcctacagttttacttcagtttatttttcttctgtaaaatgcaagaaaatttaatattttgactaacatgtcttttctgtttgtatcatttaaaggcaaataaacttggtacgtatttcatatctatttaaaaaatgta

SEQ ID NO: 356007 - DNA, 1709 bp, Homo Sapiens
  misc_feature (149)..(149): n is a, c, g, or t
  misc_feature (235)..(235): n is a, c, g, or t
  misc_feature (922)..(922): n is a, c, g, or t
  misc_feature (970)..(970): n is a, c, g, or t
  misc_feature (978)..(980): n is a, c, g, or t
  misc_feature (1014)..(1014): n is a, c, g, or t
  misc_feature (1033)..(1033): n is a, c, g, or t
  misc_feature (1047)..(1048): n is a, c, g, or t
  misc_feature (1053)..(1053): n is a, c, g, or t
  misc_feature (1056)..(1056): n is a, c, g, or t
  misc_feature (1064)..(1065): n is a, c, g, or t
  misc_feature (1069)..(1069): n is a, c, g, or t
  misc_feature (1095)..(1095): n is a, c, g, or t
  misc_feature (1119)..(1119): n is a, c, g, or t
  misc_feature (1125)..(1125): n is a, c, g, or t
  misc_feature (1131)..(1131): n is a, c, g, or t
  misc_feature (1662)..(1662): n is a, c, g, or t
  misc_feature (1686)..(1688): n is a, c, g, or t
ggattgccccttatcccccccttatgactccagaaactttttttaataatgttttaaaaaattgccccaaaatatttctggtttagaatcccagatattttcagaaaaagtagggaaggaaggggccccaagccaagagaaggaccaanttatatgtacaggggctgagctgcagaggggctacaacttccaataaggtaggtttttttgtggctgtttccatttgcatatgaanatgtccatttctggtgtgtgcagacatggtggccattgcccacccaggtaccagcagcagaagactatctgacttggaaagaatgggggtttacaggagtccaggaggtcctttccgctctcctaagagccagtatgttcgcatctttccttttccctggaagtgggagagtggacatgattcagatgcttcgatgttagtccctttgtctccctctctttccctatgattcccataatcactttcaccctccctttccatgcccccctccccatggcctgccatcaccttcatttccacatccccccgaagctctagctggaagcatcctagctcatctagggcatccttggtggtagaggagacatggatcttcagcgctggggtgggtggaatggggaggatggtggaatgaggaatcaaagaaaaggcaatcaaataattggtgatactgtatagcaccgtgcccgaccaaccatccctgggaagctcccaattcatatctattaggaccaaaatatgcccaacctcccaatgcatatctattagaaccaaaatatgcccgaggatgcgacactaaggaactgtggtctctcagattaagaaattggagggattatgaaaagaagaaaagggcaagataaattgaggccaacagtggggttgagggctaatgtcttaccttgnccattagactccattcgagaagcagtgttcactgtgtctccaaaaagnaataacgnnncatcttcagcccaacaacccccagcacagattgnccctttgagaagaaacagnttgggagagtgtgnnaaagntgnagactagnnctgnagtgagagtcagccttaccagtatgnacccctatgcgtagcctcagctgntcatgncctcgntgccgcgatgcgaaaggaagaaactgcatttagtaatgctagggccatacgagcaatttctggtgcatggcgttgaccatttcggcctgggaggccagataccaccatgtaagcatccccaatcctctccacctgattgagagggggattaaaaggtcacctctatttatatccatggggatgggaaaaagtagagggagacaagcttgacaccatcattaatcatcctaacatgctggagaccagaatattgaatagaaaataagtgccatggtcctgagtctaggggagaggagatgtctagggaatctttaaggcttctttctccacccagcacctggtgaatactcagtaaacatttgcggaatgaatgaacaccctgtctgcagcaggacatggacaaataggctctgccatcaggaaatgggaagcaagaaaacggtaactcaagaggacagaggctggtgaggaggtaaagcaggcccagtgaaatggacctgacagcccaaactgtcagagaggaggaaagcnacgcatttgattttggtaattgtnnnaagctatgtaagagaataaat

SEQ ID NO: 356008 - DNA, 646 bp, Homo Sapiens
  misc_feature (23)..(23): n is a, c, g, or t
  misc_feature (167)..(167): n is a, c, g, or t
tcaacgccatgcaccagaaattnctcgtatggccctagcattactagatgcagtttcttcctttcgcatccgccaccgaccccatgaccagctgaggctacgcataggggtccatactgggccagtctgtgctggggttgttggcctgaagatgccccgttattgtntttttggagacacagtgaacactgcttctcgaatggagtctaatggtcaagcgctgaagatccatgtctcctctaccaccaaggatgccctagatgagctaggatgcttccagctagagcttcggggggatgtggaaatgaagggaaaaggaaagatgcgaacatactggctcttaggagagcggaaaggacctcctggactcctgtaaacccccattctttccaagtcagatagtcttctgctgctggtacctgggtgggcaatggccaccatgtctgcacacaccagaaatggacattttcatatgcaatggaaaacagccacaaaaaaacctaccttatatggaagttgtagccctctgcagctcagccctgtacatatacctgtccctctctggcttggtccccttcctccctactttctgtaaatatctgtatctaaaccagaatattttggtcaaatataaaacaataataaa

SEQ ID NO: 356009 - DNA, 1688 bp, Homo Sapiens
agcggggtttcctgagcgaccaccgctggctagtccgttagaggcgtgcgggcttcggaggcgtgcgggcttcggaggcgtgcgggcttcgggtgccatggggactcctcccggcctgcagaccgactgcgaggcgctgctcagccgcttccaggagacggacagtgtacgcttcgaggacttcacggagctctggagaaacatgaagttcgggactatcttctgtggcagaatgagaaatttagaaaagaacatgtttacaaaagaagctttagctttggcttggcgatattttttacctccatacaccttccagatcagagttggtgctttgtatctgctatatggattatataatacccaactgtgtcaaccaaaacaaaagatcagagttgccctgaaggattgggatgaagttttaaaatttcagcaagatttagtaaatgcacagcattttgatgcagcttatatttttaggaagctacgactagacagagcatttcactttacagcaatgcccaaattgctgtcatataggatgaagaaaaaaattcaccgagctgaagttacagaagaatttaaggacccaagtgatcgtgtgatgaaacttatcacttctgatgtattagaggaaatgctgaatgttcatgatcattatcagaacatgaaacatgtaatttcagttgataagtccaagccagataaagccctcagcttgataaaggatgatttttttgacaatattaagaacatagttttggagcatcagcagtggcacaaagacagaaagaatccatccttaaagtcaaaaactaatgatggagaagaaaaaatggaaggaaattcacaagaaacggagagatgtgaaagggcagaatcattagcgaaaataaaatcaaaggccttttcagttgtcatacaggcatccaaatcaagaaggcatcgtcaagtcaaactcgactcttctgactctgattctgcatctggtcaagggcaagtcaaagcaactaggaaaaaagagaagaaagaaagattgaaaccagcaggaaggaagatgtctctcagaaacaaaggcaatgtgcagaatatacacaaggaagataaacctttaagtctgagtatgcctgtaattacagaagaagaagagaatgaaagtttgagtggaacagagttcactgcatccaagaagaggagaaaacactgaacaaagagcctggtgtagtttttaattttgagttttctgacagaagaaaagattgatattttgtgtattgaacaggaagactgccagtattaaaaaaatccttctgggaatctgtaggttatttcttggaaattgcaatacgtagttctagaataaaagtacaaaaaattagaataagaattctttaacattttctttaatgatttgcataaatggagataaaacttgtatttagtatgtaatagaaaaaattctgttattcgcagattgttactatttcctataaggttttgtgatactatactgtcctaatacagtctggtaatactattctattttatttaaaatattttttattgaaatattaatgtttattacatgcaaataactattttgtatctacagtcggataatggattttttattttgtatatttattctattttgtatattgttaagtgcaataaagtttttgccttgcttt

SEQ ID NO: 356010 - DNA, 556 bp, Homo Sapiens
  misc_feature (3)..(3): n is a, c, g, or t
  misc_feature (21)..(21): n is a, c, g, or t
  misc_feature (30)..(30): n is a, c, g, or t
  misc_feature (33)..(33): n is a, c, g, or t
  misc_feature (538)..(538): n is a, c, g, or t
  misc_feature (550)..(550): n is a, c, g, or t
  misc_feature (553)..(553): n is a, c, g, or t
atntgtcccaattcatggggngtgttgagnccnccacaccaataaacgccttttgccaaagtctgcctgcaggtgtcaatgtcattaaggattagagttaatgaagggcaaagggtagcagtcaattgggggtgcctctccagcatcattccctaccgcctactttctcactggtagacttggaatggactcattacagagatgccctgtgattggcccgaagacacccagcatagcccattccccaccgtgattggcccagagatgggcacatgacccagtaaggctaatgagaaagtgaatggatccccaagaagagatgcttttctgctggatattgtgcccccgtgatgtgaagtcaacatctgtagggttgcttttctccatcacatggagagaacttggctctgtggggatagcaatggtggggaggacagcatatggagcctgagaaggataggaacactgtgaagggcagagtggaaaccttagagaaactgagtccatgattatatatcatttgagcagctggatccanacttaactgatnccnatt

SEQ ID NO: 356011 - DNA, 1091 bp, Homo Sapiens
  misc_feature (940)..(940): n is a, c, g, or t
  misc_feature (950)..(950): n is a, c, g, or t
  misc_feature (955)..(955): n is a, c, g, or t
  misc_feature (957)..(957): n is a, c, g, or t
  misc_feature (961)..(962): n is a, c, g, or t
  misc_feature (978)..(978): n is a, c, g, or t
  misc_feature (985)..(985): n is a, c, g, or t
  misc_feature (1010)..(1010): n is a, c, g, or t
  misc_feature (1014)..(1014): n is a, c, g, or t
  misc_feature (1021)..(1021): n is a, c, g, or t
  misc_feature (1023)..(1023): n is a, c, g, or t
  misc_feature (1031)..(1031): n is a, c, g, or t
  misc_feature (1038)..(1038): n is a, c, g, or t
  misc_feature (1040)..(1049): n is a, c, g, or t
  misc_feature (1054)..(1054): n is a, c, g, or t
  misc_feature (1061)..(1061): n is a, c, g, or t
  misc_feature (1070)..(1070): n is a, c, g, or t
  misc_feature (1072)..(1073): n is a, c, g, or t
ctgacttacagctcttataaactagtggcaatttctgaacccagccggctccatctcagcttctggtttctaagtccatgtgccaaaggctgccaggaaggagacgccttcctgagtcctggatctttcttccttctggaaatctttgactgtgggtagttatttatttctgaataagagcgtccacgcatcatggacctcgcgggactgctgaagtctcagttcctgtgccacctggtcttctgctacgtctttattgcctcagggctaatcatcaacaccattcagctcttcactctcctcctctggcccattaacaagcagctcttccggaagatcaactgcagactgtcctattgcatctcaagccagctggtgatgctgctggagtggtggtcgggcacggaatgcaccatcttcacggacccgcgcgcctacctcaagtatgggaaggaaaatgccatcgtggttctcaaccacaagtttgaaattgactttctgtgtggctggagcctgtccgaacgctttgggctgttaggggtaagtcagaagtgcattcccccctgcctcacacatttctctggttcagccccaccacttgtctttttgctcctggtcattcagaacttgcagaagaatcaacagagtttctacttgatgaaatggtcctaataaactgctttttattcttgctgggagtcagtcttaacagcttcttatgggcaatcataagaggtactcaacaattgctacctgccggccattttacatatgattcatttatttaatccttacagcaacatgaatagatgatgtgccacactccattttttaaaaactaagttatatagagcttaatattcggctcagagtcacacagctgtaattagatttggatttcactcccatccatatttcttaattccatgctctactgctncttggctaanaggananatcnnctctgcattttgatcntgaaggntaagaatttgagtcaaaatgaaaantgantgcaaantnaaattatntgaaatntnnnnnnnnnncccanagttggncacttgcgngnntgcatgcttggaaagggg

SEQ ID NO: 356012 - DNA, 857 bp, Homo Sapiens
ctgacttacagctcttataaactagtggcactttctgaacccagccggctccatctcagcttctggtttctaagtccatgtgccaaaggctgccaggaaggagacgccttcctgagtcctggatctttcttccttctggaaatcttgactgtgggtagttatttatttctgaataagagcgtccacgcatcatggacctcgcgggactgctgaagtctcagttcctgtgccacctggtcttctgctacgtctttattgcctcagggctaatcatcaacaccattcagctcttcactctcctcctctggcccattaacaagcagctcttccggaagatcaactgcagactgtcctattgcatctcaagccagctggtgatgctgctggagtggtggtcgggcacggaatgcaccatcttcacggacccgcgcgcctacctcaagtatgggaaggaaaatgccatcgtggttctcaaccacaagtttgaaattgactttctgtgtggctggagcctgtccgaacgctttgggctgttagggggctccaaggtcctggccaagaaagagctggcctatgtcccaattatcggctggatgtggtacttcaccgagatggtcttctgttcgcgcaagtgggagcaggatcgcaagacggttgcaaccagtttgcagcacctccgggactaccccgagaagtataaggtatgtaggcaccagagcagctgtgtcccaagggctcctccaggactgtgatccgtgggacccccatgtgacttccacaggacacgtgactgtgtggtctgtgcgatccaggctgtgtgtgaccatagggctgtgtataactcacggatgtatgtg

SEQ ID NO: 356013 - DNA, 1142 bp, Homo Sapiens
atcaggccaaatcggccgagctcgaattcgtcgagagcgggctttttctttccagtgttggctgacttacagctcttataaactagtggcaatttctgaacccagccggctccatctcagcttctggtttctaagtccatgtgccaaaggctgccaggaaggagacgccttcctgagtcctggatctttcttccttctggaaatctttgactgtgggtagttatttatttctgaataagagcgtccacgcatcatggacctcgcgggactgctgaagtctcagttcctgtgccacctggtcttctgctacgtctttattgcctcagggctaatcatcaacaccattcagctcttcactctcctcctctggcccattaacaagcagctcttccggaagatcaactgcagactgtcctattgcatctcaagccagctggtgatgctgctggagtggtggtcgggcacggaatgcaccatcttcacggacccgcgcgcctacctcaagtatgggaaggaaaatgccatcgtggttctcaaccacaagtttgaaattgactttctgtgtggctggagcctgtccgaacgctttgggctgttagggggctccaaggtcctggccaagaaagagctggcctatgtcccaattatcggctggatgtggtacttcaccgagatggtcttctgttcgcgcaagtgggagcaggatcgcaagacggttgccaccagtttgcagcacctccgggactaccccgagaagtattttttcctgattcactgtgagggcacacggttcacgggagaagaagcatgagaacagcatgcagggggcccgggcccaaggggctgcctcgcctcaagcatcacctgttgccacgaaccaaaggcttccccatcaccgtgaggagcttggagaatgtaatttcaagctgtatatgactgtacactcaatttccgaaaataatgaaaatccaacactgctggggagtcctaaaacggaaaagaataccctgccacatttgtatgctaggagggatcccactggaagaacttccctggaaaaccatgaccagtggttccggcctgggctgcccaagcttctttccaggaaaaggaggccttttcggaggaattacttccgggag

SEQ ID NO: 356014 - DNA, 1828 bp, Homo Sapiens
caaggctgcaggaaggagacgccttcctgagtcctggatctttcttccttctggaaatcttgactgtgggtagttatttatttctgaataagagcgtccacgcatcatggacctcgcgggactgctgaagtctcagttcctgtgccacctggtcttctgctacgtctttattgcctcagggctaatcatcaacaccattcagctcttcactctcctcctctggcccattaacaagcagctcttccggaagatcaactgcagactgtcctattgcatctcaagccagctggtgatgctgctggagtggtggtcgggcacggaatgcaccatcttcacggacccgcgcgcctacctcaagtatgggaaggaaaatgccatcgtggttctcaaccacaagtttgaaattgactttctgtgtggctggagcctgtccgaacgcttggggctgttagggtttgacctcttgcacgtagcttgcatgcctttggaactgggtctcttcagttgacttttgtcgtcttcaacacactgcagcgtgtagcggttgagcctgtgtcacatagctgaatcagagtcatctgcggtactcaggtaggctccaaggtcctggccaagaaagagctggcctatgtcccaattatcggctggatgtggtacttcaccgagatggtcttctgttcgcgcaagtgggagcaggatcgcaagacggttgccaccagtttgcagcacctccgggactaccccgagaagtatttttttcctgattcacctgtgagggcacacggttcacggagaaagaagcatgagatcagcatgccaggtggcccgggccaaggggctgcctcgcctcaagcatcacctgttgccaccgaaccaaggggcttcgccattcaccgtgaggagcttgagaaatgtagtttcagctgtatatgactgtacactcaatttcagaaataatgaaaatccaacactgctgggagtcctaaacggaaaagaaataccatgccagatttgtatgttaggaggatcccactggaagacatccctgaagacgatgacgagtgctcggcctggctgcacaagctctaccagaagaaggatgcctttcaggaggagtactacaggacgggcaccttcccagaaacgcccatggtgcccccccggcggccctgaaccctcgtgaactggctgttttgggcctcgctggtgctctaccctttcttccagttcctggtcagcatgatcaggagcgggtcttccctaacgctggccagcttcatcctcctcttctttgtggcctccgtgggagttcgatggataattggtgtaacggaaattaacaagggctctgcccacggcaactctaacagcaagcagaaactaaataactaactcagggaggtgtcaccatccgaagggaaccttggggaactggtggcctctgcatatcctccttagtgggacacggtgacaaaggctgggtgagcccctgctgggcacggcggaagtcacgacctctccagccagggagtctggtctcaaggccggatggggaggaagatgttttgtaatctttttttccccatgtgctttagtgggctttggttttctttttgtgcgagtgtgtgtgagaatggctgtgtggtgagtgtgaactttgttctgtgatcatagaaagggtattttaggctgcaggggagggcagggctggggaccgaaggggacaagttcccctttcatcctttggtgctgagttttctgtaacccttggttgccagagataaagtgaaaagtgctttaggtgagatgactaaattatgcctccaag

SEQ ID NO: 356015 - DNA, 1251 bp, Homo Sapiens
  misc_feature (513)..(521): n is a, c, g, or t
  misc_feature (685)..(685): n is a, c, g, or t
cgtctgggaggcctctccagctccggcagaagaaagtgttgtgagccttggcacggatataggcgggtgttgcttgaccggtgggggagggcggggcccttatggtgccctaggtgaatggaggtacttgtgtagcattaaagggagcagtgagaggcgctcggtgtgcgtaataggttgttaaacgagaagatagttgttgtcgcagagaggggaacgccgtggcgtgagccggtaagaaatttcggcataagggttaggttatattgaccattaattggggttgtccccaagcacgggttagggggttgtgcacacgatttttagcggaaatttgaggtgggcccagtgcaaaataagagggggagaaagggttctgtttgtgacagagttccctcacggggggaaggggtaaagctccttgggtttcgggggccacccagttggaggcgctgagggagaggacagccccctgggagcccggaaccgacgtgcaaaactgattatccaggnnnnnnnnncccaggaacccttgtgccccacgcagtgaatccaggaaaaaaattatttctcgggggtagtcccggaaggtgctgcaaaactggtgggcaaccgtctggcgatccgggctccccaccggcgcgaaacagaagacccatctcgggtgaagtaccacatccagccngataatggggacataggccagctctttcttggccaggaccttggagccccctaacagcccaaagcgttcggacaggctccagccacacagaaagtcaatttcaaacttgtggttgagaaccacgatggcattttccttcccatacttgaggtaggcgcgcgggtccgtgaagatggtgcattccgtgcccgaccaccactccagcagcatcaccagctggcttgagatgcaataggacagtctgcagttgatcttccggaagagctgcttgttaatgggccagaggaggagagtgaagagctgaatggtgttgatgattagccctgaggcaataaagacgtagcagaagaccaggtggcacaggaactgagacttcagcagtcccgcgaggtccatgatgcgtggacgctcttattcagaaataaataactacccacagtcaaagatttccagaaggaagaaagatccaggactcaggaaggcgtctccttcctggcagcctttggcacatggacttagaaaccagaagctgagatggagccggctgggttcagaaattgccacta

SEQ ID NO: 356016 - DNA, 1062 bp, Homo Sapiens
gagtccggaattcccgggatcgcgcacgatggccggcgccgcgccgcgggtccgctacctggcgggcttctgctgccctctcgggggcctggcggcgggcaagccccgcgtgctgtgccatgaggcagaggtcttcctgtccaccgggagcgagctcgtctacgtgtacgaccaggagggcgggctgctgaccgcggcgttccggttccccgaccaggtgtggcacctggagctgctggcgccgcgcaggttgctgtacgcgctgtgcgcccggaggggcctctactgcctgtcgctggaccacccgggcaggagcaggtctacgagccaggatgacagggacagcgaggacggtgaccagccttcccccgtgatccctgtggaccccgatgcctgcatccttcccgatgctgcgctgtgcgcgttcaccttgctggacagtgtgctggtcaccctggtgcagggccctgcccgatggaagatgcagctgtttgagcagccctgtcctggggaggacccccggccaggaggccagatcggtgaggtggagctgtcctcctacacgcccccagccggggtcccaggaaagcctgcagccccccacttccttccagtgctgtgctctgtgtcaccatcaggctccagggtcccgcacgacctcctcgggggctccgggggcttcacgctggaggacgccctcttcgggctcctctttggagctgatgccaccctcctgcagtcacctgtggtcctctgtggtctccctgatggccagctctgctgtgtgatcctgaaggccctggtcacctccaggtcacccccctggtgacccaaatgcccctgtcaagatcccctcctcccctggaaggaagcctgccctccttatagggggcccttggataaagacgcctcaggggctgaaaaagcctccccaaaccttttcccgcccataaaacaggccagttgcccccgccgtatccgcttccagtgagcccttctggtccccctaccccgccgccggattcgctttccccctcgcagggggcacaccgtgggagcgcg

SEQ ID NO: 356017 - DNA, 1023 bp, Homo Sapiens
  misc_feature (69)..(77): n is a, c, g, or t
tgtgccatttccgcgggtgtgccccccccacaggaggggtcttccccagggtgaactggcacaagaaannnnnnnnncactaagctcgccaaaaagggggagccccctaaggaggggcttccctccaaggggtggaagccccccgggagccccccgagaaggttcgtgcgggaaccctggagccctgatggtgacccagaagccccagcactggaaggaagtggggggctgcaggcttttcctgggacccccggctgggggcgtgtaggaggacagctccacctcaccgatctgccttcctggccgggggtcctccccaggacagggctgctcaaacagctgcatcttccatcgggcagggccctgcaccagggtgaccagcacactgtccagcaaggtgaacgcgcacagcgcagcatcgggaaggatgcaggcatcggggtccacagggatcacgggggaaggctggtcaccgtcctcgctgtccctgtcatcctggctcgtagacagaaagagtgctgggggcaggggctccagataatcgggcagggatggcggccgaggcttcagagctggcggcagcccgggtccccaagcgcgatgaggtggggctgctcgctctgaagcagtccgggggcagcaggagtgtgcgggagggaggccgcgggcccgccctcacctgctcctgcccgggtggtccagcgacaggcagtagaggcccctccgggcgcacagcgcgtacagcaacctgcgcggcgccagcagctccaggtgccacacctggtcggggaaccggaacgccgcggtcagcagcccgccctcctggtcgtacacgtagacgagctcgctcccggtggacaggaagacctctgcctcatggcacagcacgcggggcttgcccgccgccaggcccccgagagggcagcagaagcccgccaggtagcggacccgcggcgcggcgccggccatcgtgcgcgcgggcccgtcagagtgagaagatcccgggaattccggaccggtacc

SEQ ID NO: 356018 - DNA, 1065 bp, Homo Sapiens
  misc_feature (945)..(945): n is a, c, g, or t
  misc_feature (964)..(964): n is a, c, g, or t
  misc_feature (982)..(982): n is a, c, g, or t
  misc_feature (985)..(985): n is a, c, g, or t
  misc_feature (995)..(995): n is a, c, g, or t
  misc_feature (1000)..(1000): n is a, c, g, or t
  misc_feature (1002)..(1002): n is a, c, g, or t
  misc_feature (1006)..(1006): n is a, c, g, or t
  misc_feature (1008)..(1008): n is a, c, g, or t
  misc_feature (1014)..(1014): n is a, c, g, or t
  misc_feature (1020)..(1021): n is a, c, g, or t
  misc_feature (1027)..(1028): n is a, c, g, or t
  misc_feature (1032)..(1032): n is a, c, g, or t
  misc_feature (1036)..(1036): n is a, c, g, or t
  misc_feature (1047)..(1047): n is a, c, g, or t
  misc_feature (1050)..(1050): n is a, c, g, or t
  misc_feature (1058)..(1059): n is a, c, g, or t
ttcctcgccagagaaactgctgtcttccccggcggtagggaagggttaatgccaccgagtatccagacccgctgaagcctagagggccttgtaccggctcaccgcgtggctgtcgctgtctcgtgtccccagtgggggaggcgtcgcactgccacgtctgttctgcgtggctgtcgggcggcgtttggtcccgggagcctcgccggcacctggaatggataaaagtggcagtttttgtttcttcccatgaggttgtgtatctggactgagaaccaggaaattaatctagactaagacatttctaaggacctggaatggctttggggagcaccaggaggacccgaaaagagtatttgagggcctagagggacagaagagtttgccagtaggatttatgagaaacaattgatcagaaacagcagcagagaaaccttttagatttcttctgtggaaaagttgagtcttggttcaaattaagtaaaataaacactgaagagaaatcaaaatctcaaatataaaaagtatgttacttatagtgtaaatttaggaaaacaaatgaaaggacagatctttaaaaatttttaactatggtgaaatatttgtaaaacttttgggctcatctctgagaattgctgtgattctgaaacttgataatatctcaaatagagaacagtttcagtgaaaaatagcacttgagaataaatcagatgttcccaagaaagaagatctgagaatggtaaagtgccactgacaaataaattatttacatacttacatattaccttggcaaacacaagagacattcaagttaaagcacggtgcttgacaatactatattgaatgcaataaaagttggatttcattcatatgtacaacaaactactttcttcttcacttcaagattcggtacaactgttcctgaattccaactctcctatacatccnatgtcagggtcctgtagcncgggcccttatcaggtantgnactgctgccngtganantatntnaagcanttgagnncatatnntttntggngtggggaaatnggncttttggnnggggag

SEQ ID NO: 356019 - DNA, 1351 bp, Homo Sapiens
  misc_feature (932)..(932): n is a, c, g, or t
  misc_feature (1223)..(1238): n is a, c, g, or t
gaaaaccccccccactaattctccatcactgaaaggatcagtcctactattttttatagttagtgtagtatttggttagagctcttggggaaaatgcaaaaaatcagagaaagattctgaaccagggaaggcagatgaaagaagtgaaattgttatggttaactaatacttactgtgcattgacatgggtcaggcactcttttaagtattttaacatttaagaaagacaactgaagaaggtgaaattcacattggattaatttggattaaatactgtccatttccctgtcagatgctctgatgtaaaacaaggaattgaaaaaatttaacaaataaatttattcacgcaaatacacatgtgtgtatacgtgtgttccatcttaaagttaattaggcaagagaaagttaaagtttaattaaaacttttgtcacaaattctagccctggtgataaggtggaagaatagaatgattgtcacctgtctgttgatttctcattaattaaatcccagctggcaaaggcgtccttgaaactcaagtggtgagaccctgctgaaatttggttgccatgggtgcagattgaggtccctggagtcactaaatccgttccattcttattccaacttagacactagcatctatgaaatccaaatccctttgttaaagatgatacaaagacctacagaaataacaaacattccttctcaaaataattgtttgaggatttcgaacccgtttcagcgatgtctagaaatccctgaatattccttgcactctttttagaatccagcaggcttaagaagatctcactgtgctaacaatagctccttttctgagaaatattggagtgctgagcctgtgggagcaaaaacctttctgggatcttggtttgggagtgcatttataaatcagattttctggggcctctttgtncttttgtgaaaaataagtatctctgccctacaagcatttatgccaaaatggagagagaactcactgcgttccatgaagaagtttgctttccaaacagctgacttcagtctggaagtagagaccaaatgtcctggaaagtaaaaaatgtagtcccattcagctttaattccagtttgacaaaaaacaaagttttttttgaagggcacagaaagataactccttagggggcaaatagacacccataaattgttgttatcatgcacccattgttgaattacacccacatggggnnnnnnnnnnnnnnnnctctagataggcctttaagtaaaacttatgccttttgaggcaggcgcctgttatacatctcaatttgcacacgggagttactctctcttctatggtgaaaattccagaacaaa

SEQ ID NO: 356020 - DNA, 1118 bp, Homo Sapiens
  misc_feature (175)..(221): n is a, c, g, or t
  misc_feature (301)..(319): n is a, c, g, or t
  misc_feature (1010)..(1010): n is a, c, g, or t
  misc_feature (1039)..(1039): n is a, c, g, or t
  misc_feature (1085)..(1085): n is a, c, g, or t
attcccgggatggcgtcgctcggggtcccgggaaattgctccgtgggctttcagcggcggtttttatcgccggccggggtgtgcctgtctgcggctcgcctctcctccgggaccgtaaagctgctgccgtgatttatcctccccttctcccaaatccgattaaatggaggagctnnnnnnnnnnnnnnnnnnnnnnnnnnnnnnnnnnnnnnnnnnnnnnnaaggacggggccaaggaggggaggacaaacggcccctcagagggtggcggatttgcctttatttacagccgcggctttcnnnnnnnnnnnnnnnnnnnatggggtttggtgagcttttcccgtctttctcgtgctgcgttcaagcacgatgcagggacggcaggggtttggaactggataggccttgtcgccctgttccaaagggcagggcaggtcctgtctgggagacaaggaggcctaggaaagatgagggccaggaagcctcccccacctccttccatcaggggaagggcgagcgaaaggggagagaaaacccacgttcaggagagcatgggggcgggaggggagggcgctgcttatcccaactcgcgtagttgaaacctgagcagaggctcgggcaagcctggagtgacctcgcaaccttacagcgggtcgcaggtgcccgttattcctagactgtcccaggagccaggaaagagggattcggatcatatttaaccctatcttctggctcgcagatgctgcttctctcatggtttatcaccggaatggaaaggaggaaacggggagtgggggaaagggcgaacacccagaagcagctgcggcattttgctgactattcgcccatggagccggtttgccatccagtgatgccagagtcccggcgcgacagaaagcaggactcccaagatcttcctcctgctgcattttaggcactgaaccccaatcccgaccgtatgttaacactgaattctgagtaggagttttgttttgggcagtgtgaagatngcgcatgttcgggaaaggggaagcaatcncacgcattccccaaacgcggtacagaccaaaccgcagttccacgtnaacggatccggttttaatttccccggatttggc

SEQ ID NO: 356021 - DNA, 1815 bp, Homo Sapiens
cccgggatcgcgcctgctgggcccgagctttttcctgggatagcgatggagacgccgggcgcatcagcgtcgtccttgttgcttcccgccgcgtccaggcccccgaggaagcgcgaggcgggagaggctggggctgcgacgagcaagcagcgggtcctggacgaggaagagtatatcgagggcctccagacggtcatccaaagggatttctttcctgatgtggagaagctccaggcacagaaggagtacctggaagccgaggagaatggagacttggaacggatgcgccagattgccatcaagtttggctctgccttgggcaagatgtcccgggagcccccgccaccctatgtgactccagccacatttgaaacccctgaggtgcatgcaggcactggagtggtgggcaacaagcccaggccccgcggccgaggcctggaggatggagaggctggagaggaggaggagaaggagccgctgcccagcctagatgtcttcctgagccgctacacgagtgaggacaatgcctccttccaggagatcatggaggtggccaaggagagaagccgggcacgccacgcttggctctaccaggctgaggaagagtttgagaagaggcagaaagataatctcgaactcccgtcagcagagcaccaggccatcgagagcagccaggccagtgtggagacctggaagtacaaggccaagaattccctcatgtactatccagagggtgtccctgacgaggagcagctgtttaagaagccccggcaggtggtacataagaacacgcgcttccttagggaccccttcagccaagccctgagcaggtgccagctccagcaggcagccgccctcaatgcccaggggccctccctctctttctccaagaaggctgccaaccccagagccccagccttgccctgaggagaggaagtgtttccagcatgttcccacgtgtttgcccaccggccagctgtcgagcgtgggctgcggtccccctgatgccagcctctctgcttgttccagcacaaacagggcaaggtgtgaacgagtccccgatgatgacctggggggaggttgagaacacacccttgagagttgaagggtcggaaacgccctacgtggacaggacacccggcccagcttttaagatcctggagccaggccgcagggagcggctgggtctgaagatggccaacgaggccgctgccaagaaccgggccaagaagcaggaagccttgcggagagtgacggagaatctggccagcctcacccccaaaggcctgagcccagccatgtcgccagccctacagcgccttgtgagcaggacggccagcaagtacacagaccgggccctgcgggccagctacacaccatccccagcacgctccacccacctcaagaccccggccagtgggctgcagacccccacaagcacaccggcgcctggctctgccacacgcacccctctcacacaggacccggcctccatcacggacaacctgctgcagctccctgcccggcgcaaagcttcggacttcttttagagccaggcctgggctgggctcatagacgcttcacagagcctgcagggcagctgtacacccagcagaggactccagccttctcggggcccaggcctgggccagaagctgttgaccataccaggagtcactggagaaaggggctgtgctggggccagactggcacaaggcactcgtgcccacaccacaccccagggccttgccaagctgtttgctgtttaattggccccttgaactgtcattaaagaacacctaggtacaaaaaaaa

SEQ ID NO: 356022 - DNA, 1090 bp, Homo Sapiens
gtggaccggtccggaattctcgggatcgcgcctgctgggcccgagctttttcctgggatagcgatggagacgccgggcgcatcagcgtcgtccttgttgcttcccgccgcgtccaggcccccgaggaagcgcgaggcgggagaggctggggctgcgacgagcaagcagcgggtcctggacgaggaagagtatatcgagggcctccagacggtcatccaaagggatttctttcctgatgtggagaagctccaggcacagaaggagtacctggaagccgaggagaatggagacttggaacggatgcgccagattgccatcaagtttggctctgccttgggcaagatgtcccgggagcccccgccaccctatgtgactccagccacatttgaaacccctgaggtgcatgcaggcactggagtggtgggcaacaagcccaggccccgcggccgaggcctggaggatggagaggctggagaggaggaggagaaggagccgctgcccagcctagatgtcttcctgagccgctacacgagtgaggacaatgcctccttccaggagatcatggaggtggccaaggagagaagccgggcacgccacgcttggctctaccaggctgaggaagagtttgagaagaggcagaaagataatctcgaactcccgtcagcagagcaccaggccatcgagagcagccaggccagtgtggagacctggaagtacaaggccaagaattccctcatgtactatccagagggtgtccctgacgaggagcagctgtttaagaagccccggcaggtggtacataagaacacgcgcttccttagggaccccttcagccaagccctgagcaggtgccagctccagcaggcagccgccctcaatgcccagcacaaacagggcaaggtggggccccgatggcaaggagctgatcccccaggagtcccctcgagtgggtggatttggatttgttgccactccttcccctgcccctggtgtgaacgagtccccgatgatgacctggggggaggttgagaacacacccttgagagttgaagggtcggaaacgccctacatggacaggacacccggccca

SEQ ID NO: 356023 - DNA, 923 bp, Homo Sapiens
  misc_feature (682)..(682): n is a, c, g, or t
atcatagcacacctggcactgcatttcttcggttttgactttcaatccagcagtagaactctcagtttctccatttaccatgcctggttccatggccaataaatctagagttctcatcgtatggacataaagatccttgtttaattttagggctgcttctagtaccaaaatagaatcagcagcttgttctttgagcactttcaaaatgttttctgttagctctttttcctgttgcatttgattcataacacttaactgagggggtccgggttttgcctgtttgactggaaaactactttgaacaattgtcctaattgcccatctattatagagaagtacagccatggcagtggtcggaggtaaagtggccagatccatgtctacatgctttgtcccaggaggaactttactgatgcagagtagttcatttagtagcatattcaatactggaacagacaaacttttctataatatgtctaagtcccacttcaaatgtgcagcaactttaagagcaagtagttttaaaataagatttctcttgttatcaggcgcaggttgaacttggttttgttcattaactgaaggtttggaagcctgttccaaaaactgaactataagttgaactggtgcaggatccgggcagggcttgcgcagatgtttctccaacagtgactcctccagnagaaactcaaaccagcaggtctgcggcggggtgcagggccggctggaggtggccgcctcccggtccgccgcctccgcgctcatcctgcccccgccgccgctaccaccagggccgcttcccggctccaacctgacacttggatgcgggccggtgcctggggtatgcggaacccggtgggagagaggccaccctccgaacgtcccggaaactcacacaatccaaaatggcggcgcgggccccc

SEQ ID NO: 356024 - DNA, 1147 bp, Homo Sapiens
  misc_feature (3)..(3): n is a, c, g, or t
  misc_feature (6)..(6): n is a, c, g, or t
  misc_feature (10)..(10): n is a, c, g, or t
  misc_feature (12)..(12): n is a, c, g, or t
  misc_feature (20)..(21): n is a, c, g, or t
  misc_feature (602)..(668): n is a, c, g, or t
  misc_feature (705)..(720): n is a, c, g, or t
  misc_feature (734)..(918): n is a, c, g, or t
  misc_feature (1045)..(1081): n is a, c, g, or t
tgngcntggncnattcaagnnaaaatattttctaatttcccttattatttcctttgacccatgagttatttagaagtgttttttcttctattaatttctagtttaattctcctgtagttagagaatatgctttgtattatttcagtctttttaaattgagggatggaggttgtgtgtttttggtggtctagaatatgatccatgttggtgaatgttttaagtacacttgaaaataatgtatattctgctgttactgggtgaaatattgtataagtatctgtgaagtcaagttggtcagtagtccttggtgatttgggtggggggggtctgtttgttttgccaatcactaatcattttgtaatatccctcctaatattccttgttccaaagtctactttgttgatattgacaccactccagcttagtgcctgtatggtgtatgtattttctttatctttttaatctgtgtatttatatttaaactatgtttcttatacatagcatgtggccggatcttacttttttgtccagtttgacaatctgccttttagactaggtgtatcatttacatttgatgtaattattgatatgcttatgttaannnnnnnnnnnnnnnnnnnnnnnnnnnnnnnnnnnnnnnnnnnnnnnnnnnnnnnnnnnnnnnnnnnaaaacatgaagtatttttgtgattccattttatctcnnnnnnnnnnnnnnnngaaatggagtctcnnnnnnnnnnnnnnnnnnnnnnnnnnnnnnnnnnnnnnnnnnnnnnnnnnnnnnnnnnnnnnnnnnnnnnnnnnnnnnnnnnnnnnnnnnnnnnnnnnnnnnnnnnnnnnnnnnnnnnnnnnnnnnnnnnnnnnnnnnnnnnnnnnnnnnnnnnnnnnnnnnnnnnnnnnnnnnnnnnnnnnnnngttcttgatttactagcttcacatctttgttttatattttcagtggttgatacagggtgtatagtatgcatcctcaccaccatctatgttgaaaaaatgttaaaccatatcacctgtaacttaagcnnnnnnnnnnnnnnnnnnnnnnnnnnnnnnnnnnnnngtctctgttgtaggtatttcagggcaaaaaggcacagtaaatagtgcctaaaacaaacaaagccaa

SEQ ID NO: 356025 - DNA, 1128 bp, Homo Sapiens
agcgggtgaggcccgcgtgacggccgctgagcgtgcgcctggcggggcgggcggcggcgctcggagtcgccgggagctgccaggctgtccgcgccgccgctgcggggccatgatccggaacgggcgcggggctgcaggcggcgcagagcagccgggcccggggggcaggcgcgccgtgagggtgtggtgcgatggctgctatgacatggtgcattacggccactccaaccagctgcgccaggcacgggccatgggtgactacctcatcgtaggcgtgcacaccgatgaggagatcgccaagcacaaggggcccccggtgttcactcaggaggagagatacaagatggtgcaggccatcaaatgggtggacgaggtggtgccagcggctccctacgtcactacactagagaccctggacaaatacaactgtgacttctgtgttcacggcaatgacatcaccctgactgtagatggccgggacacctatgaggaagtaaagcaggctgggaggtacagagaatgcaagcgcacgcaaggggtgtccaccacagacctcgtgggccgcatgctgctggtaaccaaagcccatcacagcagccaggagatgtcctctgagtaccgggagtatgcagacagttttggcaagtgccctggtgggcggaacccctggaccggggtatcccagttcctgcagacatctcagaagatcatccagtttgcttctgggaaggagccccagccaggggagacagtcatctatgtggctggtgccttcgacctgttccacatcgggcatgtggacttcctggagaaggtgcacaggctggcagagaggccctacatcatcggcgggcttacactttgaccaggaggtcaatcactacaaagggaagaactaccccatcatgaatctgcatgaacggactctgaacgtgctgccctgccggtaccggtcaaaaacgggggaattggacccccgtacccgggtcccagcaaacctcctaaatcccttcaaggggggaacctgtgggggtacgggaaagacagaaattatccccttacaaggaattgtttcccaccccctccaagaaacccccccaaaaaaaggggcatcttcccccctaatta

SEQ ID NO: 356026 - DNA, 2105 bp, Homo Sapiens
gtggaccggtccggaattcccgggatcgggcccgcgttctgggtggcgtcctcgtccggcatgggccggggctggcaggctgcggggctcgcctgccgggagggtcgggctgcagaggctccgcgccctgccgtgggcgaccccgtctacctctggcggaggccccgcccggtcacgccgacctctccggtgcagccaccgcgctgagatctggagccacggcctccctgcttctccgtaaccaccagcaaccagcttgcccggctccggtccaggggttcccctggcctccgggcgagcgtccctgtagctatgacatggtgcattacggccactccaaccagctgcgccaggcacgggccatgggtgactacctcatcgtaggcgtgcacaccgatgaggagatcgccaagcacaaggggcccccggtgttcactcaggaggagagatacaagatggtgcaggccatcaaatgggtggacgaggtggtgccagcggctccctacgtcactacactagagaccctggacaaatacaactgtgacttctgtgttcacggcaatgacatcaccctgactgtagatggccgggacacctatgaggaagtaaagcaggctgggaggtacagagaatgcaagcgcacgcaaggggtgtccaccacagacctcgtgggccgcatgctgctggtaaccaaagcccatcacagcagccaggagatgtcctctgagtaccgggagtatgcagacagttttggcaagtgccctggtgggcggaaccccctggaccggggtatcccagttcctgcagacatctcagaagatcatccagtttgcttctgggaaggagccccagccaggggagacagtcatctatgtggctggtgccttcgacctgttccacatcgggcatgtggacttcctggagaaggtgcacaggctggcagagaggccctacatcatcgcgggcttacactttgaccaggaggtcaatcactacaaggggaagaactaccccatcatgaatctgcatgaacggactctgagcgtgctggcctgccggtacgtgtcagaagtggtgattggagccccgtacgcggtcacagcagagctcctaagtcacttcaaggtggacctgttgtgtcacggcaagacagaaattatccctgacaggggatggctccgacccataccagggagcccaagaagaaggggcttctttccgtcagattaacaggtggcagcaacctcaccacagtacctcatcgtccacgcggatcatcaccaacaggttggagtatcgaggcgcgaaaccagaagaaggaagccaaggagctggccttcctggaggctgccaggcagcaggcggcacagcccctgggggagcgcgatggtgacttctaacctggcagaggccctggccggccctccccctgctctgcttctgcgccttctgcgtttggacataggactctgcagggccgccctctctaactggcctggctctggaagggctggtgaggactctgcctccttgcctgcctacaaggtgcctggtttgcagcaggctctccgctctttccagcaaagctgctcagagagggtgtccagcacagtggagaggccggaagtgagacgggcagacggcacctgcagcctgaaacgcaccgctcctgcgtgcgcccccacctggtccccggatgcccccaccacctggacagaggccacactgactgcccacccagctgtggcgggaggtgcagagcagagggctttagggagcagtgactgcggtcacccctttagttctctgggtgtagaccacaccacctcccactgggcaccccccaacacggtgtcctgccacccagcgcctggctccaggaaaacacgcttgccttccttcccggcagcttcgccactctccttatggactctgttctgtttgtacatggctgacggaaatctctttggtacaaccgaataaagcctggtggcagtgctgcgcggggctcccagccctgctgggaaggaccagggaaccactcagcaaggagaccctcttggccctgcccccaccatgcacccagcagccgggagtgcagcgga

SEQ ID NO: 356027 - DNA, 1517 bp, Homo Sapiens
  misc_feature (698)..(706): n is a, c, g, or t
  misc_feature (832)..(910): n is a, c, g, or t
  misc_feature (960)..(972): n is a, c, g, or t
  misc_feature (1022)..(1046): n is a, c, g, or t
  misc_feature (1049)..(1065): n is a, c, g, or t
  misc_feature (1141)..(1141): n is a, c, g, or t
  misc_feature (1157)..(1216): n is a, c, g, or t
  misc_feature (1269)..(1269): n is a, c, g, or t
  misc_feature (1275)..(1275): n is a, c, g, or t
  misc_feature (1410)..(1452): n is a, c, g, or t
  misc_feature (1477)..(1478): n is a, c, g, or t
accaggctggtaccggtccggaattcccgggatagctgccaggctgtccgcgccgccgctgcggggccatgatccggaacgggcgcggggctgcagagcggcgcagagcagccgggcccggggggcaggcgcgccgtgagggtgtggtgcgatggctgctatgacatggtgcattacggccactccaaccagctgcgccaggcacgggccatggtgtgactacctcatcgtaggcgtgcacaccgatgaggagatcgccaagcacaaggggcccccggtgttcactcaggaggagagatacaagatggtgcaggccatcaaatgggtggacgaggtggtgccagcggctccctacgtcacttacactagagaccctggacaaatacaactgtgacttctgtgttcacggcaaatgacatcaccctgacttgtagatggccgggacacctatgaggaacgtaaaagcaggctgggaggtacagagaatgcaagcgcacgcaaggggtgtccaccacagacctcgtgggccgcatgctgctggtaaccaaagcccatcacagcagccaggtgagtcggcggcggaatccccgaggcccctgggtcgaggtctccaggggaaaagaggggcacctccctgaccctctcagggtcctcctgcccactgcctccccatcccccagccgggtcctgggggtggnnnnnnnnnggggaggggcaaggccccctcaagcccctggctcctggacccttccttgtggcacggaaaaatggcccttcctggaggtaacccgggggaggtattggcacaaaccaggtttttggggccaaggannnnnnnnnnnnnnnnnnnnnnnnnnnnnnnnnnnnnnnnnnnnnnnnnnnnnnnnnnnnnnnnnnnnnnnnnnnnnnnatttttccccttggggggccgaaaacccaatttcctctttcccaataagnnnnnnnnnnnnncccccctcttcctcccccgaaatttttctgggggccctcctttctccccnnnnnnnnnnnnnnnnnnnnnnnnncgnnnnnnnnnnnnnnnnnggaccaccagaggggggggggagaaaaaccacaaacttcatcccccccttctcccctccggggcggcggaggggcnattgtgggcgggggtnnnnnnnnnnnnnnnnnnnnnnnnnnnnnnnnnnnnnnnnnnnnnnnnnnnnnnnnnnnngggcgcgccccttagacagccgagaatactttttcacccccccggggggaggngaaaanaaggtgagtccgtagaaaaggataagggcgtcatcccgcccattatccaaaaaagaacagagggggcccgctttaccaccgccttcccggtattgtgggtggcgcggggggatcatcttcaaccgaaattatttnnnnnnnnnnnnnnnnnnnnnnnnnnnnnnnnnnnnnnnnnnngtttttatggacggaggaggtcttnnattgtaggggccgcacctttagtggcgtgtgtggcgtgg

SEQ ID NO: 356028 - DNA, 1108 bp, Homo Sapiens
cggtccggaattcccgggattgcgcctggcggggcgggcggcggcgctcggagtcgccgggagctgccagtgctgtccgcgccgccgctgcggggccatgatccggaacgggcgcggggctgcaggcggcgcagagcagccgggcccggggggcaggcgcgccgtgagggtgtggtgcgatggctgctatgacatggtgcattacggccactccaaccagctgcgccaggcacgggccatgggtgactacctcatcgtaggcgtgcacaccgatgaggagatcgccaagcacaaggggcccccggtgttcactcaggaggagagatacaagatggtgcaggccatcaaatgggtggacgaggtggtgccagcggctccctacgtcactacactagagaccctggacaaatacaactgtgacttctgtgttcacggcaatgacatcaccctgactgtagatggccgggacacctatgaggaagtaaagcaggctgggaggtacagagaatgcaagcgcacgcaaggggtgtccaccacagacctcgtgggccgcatgctgctggtaaccaaagcccatcacagcagccaggagatgtcctctgagtaccgggagtatgcagacagttttggcaagtgccctggtgggcggaacccctggaccggggtatcccagttcctgcagacatctcagaagatcatccagtttgcttctgggaaagagccccagccagggggagaaagtcattctatggtggctggtgcgcttcgaactggttccacatcggggcatgggggactttcctggaaaaggggcccaaggcttggcaaaaagggccctaaaaccatccgcgggctttaccctttttgaccaggaagggcccattccctacccagggggaagaaaactaccccccttcatggaatctggcttgcaaccgggatttcctaaacagttgttgggccttctccaataccccaccccccaacatcgctcactttgcagatgctccctccccgcatgtcccctagcgcacagaagtctccctcgatcccaccccaaatactcgagacaccccggcgcggatgaatccctttctccctcccccat

SEQ ID NO: 356029 - DNA, 926 bp, Homo Sapiens
  misc_feature (482)..(513): n is a, c, g, or t
  misc_feature (547)..(547): n is a, c, g, or t
gccacgggatggtcttgcagccctgtcctgactcattaatgcctctgacctcaggggactgtacagacagctcctgcctcagagctctgaaaaagtctccactcaacacatgaaactattccagagagtgcatggaagagatgagagatgatggggtagaaagctggtccaacacaggtcatagggctagggaagtggtcccagggcaagggacgctgggtgccagcatcttctcagactctacggggataggcaaatttctccatctcccggagcctcagcctcctcgcctgtaaaatgtgggttatcctgacgatttcacaaagtcgatgtgcagctcgaatgaaacagaggatttgaaaaagcactaaacaaacacatgttatagtaattaacaaccataactttcccactagcctgcactattcttccaaaagactcacacatctgcagtcgttgtgaagagactgggcaagcgaggnnnnnnnnnnnnnnnnnnnnnnnnnnnnnnnnaaattgaagtttccaatttcgaggactttaaaanatatatatcataagcttcctttatttgcctaaatactgatctaaaaatctccaagatgaccactagaaaaagtggcaggtcgtcgtatagagtcaagggagaaagaaatagatgaaacaaagggggacaaaatacacttagagctgtttcttctttctcttcgggatccttagtctgattgatctcgcccaagactcagtcccatggggctctctgaagggcatggaggggacctctggccacgatttcccgaaggatagggtctcccgggacagataccttccctggccactcgcgccgctccctgagaccctgggaccttgggactaacgctcagaacttacatcgcctccatattgccatcccgggaattccggac

SEQ ID NO: 356030 - DNA, 1990 bp, Homo Sapiens
  misc_feature (15)..(15): n is a, c, g, or t
  misc_feature (1174)..(1174): n is a, c, g, or t
  misc_feature (1176)..(1176): n is a, c, g, or t
  misc_feature (1354)..(1411): n is a, c, g, or t
aaaaaagcaggctgngtaccggtccggaattcccgggatggagcctgagccctgcggaacctcggcgctcggccccaccccgcccgtacctgcacttatttattgttgttatttcttaccgcggagccccgcagtcgggtcctcccgcccgctcccgcgcagcgctagcattctccagtccctcagtcccttcccgcgcggtgcgccgcagccgaggcgatgcgcctcattcagaacatgtgcaccatcgccgagtaccccgcgccgggcaacgccgcggcctccgactgctgtgtgggcgccgccggccgccgcctggtcaagatcgccgtggtgggcgccagcggcgtgggcaagaccgcactggtggtccggttcctcaccaaacgattcatcggtgactatgaaagaaatgcaggtaatctctatactagacaagttcagatagaaggtgaaaccctggctcttcaggttcaagacactccaggtattcaggtccatgagaacagcctgagctgcagtgaacagctgaataggtgcattcgctgggcagatgctgtggtgatcgttttctccatcactgactacaagagctatgaactcatcagccagctccaccagcacgtgcagcagctacacctgggcacccggctgcctgtggtggtcgtggccaacaaagctgacctgttgcacatcaaacaggttgaccctcagcttggactgcagctagccagcatgctaggctgctcattctatgaagtgtctgtcagtgaaaattataatgatgtctacagcgccttccacgtcctctgtaaagaggtcagtcacaaacagcagcctagcagtacacccgagaagcgaagaacctccctcattcccaggcccaagtcacccaacatgcaggacctgaagaggaggtttaagcaagccctctctgccaaagtgaggactgtcacctccgtctgaagcaggaggagcactcaagggggtttggtcttcccaggaagagggcctgaggttctcctagtgcaggaacgttgaatattggcaatgattcctggttccagaaagggctggagcagaagggccaagagggcctgtggaactgctacagaaaaggaagtgttgttctgagcagggggacaggattgatgaggcttgaaagagccccacnancccactctctgaatatgtgaaatgtactctgtgtcttttcctttagagtggggagggggcataatcgtttcggtttctgcattcaactaccttgtaaatggtggtccgttgcagttcaccaaatgtattgatgtgatttacagtgggaatgaaagaacagattaagcattgataggcnnnnnnnnnnnnnnnnnnnnnnnnnnnnnnnnnnnnnnnnnnnnnnnnnnnnnnnnnnccaagcagcaagaattgcttttctcttaccagtatgatttgtaactctggaacactattcttacagaatgcctttctaacctgaaggatacccagatttctttctttatgtacaagatggaaaatcccctacccctcaaaaacaggttgagtttatgggccagaatattctgtataccagacattggtaagctctcatggtttacaggaaggctctggttccccctcacaggatgagcatgctcagttgggcgtgtgtggaggacctgtgaacttcacgctcttcaaccccagactttgactgtatagttttatgtttttttaactgttccatcaggaaaaaaatgtgtcagttgattttggtgtgacttgtgtaaatggttcatggcaatgacgttgggttgcttcctaggcctggctgagttgtgcctaagggtggctgaaatactaaaacacttatcttacagcaagtgaacaggggctacctgccacatcccctccacagatgcactttaaaaagccactcatgctttggcttaaactgtaattaatttattttatgtacaataaatcgcatttg

SEQ ID NO: 356031 - DNA, 1723 bp, Homo Sapiens
  misc_feature (1072)..(1072): n is a, c, g, or t
cggctcccaagatggcgtcatcatggaagggccgctgagcaaatggactaacgtgatgaagggctggcagtaccgttggttcgtgctggactacaatgcaggactgctctcctactacacgtccaaggacaaaatgatgagaggctctcgcagaggatgtgttagactcagaggagctgtgagtggtatagacgatgaggacgacagcgaccttcacaagtaactgttgatcagaaaaccttccatttccaggcccgtgatgctgatgagcgagagaagtggatccatgccttagaagaaacaattcttcgacatactctccagcttcaaggtttggattcaggatttgttcctagtgtccaagattttgataagaaacttacagaagctgatgcttacctacaaatcttgattgaacaattaaagcttttggatgacaagcttcaaaactgcaaagaagatgaacagagaaagaaaattgaaactctcaaagagacaacaaatagcatggtagaatcaattaaacacgtgcatggtgttgctgcagattgccaaaagtactattaatcccgtagatgcaatatatcaacctagtcctttggaacctgtgatcagcacaatgccttcccagactgtgttacctccagaacctgttcagttgtgtaagtcagagcagcgtccatcttccctaccagttggacctgtgttggctaccttgggacatcatcagactcctacaccaaatagtacaggcagtggccattcaccaccgagtagcagtctcacttctccaagccacgtgaacttgtctccaaatacagtcccagagttctcttactccagcagtgaagatgaattttatgatgctgatgaattccatcaaagtggctcatccccaaagcgcttaatagattcttctggatctgcctcagtcctgacacacagcagctcgggaaatagtctaaaacgcccagataccacagaatcacttaattcttccttgtccaatggaacaagtgatgctgacctgtttgattcacatgatgacagagatgatgatgcggaggcaggngtctgtggaggagcacaagagcgttatcatgcatctcttgtcgcaggttagacttggaatggatcttactaaggtagttcttccaacgtttattcttgaaagaagatctcttttagaaatgtatgcagacttttttgcacatccggacctgtttgtgagcattagtgaccagaaggatcccaaggatcgaatggttcaggttgtgaaatggtacctctcagcctttcatgcgggaaggaaaggatcagttgccaaaaagccatacaatcccattttgggcgagatttttcagtgtcattggacattaccaaatgatactgaagagaacacagaactagtttcagaaggaccagttccctgggtttccaaaaacagtgtaacatttgtggctgagcaggtttcccatcatccacccatttcagccttttatgctgagtgttttaacaagaagatacaattcaatgctcatatctgggaccaaatcaaaattcctggggatgtcaattgggggtgcacaacatagggcagggctgtgtctcatgtctagactatgatgaacattacattctcacattccccaatggctatggaaggtctatcctcacagtgccctgggtggaattaggaggagaatgcaatattaattgttcc

SEQ ID NO: 356032 - DNA, 663 bp, Homo Sapiens
ggggggggacgggctgaacctcagtcaggaccgcctgcaccgcagtccggggatcgggtcgaggggagaagaaaaaggggtgctcgggagcagcccccggctacctcccctggaggcacagagggcgggggccttggcgaatggctttcttgctggccacttgcggagtgagtagaccccgagggtctgggagaggggccggcccctacccctgagtccccggggtcccggccgccaggccggagcgcgaatgtcgtgctcaccctgcctccttcccgccgccccctgggggtttggattcaggatttgttcctagtgtccaagatttggataagaaacttacagaagctgatgcttacctacaaatcttgatggaacaattaaagctttttgatgacaagcttcaaaactgcaaagaagatgaacagagaaagaaaattgaaacgtctcaaagagacaacaaatagatgggattctgcgtatgttgcctgggctgggtctcctagcctcaagcgatcctccttcctttggcctaccagagcggtgggattacagagcatggtagaatcaattaaacactgcagtgtgttgctgcaagattggcaaaagaccagagtaatgcggagaagcacgcagatggaatgataagtactattaatcccg

SEQ ID NO: 356033 - DNA, 1579 bp, Homo Sapiens
ggggaaatgcgggctggaggggaaagtaggagggtatggtcatccacatgttgcaagagaaaaggagcagataggggaaagtcaattatgtattcatctcatgcccggtaaatcggcacttcacataaggtaaggtgaacataaagtagctgcctgtggggatatttaacgttttatctgtaggtgtctgcttagcaacaaaaggaaaggcagtttcttgcatgactcagctttcagcttaattttttccttttgacagagcaaattgggatcctgaatttttatttttctttgacaacagaaatcaacacagatctcttttagttacctaattcttgatggacatcaggatgttgaccacttttagtaatatttaatatatatcttatttgttccatttatcccccgagtattgtagccacatttaaagtgaaaatttcctgtgtcaaattaacttttccaatattttttgtccattttttccatgtctgcttgaattgaattcgctccaggtttccattaactttggaccatgcttcaagtatcctccgaaggatctcacttaccgccctatgagtgacatgggctggggcgccgtggtagagcacaccctggctgacgtcttgtatcacgtggagacagaagtggatgggaggcgcagtcccccatgggaaccctgaccaggtccctcttttctgtcaaggactttctgggaataatactgggggttttgtttttgtttttgaactgtctcaaatgttctcccaaagatgctaaaaacacagcctctccttttagcaagttaaaaggctgggtaggactgcgggagactgcctgcctttcaccattttctccccacttccagtgactgctcttattttgtgtaccataagccaacaaccgctgactccaggattgcataagccccctgtgaaatcggtgctgtactgcataccctgccagctgtgacttgttatcctactatattttctaaggagtgaataatattgtccgagtaactaacttatttaaaagacatttccttctgtgggcattgactgtatcccacctgttttccaaggaaatggtaacctgtttctgagaacacctgaaatcaatggctatacattccaaaccaatctaaacgctatttccttttggtgtgggtttggttttgttcattttgaaatacacttttgaacactgagatccgtaaaactactagatctctggaagtgtaattgtgaaagaaacttgcttgcagctttaacaaaatgagaaacttcccaaataaaacttgttttgaagtttatgtgacactttgcttcccttcagattgggtgcctcttggtgacagtgttcagaaatgtaagcagcacgaggaagggagctggcactgggaggaagagccgggtttctgagttgtgttttggctgctttcctattgctcccattcttgccaatcagccaccccctttcctgtgaaaatctgccaccttgaggagaggaacaagagtttaaaagggctaatgatctccctcccggtcttcccttggaacatggatgttgatataaaaaa

SEQ ID NO: 356034 - DNA, 1228 bp, Homo Sapiens
  misc_feature (113)..(113): n is a, c, g, or t
  misc_feature (892)..(892): n is a, c, g, or t
  misc_feature (1143)..(1143): n is a, c, g, or t
  misc_feature (1172)..(1172): n is a, c, g, or t
  misc_feature (1187)..(1187): n is a, c, g, or t
  misc_feature (1214)..(1214): n is a, c, g, or t
ctcgacggcggcaacccagcctccctcctaacgccctccgcctttgggaccaaccaggggagctcaagttagtagcagccaaggagaggcgctgccttgccaagactaaaaanggaggggagaagagaggaaaaaagcaagaatcccccacccctctcccgggcggagggggcgggaagagcgcgtcctggccaagccgagtagtgtcttccactcgtgtgcgtctctctaggagccgcgcgcgaaggatgctggtccgcaggggcgcagcgcgcagggcccaggatgccgcggggctggaccgcgctttgctatgctgagatttgctgccttctgggttcatgagatcttgacaacaacggatactgctaccccagagttacctacccagggaacattttcaaatgtttctacaaatgtatcctaccaagaaactacaacacctagtacccttggaagtaccagcctgcaccctgtgtctcaacatggcaatgaggccacaaacaaacatcacagaaacgacagtcaaattcacatctacctctgtgataacctcagtttatggaaacacaaactcttctgtccagtcacagacctctgtaatcagcacagtgttcaccaccccagaccaacgtttcaactccagagacaaccttgaagcctagcctgtcacctggaaatgtttcagacctttcaaccactagcactagccttgcaacatctcccactaaaccctatacatcatcttctcctatcctaagtgacatcaaggcagaaatcaaatgttcaggcatcagagaagtgaaattgactcagggcatctgcctggagcaaaataagacctccagctgtgcggagtttaagaaggacaggggagagggcctggccgagntgctgtgtggggaggagcaggctgatgctgatgctggggcccaggtatgctccctgctccttgcccagtctgaggtgaggcctcagtgtctactgctggtcttggccaacagaacagaaatttccagcaaactccaacttatggaaaaagcaccaatcttgacctggaaaaagctgggggatccttaggattttcacttgaggcaaggatgtttgccaagccaccaggagctttttccccaaaagaccctngatttgcattgggtcacctcggggagccntgttggctgtctttngggcatcatgggttttttcctggatgnatcggccgcagttg

SEQ ID NO: 356035 - DNA, 1047 bp, Homo Sapiens
  misc_feature (710)..(819): n is a, c, g, or t
acagcattttacagacacaaggtgttattatttcctttacaattttcaatagcaaaaaaacataataagcatttagtaaatgttgactatcagctgttaaatactgtttactctccaaataagtgagctgtaatacttgtgtaatgctttctcacaggtatgaattaggagccgctctgtttattggatgggcaggagcctcactgtgcataattggtggtgtcatattttgcttttcaatatctgacaacaacaaaacacccaggtatgaaaaagagacaaaaatgacctgttaaaaagtagaatgctatcataaatcattacatgtggaacaaattacagatagttcatatgattcttagaaacttccaaaatccggaattggaaaaggttagcagtacagttaattttttaaagttttaccattactatattccaaagaaaattctaacgtagaaataagggtctgaatatgaggacatgttcttcacgttggcctcatcataattttcctctaggtaggcaggaatgttgatggcctctactaagtctcctagcttccaggagggtgaggttttaaaacatggttttgtaagaggataactgaacaaatgaccaagtcatgagtttcttctgcagagattctccatcccactcagaaatgacactgaaaatacttcttggggcaagaggagagaagaaagctatcnnnnnnnnnnnnnnnnnnnnnnnnnnnnnnnnnnnnnnnnnnnnnnnnnnnnnnnnnnnnnnnnnnnnnnnnnnnnnnnnnnnnnnnnnnnnnnnnnnnnnnnnnnnnnnacagtaatgtcgaaactaggcctttgaaccaaggcagtctagggtaaaatatagtttcaaagtatgaataagaattggtatttgtgttatctttgagtaagaaactgtccgatatgaatcacaacgtgggtgaatgtagtattttcctgaagtgtgaaagacttaaaaaaaagaatcacattgttcagaggtgctcaatggaaagaaaaggaaatgaacaagtttgtt

SEQ ID NO: 356036 - DNA, 1088 bp, Homo Sapiens
  misc_feature (57)..(93): n is a, c, g, or t
gggaactgtatacgactcactatagggcgacctggagttaaccgcggtggcggccgnnnnnnnnnnnnnnnnnnnnnnnnnnnnnnnnnnnnnatcaggccaaatcggccgagctcgaattcgtcgagagcgggagccggagagcgagcgcggctgcagccggcggcatggctagcacggcttcggagatcatcgccttcatggtctccatctcaggctgggtactggtgtcctccacgctgcccaccgactactggaaggtgtctaccatcgacggcacggtcatcacaaccgccacctattgggccaacctgtggaaggcgtgcgttaccgactccacgggcgtctccaactgcaaggacttcccctccatgctggcgctggacggttatatacaggcatgtagaggacttatgatcgctgctgtcagcctgggcttctttggttccatatttgcgctctttggaatgaagtgtaccaaagtcggaggctccgataaagccaaagctaaaattgcttgtttggctgggattgtattcatactgtcagggctgtgctcaatgactggatgttccctatatgcaaacaaaatcacaacggaattctttgatcctctctttgttgagcaaaagtatgaattaggagccgctctgtttattggatgggcaggagcctcactgtgcataattggtggtgtcatattttgcttttcaatatctgacaacaacaaaacacccagatacacatacaacggggccacatctgtcatgtcttctcggacaaagtatcatggtggagaagattttaaaacaacaaacccttcaaaacagtttgataaaaatgcttatgtctaaaagagctcgctggcaagctgcctcttgagtttgttataaaagcgaactgttcacaaaatgatcccatcaaggccctcccataattaacactcaaaactatttttaaaatatgcatttgaagcatctgttgattgtatggatgtaagtgttcttacatagttagttatatactaatcattttctgttgtggctttctataaaaaataaacagtttatttacaaaaaacaaaacaa

SEQ ID NO: 356037 - DNA, 990 bp, Homo Sapiens
  misc_feature (15)..(15): n is a, c, g, or t
  misc_feature (32)..(32): n is a, c, g, or t
  misc_feature (36)..(36): n is a, c, g, or t
  misc_feature (50)..(50): n is a, c, g, or t
  misc_feature (71)..(71): n is a, c, g, or t
  misc_feature (84)..(84): n is a, c, g, or t
  misc_feature (110)..(110): n is a, c, g, or t
  misc_feature (114)..(114): n is a, c, g, or t
  misc_feature (121)..(122): n is a, c, g, or t
  misc_feature (125)..(125): n is a, c, g, or t
  misc_feature (139)..(139): n is a, c, g, or t
  misc_feature (149)..(150): n is a, c, g, or t
  misc_feature (177)..(177): n is a, c, g, or t
  misc_feature (180)..(180): n is a, c, g, or t
  misc_feature (182)..(182): n is a, c, g, or t
  misc_feature (192)..(192): n is a, c, g, or t
  misc_feature (218)..(218): n is a, c, g, or t
  misc_feature (227)..(227): n is a, c, g, or t
  misc_feature (251)..(251): n is a, c, g, or t
  misc_feature (286)..(286): n is a, c, g, or t
  misc_feature (291)..(291): n is a, c, g, or t
  misc_feature (319)..(319): n is a, c, g, or t
  misc_feature (338)..(339): n is a, c, g, or t
  misc_feature (343)..(343): n is a, c, g, or t
  misc_feature (346)..(346): n is a, c, g, or t
  misc_feature (355)..(355): n is a, c, g, or t
agcactgtactaacntctctatatacattgancacnacgcaacatctganacatacactacatatgctacnctcctaaaaaagncatcttcctatttaactctcaaaaancatnttttatnntantctgaagaatctanatttacgctnnctccacacacgaaactcaattctatanaanangcacataatnataatacccattcctttagcgtgaanaaaatcatnacacacaacatgtactgagattgnccatcgcaatcataactctcttcctaaaaacaaancaatngcacaccaacgagccagccctcacgctnacatgtgacactctaagtnnaacntcngaaggatancctgacattaaaaagtagcctatcatcagattccagagctgaacagctgtgtttttctgtcagattttgattgttttggccatgcttgggaaaacctgcaggagtattgtatttttggcattgtagagcatttgagtagttggttcctttaaaaaggctttgaatactgtcctaaaaactcatccctaccactcacaagaaccaaagttttacctggctaatagtactaaaaaggaaaggtctgagacctctacagtagctaaaactcagattcaagtaggaagtgatggcagagtaagtgaaagagctgaataaaatagagtaagttgaacttgtaaacctttagacactgaattaaaactgagggatcaaaagtaactccatgttgaagttcccctggaagacaagaatgtacactgctctgtgaaataaacctgtaaaaaagcagacatcctgttagctgcaggttgataaacaaacgggagaagtacttaacagcaaagacagcttccatacctgttcagcaagctacactacatccacagcaaaagcatgatgaaatcaaggccttgtgctgtgtcactcaaacaaccactccagaaccctgatgcctttcttggggttactgttaatgc

SEQ ID NO: 356038 - DNA, 1073 bp, Homo Sapiens
tccggaattcccgggatcgacgccggactccggagcgcccgcttacgcagttcctcccggggtcggaggccgattcgccgtgtggcgggttcgagtcccgcctcctgactctggcctctagtccctgagtcccgggcgggctgcattcgtcggggaaacctctcctcgaccaggggcacctctactcgaccaggggcgacggcgtactttgggcttcatcatggaggactacctgcagggttgtcgagctgctctgcaggagtcccgacctctacatgttgtgctgggaaatgaagcctgtgatttggactccacagtgtctgctcttgccctggctttttacctagcaaagacaactgaggctgaggaagtctttgtgccagttttaaatataaaacgttctgaactacctctgcgaggtgacattgtcttctttcttcagaaggttcatattccagagagtatcttgatttttcgggatgagattgacctccatgcattataccaggctggccaactcaccctcatccttgtcgaccatcatatcttatccaaaagtgacacagccctagaggaggcagtagcagaggtgctagaccatcgacccatcgagccgaaacactgccctccctgccatgtttcagttgagctggtggggtcctgtgctaccctggtgaccgagagaatcctgcagggggcaccagagatcttggacaggcaaactgcagcccttctgcatggaaccatcatcctggactgtgtcaacatggaccttaaaattggaaaggcaaccccaaaggacagcaaatatgtggagaaactagaggcccttttcccagacctacccaagagaaatgatatatttgattccctacaaaaggcaaagttggatgtatcaggactgacccacggatcaaaggctgaaaaaggcccgaaagatattcatagaacagggctccagggggccctttaggccataatttttggattcgcaaaccctgggaagtcctgtgaaggttccattctccacccccgaaagcctgcccctggccttaggtagccctcctaacccc

SEQ ID NO: 356039 - DNA, 1029 bp, Homo Sapiens
  misc_feature (9)..(9): n is a, c, g, or t
  misc_feature (14)..(15): n is a, c, g, or t
  misc_feature (36)..(36): n is a, c, g, or t
  misc_feature (41)..(41): n is a, c, g, or t
  misc_feature (43)..(43): n is a, c, g, or t
  misc_feature (47)..(49): n is a, c, g, or t
  misc_feature (53)..(53): n is a, c, g, or t
  misc_feature (56)..(56): n is a, c, g, or t
  misc_feature (59)..(59): n is a, c, g, or t
  misc_feature (61)..(62): n is a, c, g, or t
  misc_feature (66)..(67): n is a, c, g, or t
  misc_feature (72)..(72): n is a, c, g, or t
  misc_feature (74)..(74): n is a, c, g, or t
  misc_feature (79)..(79): n is a, c, g, or t
  misc_feature (83)..(83): n is a, c, g, or t
  misc_feature (88)..(89): n is a, c, g, or t
  misc_feature (91)..(91): n is a, c, g, or t
  misc_feature (105)..(105): n is a, c, g, or t
  misc_feature (110)..(111): n is a, c, g, or t
  misc_feature (115)..(116): n is a, c, g, or t
  misc_feature (120)..(120): n is a, c, g, or t
  misc_feature (124)..(125): n is a, c, g, or t
  misc_feature (129)..(129): n is a, c, g, or t
  misc_feature (131)..(131): n is a, c, g, or t
  misc_feature (147)..(147): n is a, c, g, or t
  misc_feature (156)..(156): n is a, c, g, or t
  misc_feature (161)..(161): n is a, c, g, or t
  misc_feature (163)..(163): n is a, c, g, or t
  misc_feature (168)..(168): n is a, c, g, or t
  misc_feature (171)..(171): n is a, c, g, or t
  misc_feature (192)..(192): n is a, c, g, or t
  misc_feature (200)..(200): n is a, c, g, or t
  misc_feature (217)..(217): n is a, c, g, or t
  misc_feature (223)..(223): n is a, c, g, or t
  misc_feature (227)..(227): n is a, c, g, or t
  misc_feature (229)..(230): n is a, c, g, or t
  misc_feature (232)..(251): n is a, c, g, or t
  misc_feature (586)..(586): n is a, c, g, or t
tttttaagntttcnnggatttcttattttctaaaanatccnanctcnnnacanttnaananntttnngtacngnacatnttanacaanncnaaatgggtagaaantattnncccnntgangcgnncctngnatttattgatccctanccccaatcnttttncnccccnttncttttgtttttaagcttctgnttcccagntctgtttcccagagttnataatnacgnanntnnnnnnnnnnnnnnnnnnnngattcttgtacctaacattttatcctcttagatctaagagccgaagctatagaactttgttagactatttggcaagcaaaatatatgacagtaaatatcagaattttatggtttgaccagcgcttatcacattcccaattcagtgagaaaaattcatctgggacacaacagggtactcttcccctgtttgcccagaatcagctctggattttaagcccagacttcagtggacccagatagaaaatataaagtccccgatctataggccacatcaggatgttattttatgaagaggttctagagcaaggttgcggaaatcggggtggagatggggngcagtgactccccccaaatattcatggctaacaggccattctatgcagtttgttttaacaaatcctgggttaaactgaggccacaggacatgatgggctgttctataaagcattctaagtggagaggagacgatagggcatatgaaattcactaaactctctggaaaaaaaatatgtatatattaaaaaccaagactggaatcagtgcaacagtgggaactaccttttacaagtatccattgcttcataaactccatttgtttggaccaatcccttaaacaaaagcaaggcaaattttacatggatttagagcctaggacaggttattaggattataaattttccactggtatgtcattgtgattaactttgtttttgtctttctgaaagattggattttctataacaccttgtgtaagaaaataaaaaacttgatctaactg

SEQ ID NO: 356040 - DNA, 904 bp, Homo Sapiens
  misc_feature (835)..(835): n is a, c, g, or t
agcgctggtcaacctaaattctgaattactgtatatattttgcttgccaaatagtctaacaaagttctatagcttcggctcttagatctaagaggataaaatgttaggtacaagaatccattattttcatctactaaaaactacgtaattataaactctggaaaacagagcctggaaagcagaagctttaaaatcaatagaattgtgtcttataaagattttggtttaagtgattctattaatttccaagtttcgcttctataggtataataattttctaacccatttagacattgtataagaatgtacatgtactcatatgtacttagaatatgatcaagagagtaggaatatctttagaaaaattaagaaaattccactgaaactcttaagaataactcttagattgtaaactaatcaaatatctctgaaataaaagtttattaaatttaaattaagtggaagttatacatcaaatattgttttctgaaatcaaaatctggtgtacagtatgtaatacagaatattggatgttaattccttttttaaaacaactacaagaaaaatattaggaatgatgaattatgctgattggtttgacttggatccaagcaaagtatccattatatctccctggccagtttccaaaacagtaggcatatttctcagttcatacacagaaacctgtccatcactgtctcctaccagaaggcaatctgtttgtttggcaaagagaatggttgtgaacttgattccagggttagcagtattcacaatcagaggggccaaagtgctgatatgaagggcccaatctccaccctgttctcatttgcangctgcaatatataggatgatttttggagaccaggcaccgtcgttaacaacagaagtaggctggataaaa

SEQ ID NO: 356041 - DNA, 986 bp, Homo Sapiens
  misc_feature (9)..(9): n is a, c, g, or t
  misc_feature (15)..(15): n is a, c, g, or t
  misc_feature (17)..(17): n is a, c, g, or t
  misc_feature (40)..(40): n is a, c, g, or t
  misc_feature (122)..(122): n is a, c, g, or t
  misc_feature (145)..(145): n is a, c, g, or t
  misc_feature (162)..(162): n is a, c, g, or t
tcacaccanctctgngntctcctttaaaaaaacctgaccngcttgatatggaggaaaaggctggctcaggggaagctgatagccactcagatgcacgacagaaatctgagggaccaggaggngcggtaacgcgctgagttctagnagtcacagatgggctgncacagtgtaagagtgagtggacccggtaaggaggcaggtcatgccttgggcttcttagcacctccagggctctccaccagcccagctggtgtgcgtttcttggagtcatagtcatcacttcggccctgatccaaccgtccatgagggccccgggcaggaaatctgttcaggtggctcaggtgaagtgtgtgggatgtttggaagagactcagaggcttctgaggaaagagtgggggaatccggtgaggctggaagatcaactgaggctgagctcccaggatcccttgcttctggcccagggctgctacatgcagaagaggaggtgctggggacttcagtaggggctggttggagagcgtttgcaccttgacagcattccagggcactgcctggcctgggttgtatgcagccttcaccagcaccttctcacccagctggggcagacggcccttcaccacacttagctgaaaaaagacctcttcatccacaaccccaaagtagtcatgcaagctggtaacaataccagtgaagacccgctgtttctccccaccctgaaggtgcctggcattctgggacagttctgtggccacaggaggagtgagcaaaccaggaggagggcccagaagagatgttgaagctgtgcctgagaagttgcgtccccctggaagcgggttgatccgctggcgcttaaactgggacattgggaacgctgtcctctttcagagtcgtggggaaaaggctgcgggccagggcagcgacaccggggggacaaagacacccggaaccaccacagccgctgctgccgccgccaccggaagcgcctc

SEQ ID NO: 356042 - DNA, 1493 bp, Homo Sapiens
cgcgaccaacgccacggcggtgcgctgctgcaagctgccgctgcacgccttcctggacaacgtgggctggttcgtccgcaagctctccgggctgctcatcctgctggtgctcttcgccatcggctatttcctgcagcgcatcatctgccccagtccacgcaggtacccgcgcggccaggcgcgcccgggacagcggcccgggcctccggggggcgccggaccgctggggggcgcggggccgcccgacgacgacgacgactcgccctctctgctgcgcgacgaggcggcagccggctctcaggactcactgctggacagtggcggcggcggccggggccggggaggcggcgggcgctcggacccctcctgcgcctcagagcacgagatgcgtgtagtgtcgccggtcttcctgcagctgcccagctacgaggaggtcaagtatctgcccacctacgaggagtccatgcggctgcagcagctcagccccggggaggtcgtgctgccagttgtcggtgcttggccgccctcgaggcggggtcgccgcggagcccgacggcggcgagggccgctaccctcttatctgagcgctcggggatcggcggctggtgcagggctgggggctgcgggtggcaagcaacggccggggtgccgccgccaactgcctcagaccttatctggcaccctggcctaactgcccggcaccccgcgactgggttggggtcactcgtctccctcgcgttctcccgggatcttatgtttctctgcgtttcattccgttcaaagaaacgtggggcacgcgcggcgggtgcggctgcagcaggcgaccctccagcgcaccttcgaaggacgtccctgccctctgccttgcctcgtattgtggttcactagtaagtgcctgcttccctagtcaaagagaacacgtgagccctttggtgcgtcgagagaagggcggtcttctttagggctgaggagaaaggaccgcagttccactcctttccctacctgccgcctggacaggtctcccagggtgggcagagggcgaggagccgttgaggaccagccgcgaccagggactgctgcacgtgggtgtgggagagcgccacttggttatgatgaaatcgctgccatgcggcagaccccccaaaatccctcagtgtcttcctgatctagcaaataggcacagctggtgttttcacaattaggtggagttgccgcgagtggcctaggggggacacctgtgatacaagattagctgctgtacctactcaggggacagcgaccatgtatatccattcggctggacctttgattgttcataactgaagagtgtttatctttatttgccctttattgtaaatttgtaccatgcattggacgccaccggaggtgttcccccaatcgcgcccagggattcggtgtatactttgtgttgccctttatgttccggaaatggccctaccccgcccttttggttgataacacacgaatttttt

SEQ ID NO: 356043 - DNA, 2232 bp, Homo Sapiens
  misc_feature (64)..(64): n is a, c, g, or t
  misc_feature (709)..(709): n is a, c, g, or t
  misc_feature (1429)..(1429): n is a, c, g, or t
cccgggatccccagaccagcgccaggccctcgggcgccgcggctgccgggttgcttcgccggancctcggggcgagaagtgcaccccgcgtctccccgcccccgtgaaaacccagatgtattcgttgttcgaaatcgctcgtttgtccgggaaggggacgaagggagggaggaggaatagcgcggttggcatttggccggaagaggcacaaaaacccagtcgcgaccccacaggcctgcggttgttccccaggcccagggccacaggcccgctgtggccgtctgcaagtcgaggtgtccagtctagtatgcggcctgggtcaaccgcgtccccgccggctcccgcgccagggcgaggcgcagggctcgcgccctcgggccagatcctatcggcgccctcccgcgtcgcgcgccggcctgctgtggggagggggcccgggccgcgcgtccgctgggaggaccggcgtggtaggcctcggcagccatccttccagcaaaataccctgattccttttactgattaattttccgacccctcctcagcctccaaaatgatgctgagtccggaccaagcagcagattcggaccatcccagctcggcgcactcggatccggagtccctgggcggcacggacaccaaggtgctcggcagcgtgtcggacctggagccggtggaggaggccgagggcgacggcaagggcggcagcgangccgcgctctacccgcacccgcagcagctgagccgcgaggagaagcgccgccgccgggcgcccacggccaagtaccgctcggcccacgccacccgcgagcgcatccgcgtggaagccttcaacttggccttcgccgagctccgcaaattgctgcccacgctgcccccggacaagaagctctccaagatcgagatcctgcgcctggccatctgctacatctcctatctcaaccacgtcctggacgtgtagggcggggtgcgccgcggggggccgcctgtcccggcgtccgcgaaacgctacggatccggacgggcgccgtcgctcgggtggcggaggctgcggtggcccagcgagacggccgcctcgagagacggccggggaagaagctcgctacctgttctctctggtcagcagggcgacgagggaaggtttccgacgcaggcaggtggggttgtctggcgagcccgggggctcgcaggggggattttccaggccaggagaacctcgtggagacacccgagatgagccacttctggggctccccaagggttgtggttttaacccactggagactttgagttctcctacattcatccgccacaaatcttaatgtgttgaaagaatgagggcagaagttcagagtatgcaggctcataactttaagctatctggaatttttctaatggacaaatcaccaaacactgggaaggaggagagagngagggatctctcccatagagatggaaggcacagaaaggtgcgactggaaactttcctttctgttgtgaaaataaagattatattagaatccaaataaaccctgaatatttagtaagtttaaaaagacaaattgagaacaagtagacacactgtgggaggatctgagcttggtggtattttatccccaagatatgacaccaagggagacaggaaaatccataattaaatgcgaaaccttatatctgattacttttgcaagcgaagggcccctttaatattcaaaaacatctatttgggaccttaaacatgtggacccataggtgcagttagaaaaagacaacctatttttatttatgttagaaggagtagaggtatttttttcaagacatttatttttcagagtggtgatacttttactttggatactctgtgccaatttatttatagtcaagtgtttacactttttcctgtggaataattatgtctaactttttacgtgtttgttgagattatactgtggtctttctttctgctctaattatattgcacttgtataacaaatttcccacttctccctgtttctaaacatattttatatattaagatgtttgttcttgaaaggttcttttgttgtgagatcagcaacactagcacttcactattatagttttttaaaaagtgtattattcttatctgtagttatgtctgagaagtcctttacaagctgtttataaggagagtagcttctttgtgtgtgtgatgtttgtgcgtgtgatgaatttagcaaattaagttattttcct

SEQ ID NO: 356044 - DNA, 1336 bp, Homo Sapiens
  misc_feature (1073)..(1136): n is a, c, g, or t
gtgactaccaggacctttatgcgtgtacaacctgtatcttgtcccctaagtgacttatctgagaatgtagagtcagtggttaatgaagaaaaaataacagagagttccctagtagaaattactgaacataaagattttacactaaaaacagaggagcttatagagagccccaagttagaatcttctgagggtgaaattatacagacagtggacagacaatctgttaagagcccagaggttcaattgcttgggcatgttgaaactgaagatgtagaaataattgcaacatgtgatacttttgggagtgaagatttcaataatattcaagactctgaaaataacttactaaaaaataatcttctgaacaccaaattggaaaaatctttagaagaaaagaatgaatcgctgaccgaacatcctagatctacagagttgcctaaaacacacattgaacagattcagaagcattttagtgaggacaacaatgaaatgatacctatggagtgtgattcattttgcagtgaccaaaatgaatctgaagttgaaccatctgtaaatgctgatcttaaacaatatgaatgaaaattctgtgacacactgttctgaaaataatatgccgtcttctgatcttgcggatgaaaaggttgaaactgtttctcaaccatctgaaagcccaaaagataccatagataaaaccaaaaagcctcgtactcgaagatctagatttcattctccatctacaacttggtcacccaacaaagacactccacaagaaaagaagcggccccagtctccatctcccagaagagaaactgggaaagaaagcaggaagtctcaatcaccatctcctaagaatgagtcagccagaggccggaaaaaatcccgttctcagtccccaaaaaaggatattgcaagagaaaggaggcaatctcagtctcggtctccaaaaagggatactactagggaaagcagaagatctgaatcactgtccccaagaagagaaacttctagagagaacaaaagatctcagccaagagtgaaagattcttcccccaggagaaaaatccaggtcnnnnnnnnnnnnnnnnnnnnnnnnnnnnnnnnnnnnnnnnnnnnnnnnnnnnnnnnnnnnnnnnaagtggtctaggtccagatctcattctaggtccccctcaagatgtagaacaaaaagtaagagttcatcatttggtagaattgacagagatagttactctccccggtggaagggaagatgggcaaatgatggttggagatgtccacgaggaaatgatcggtacagaaagaatgacccagagaaacagaatgaaaatacaag

SEQ ID NO: 356045 - DNA, 1333 bp, Homo Sapiens
  misc_feature (460)..(510): n is a, c, g, or t
ggtgccgtcttctgatcttgcggatgaaaaggttgaaactgtttctcaaccatctgaaagcccaaaagataccatagataaaaccaaaaagcctcgtactcgaagatctagatttcattctccatctacaacttggtcacccaacaaagacactccacaagaaaagaagcggccccagtctccatctcccagaagagaaactgggaaagaaagcaggaagtctcaatcaccatctcctaagaatgagtcagccagaggccggaaaaaatcccgttctcagtccccaaaaaaggatattgcaagagaaaggaggcaatctcagtctcggtctccaaaaagggatactactagggaaagcagaagatctgaatcactgtccccaagaagagaaacttctagagagaacaaaagatctcagccaagagtgaaagattcttccccaggagaaaaatccaggtcnnnnnnnnnnnnnnnnnnnnnnnnnnnnnnnnnnnnnnnnnnnnnnnnnnnaaggagaaccagaaagtggtctaggtccagatctcattctaggtccccctcaagatgtagaacaaaaagtaagagttcatcatttggtagaattgacagagatagttactctccccggtggaagggaagatgggcaaatgatggttggagatgtccacgaggaaatgatcggtacagaaagaatgacccagagaaacagaatgaaaatacaagaaaagaaaaaaatgacatccatctagatgctgatgatccaaattctgctgacaaacatagaaatgactgtccccattggataacagaaaaaataaactctgggcctgatcccaagaaccagaaaatccagaaaaagtgaaagagtctcatttgggaagaaaatagaaatgaaaattcaggaaattcttggaataaaaactttggttctggttgggtatttaaccgtggtagaggcagaggtaaccgtgttagaggcacttacagaagtagttttgcctataaagatcagaatgaaaatcggtggcaaaatcgaaaacccctctcagggaattcaaacagttcagggagtgaatctttcaagtttgtggaacagcaatcctataagcgaaaaagtgaacaggagttctcatttgatacaccagcagatagatctggatggacatctgcatccagctgggccgtgagaaagactttgccagcagatgtacaaaactactactcacgacgaggcagaaattcttcaggtccacagtctggatggatgaaacaggaggaggaaacatctggacaggattctagcctaaaagaccaaacaaaccagcaagttgat

SEQ ID NO: 356046 - DNA, 1493 bp, Homo Sapiens
  misc_feature (12)..(12): n is a, c, g, or t
  misc_feature (914)..(914): n is a, c, g, or t
  misc_feature (939)..(939): n is a, c, g, or t
  misc_feature (952)..(952): n is a, c, g, or t
  misc_feature (1031)..(1031): n is a, c, g, or t
  misc_feature (1049)..(1049): n is a, c, g, or t
  misc_feature (1290)..(1290): n is a, c, g, or t
  misc_feature (1292)..(1292): n is a, c, g, or t
  misc_feature (1343)..(1343): n is a, c, g, or t
  misc_feature (1363)..(1363): n is a, c, g, or t
  misc_feature (1377)..(1377): n is a, c, g, or t
  misc_feature (1386)..(1386): n is a, c, g, or t
  misc_feature (1425)..(1425): n is a, c, g, or t
  misc_feature (1450)..(1450): n is a, c, g, or t
  misc_feature (1487)..(1487): n is a, c, g, or t
ggatatggctgngagggggatggggatgttgaatttggaaattggaggggacgctggtggacggtcagttttggggagtgctgggggtagagatggatgtcaatagggctgaaagtggggatccgggggagcccagagtaggagtccgaggaggctcagagcttggagtcctaaaaggctcggagtcggggatctgaatggttcagggagggaagaagatttgggagtcagcctcagagctaaagatctcagggtgctggagtgaaggggcgctcaggaggggaaatccgaggggcgtccaaatggggggatccgaggaggctgagggtggacatgtctgaggaggctcagattggggtcacaggagtgcacagaatgggattcggtggggggcgggggtcgctgagtgttgatagccgggctcacagttgcaggtctgaagcggggtctcaaggtgtttaaaggggctctggagtgcagccctgggggctatgtgtagagcttttgagaaaggctccctgtgtgtggggccagagaatgttctctgtgggaggattgagaaggcatatgtgtagttggatgggcccttagtggacagagtaatgggggattattcttggggctcattgtgtccgggcatggaacgtaggggctctctgtgtggcttgtaagatgctgaagactcagattttagagaccaagtgcgtttcagaagagggctgaggattgggtgcaaggagttggtgttgatggaggagcaggacgccagagtcccagccctggaaccgttcagagtggagcaggtttttaatgccccaaagccaaagtggacccagctctctgggagaaagtaacagaactgggggtgggcttcctcatccccgagggatggttcctgagcggctgcccccatngctccagcgctacgtggacaaagtntcaaacctcagcntctttggaggcctcccagctaaccatgtcctcgtgaaccagtatctgcctggggagggcatcatgcaccatcagcctgngctcccacaccgtgctgnacttctacgagccgcggcggccagaggacgatgaccctacagaacagcctcggcctccgccccggcccaccacctcgctactgctggaaccgcgcagcctgctggtgctccgcggccccgcctacacgcgtcttctccacggcatcgccgccgcccgcgtagacgcgctggacgccgcctcctcgccgcccaatgcggcagcctgcccgtcggcgcggccgggcagcctgcctggtgcgcngnacccgggtctcgctgaccatccgccgcgtgccccgcgtctgcgcgccggcntcctgctgggcaagtgaccnccagggccgggacncctcggatngccaggttcctccccctttggggctgctgtgaccccgcnacctaggaaccgtggcaaaggggcncccctagggttattatttcccaataattttgttgagnacaaaa

SEQ ID NO: 356047 - DNA, 1084 bp, Homo Sapiens
  misc_feature (49)..(85): n is a, c, g, or t
  misc_feature (290)..(327): n is a, c, g, or t
gggaaatatacaccactataggcgactggagctcacgcggtggcggcgnnnnnnnnnnnnnnnnnnnnnnnnnnnnnnnnnnnnnatcaggccaaatcggccgagctcgaattcgtcgagagcggaggggatgttgaatttggaaattggaggggacgctggtggacggattgggtgcaaggagttggtgttgatggaggagcaggacgccagagtcccagccctggaaccgttcagagtggagcaggcaccacctgtaatctactatgtccctgacttcatctccaaannnnnnnnnnnnnnnnnnnnnnnnnnnnnnnnnnnnnncccaaagccaaagtggacccagctctctgggagaaagttacagaactggggtgggcttcctcatccccgagggatggttcctgagcggctgcccccatggctccagcgctacgtggacaaagtgtcaaacctcagcctctttggaggcctcccagctaaccatgtcctcgtgaaccagtatctgcctggggagggcatcatgccccacgaggacggaccactgtactacccgactgtcagcaccatcagcctgggctcccacaccgtgctggacttctacgagccgcggcggccagaggacgatgaccctacagaacagcctcggcctccgccccggcccaccacctcgctactgctggaaccgcgcagcctgctggtgctccgcggccccgcctacacgcgtcttctccacggcatcgccgccgcccgcgtagacgcgctggacgccgcctcctcgccgcccaatgcggcagcctgcccgtcggcgcggccgggagcctgcctggtgcgcggcacccgggtctcgctgaccatccgccgcgtgccccgcgtgctgcgcgccggcctcctgctgggcaagtgaccgccagggccgggacccctcggattcccaggttcctgcccctttggggctgctgtgactccgcgacctaggaaccgtgggcaaagggggctcccctgggttatttattttcccaataattttgtgtgagctacagaagaccccataccaaataaacaaaaaaatctttcaaac

SEQ ID NO: 356048 - DNA, 2748 bp, Homo Sapiens
  misc_feature (51)..(51): n is a, c, g, or t
ccctgtgctcagggaggccttcagtcagcagggtcgcctcagcagcatttngtagcctgccctgcagctccctgcctccaccctgcacgctgtgcccacacccccccacaacacgtaggtgaaagcacaggcaccatgcggaggccccgagcaccccttagtggggcggggtggggggaggaagtcagtccataatgttgtagttacggatcttggggggcctctggcagcctttagcttttgcaggatgagaccgggaggctcctgtggtcttggcctttgcctgggctgctgtcttcatccctggggtggcaatgcctgcctgcatcttgacgggcctcctgtcggctgctggaggagctgggagctctggagttgagtcaccctgggaggtgacaccagaagggctggatcccaggtctagcaacctccacatgtcctggagggtgccactggcaaaggaggaggagctgtgggattggcgaccatgctcctcagggtgctggggagcctggggtggctttggggacctgtcttctttctgccgaggtgatttacaggtcaccgtgtggatgctgtgttgtgtcttcgggccttgcagggcgtcaagtctgctgcccacctgtgctgagcggggctggtgctttcccaagtgtctggaaggagcctcatcctcggcactcttggcgtcctgagatgtaaaatggggctgcacctgtcccaaaggtgggctgcgatccaaaggcctcctgggctcctcgcctggcttccgggcctcaggggcaggagggagggcgtggtgcaaagccacctttcgggtcggcccagctctgcacggagcctgttccccatctcgatgagctgctctttctccaggcggaggctgatgatttttctggctgcctccttcagctttctctggagtcggtgcatagataaggtctggggggcacgtgccactgaccggaggtgcaggaaaagctccccctggtcctcggcctccataggccctctcttggtgaggccctgtaacaaaactcacaggcagacacccctgtgaggctgccctcatgggaggacgccaggggtgcccacccaaggagcctcttcacctgctcttccagggtgggcactgctggctgtcactgggtgacgtccttccaaaagaaagacaaaaagagttgctgctcccagtgcttcagtgggtccttctcttccacaaatagaataaaggcccacagatctcccaggccagggtggcccccagatctcccaggccctcacagccctcgcgctccttccccgccatccctgccttctggtcatctatgcctttgtgtctttcaagtgaacacaaggagaatctgaggacacccaaccagcacagcagctccccagggagagcagagagaaggctgtggcctccagcagtgcccaggacccaggaaggcggcccagggagagcagagagaaggctgtggcctctagcagtgcccaggacccaggaggacagctcccgccagcgtggcttggccctcctccactccttggggtccctcctttctctacctgccagctggacaccccacaaccaccctgcaggccggctgtggcttccctcctgaagcaggcgcagggggagcacaaaggcagtggagagggaggaggccgacacaggggcaggagctggctgggctcccccttagcaccccaagcctgggtcaaccctagatctgagcccctgggaagcactgtgttgtcctcactcagacaaacctggacttgcagcccacatcattccagtgctacagagtgcaatcccaacacaaagggatgcctggaccaaaaatgggggcacaggaaaaagcagtagtgtccaggccctggcaagacgggagccgacgacctacttctcccgtgccactcctggcccctgtaagggagccaggctgcacctggccctggccacatgagctccgagttcctggaacaggccagcacaccctgtccccgccagcttcctggtgtgcctttccagggctggcaggtgctgctgccttccaggtgctgctgttctttggatggcctggggtgcagccactgtatgcagtgcctccgggcatgtgctgcaggttcatgtgggacgctcgggggccgcgggggatgacacatcgaaggggagagatgtctgctttccttttggacagagaaagttctatggtgccgcaggccccagctgaggacaggtgcagggcagcccccatgaaggctcgccacaggcctgagcccgagtccagactcgcttcctccagtaagcgggcctcatgcctgctctgtgagcacccttggcaagtgtggtgcagaggctcactcaccaccctgggagaatagacaggaatgggcccttgggtgtgggagaggccaaggcagagggagaggaagggaggcctgtgctggtaaaacagattgcagatggcctggggctgggggagaggggccaggcaggtgagactcgcaagtccggttctaaaaccctggatcctctacaggaacacactgggttattttgttattttaactgaggaaagaacaatcccgaaaacagattttgcaaacctcaaaacacttagagatttaagagaaaattccgtcttcaaaagcagtcccctatccctgcaaagttacaccgggccctgcggctggtgccaggcttgaggggaactgaggggccttcttgctgttgatccc

SEQ ID NO: 356049 - DNA, 524 bp, Homo Sapiens; identical to SEQ ID NO: 77827

SEQ ID NO: 356050 - DNA, 1966 bp, Homo Sapiens
  misc_feature (51)..(87): n is a, c, g, or t
gatgtatacgactactatagggcgaactggagctctacgcggtggcggcgnnnnnnnnnnnnnnnnnnnnnnnnnnnnnnnnnnnnnatcaggccaaatcggccgagctcgaattcgtcgagagcgggctggctccgccggtcgccggctcccagacgcaagcggagggcggaggggaggggcaggcggcgcccgggagggaggcaccgggccgcgggccaagcctaccgggggtcacaatttgggtctgcagcagaaatgctttcagaacagacagcagcgctggggacaagatgggaatcaatgaatgtacagctggatggagcagagccccaggtggaaaggggaagccaggaagagcggccatggagaacagtaccaggacctctggagcacctgtgctgtgaccttgaagaggagccacagtcccttcaggagaaggctcagtctgctccctgggttcctgcaattccccaggaggggaacactggagactgggagatggcagctgcacttcttgcggctggatcacagggcctggtaaccatcaaggatgtgtcactgtgcttctctcaggaggagtggcggagcctggacccctctcagacagacttttatggagaatatgtcatgcaggaaaactgtgggatagtagtctctctgagatttccaattcccaaactggacatgctttctcaactagaaggaggagaagaacaatgggtccctgacccccaggacttagaggagagggacattctgagggtcacatatacaggagatggaagtgaacatgagggggatacccctgaactagaagcagaacctcccagaatgtttatccagcgtgtctgaaagatactggttctctggaacccggagcatgatgagagctgggattccatgcccagcagctccagaggaatgctcctggggcccccttgtcttcaggaagatagtttctcaaacctgctgtgtagcacagagatggattccctgttaagaccccacacatgcccccagtgtgggaaacagtttgtatggggttcccaccttgccaggcatcaacaaacacacactggggagagaccctacagctgcctcaagtgtgagaagacctttgggcgaagacatcacctcatcaggcaccagaaaacccacctacatgacaagaccagcaggtgctctgagtgtggtaagaatttccgatgcaactcccatctggccagccaccagagagtgcatgcagaaggcaaatcctgcaaaggccaagaggttggagagagccctggcacaaggaaacggcagcgtgccccaccagtgccaaagtgtcacgtgtgcactaaatgtggaaaaagctttgaccgaaggacaccaccttgtaaaacactggctgacccacactggggaaaagccctaacagtgccctcgctgtgagaagagctttggccgaaaacatcacctggacaggcacctgctcacccaccagggacaaagtccccggaacagctgggacagaggaacatctgtcttttgaaatctgtttccactacagctatggtcaagtctatcagccggtgctaccaggagtcactgccagggctaccgttctcctgaaccccagtggccagaatcataagccctgaccccacccctagaaagatgaggccccagcaatggccagagcatttctcaccagctctgtgagatagcacataaaaatagagctccttgggcaaaacctttgggaagcaatgcatcctacatgggctgatattcagcctgagctgttctcaagaggagagtggtactggcagtttatggctgaaatccatgctgattggtgggaggctatgctataccagttgttaaacattgtgagtatcacgcttgcatactgtcactattatattttctctatatatagacagaaaggccattttagaatattaaaggcctcgtaaaa

SEQ ID NO: 356051 - DNA, 1540 bp, Homo Sapiens
  misc_feature (10)..(10): n is a, c, g, or t
  misc_feature (18)..(19): n is a, c, g, or t
  misc_feature (26)..(26): n is a, c, g, or t
  misc_feature (36)..(36): n is a, c, g, or t
  misc_feature (42)..(42): n is a, c, g, or t
  misc_feature (54)..(54): n is a, c, g, or t
  misc_feature (59)..(59): n is a, c, g, or t
  misc_feature (63)..(63): n is a, c, g, or t
  misc_feature (88)..(88): n is a, c, g, or t
  misc_feature (103)..(103): n is a, c, g, or t
  misc_feature (109)..(109): n is a, c, g, or t
  misc_feature (1275)..(1337): n is a, c, g, or t
tacgctgganaccttgtnnttgtacntcagaactcntctttnctcttctctctntaganactntcaagagcccgagtgaggaagcagncaaccatggtcttgnagaaanaaaatagggtttccatccgttccacagtgtctcagagcatggaggctgaaagtctgtgagggcaagagtgaaatggagcagaggataggctgtggtttggaagcggctctggaatacgctgggggtggcggtggggctgaaggttggttatgggatgcttcctgggctccggaacatctgtgccaaaaactggaggacccatcctcggctccagccagacgcttggggtgctatgtattctgaaccatagcactaggttggaaaatttggctcctaatctatactctgccatgtacagatcacaaaatatcatacaaggagccttaaaaggtcatctaacctaaatccagtttcccaaggagaacactggggcacaaagaagtgagaggtaactcgcccaaagttatatagctagtcagggacttcctcttcggagacaaaggaaatcagaatagtgattcttctgattcaccgtccctcgacaaacagtccacaaagtgcttggaggttattaaaaggcaccccagaaaagtaaggctggcattttcctggaagcccctgagtgtacaacccctgaggctcagtatttggctataaaaacaggtctggagttgctttggcctccgttttaatccctaaagctgcctggaggctggagctctgatagctacctgtcatcactccccagccagtccgcggacaccgcagccaggaactgtcagaggtgacaagggaatcccgtcataatgccaaggaccaaggagcagtggccaggttcctgggattaagcaaggcaattatggctgagttaaagctaggatgggtaggacagggggatctgaggtggaaaaggccggtaagaagagggaatgcgccagccaatgtaaatgccttcgactgggtgggctacttcacatcatacctcctccatctccaaaaggttcttaaccttcttcaaccgcctaggcctgatggacctcctccctttctcccagagcccactcactgaagggaaggccaccatcatccccattcttttcctttttttataatccctccggtgccgtttcgggtctccttcctcctatattctgagttccttccactcacatccaaccagcttttaacacccggatctcccggagcttctttggttccgctcactnnnnnnnnnnnnnnnnnnnnnnnnnnnnnnnnnnnnnnnnnnnnnnnnnnnnnnnnnnnnnnnggcttgactcccttggaccgctcccgccaatcctggtctctcctactcctccccgccacatcgggtcgccccgcccccgggtgcctttggtgttttccgccgtcggccgcaggcgcctcgtctcagataaagtggatccagccctgcggctccggagctccgccactgcccgggtgctcgggcccacgtagagcatagtcacg

SEQ ID NO: 356052 - DNA, 1098 bp, Homo Sapiens
agcgggagcgcccgggcagtggcggagctccggagccgcagggctggatccactttatctgagacgaggcgcctgcggccgacggcggaaaacaccaaaggaacctggccactgctccttggtccttggcattatgacgggattcccttgtcacctctgacagttcctggctgcggtgtccgcggactggctggggagtgatgacagaatacatagcaccccaagcgtctggctggagccgaggatgggtcctccagtttttggcacagatgttccggagcccaggaagcatcccataaccaaccttcagccccaccgccacccccagcgtattccagagccgcttccaaaccacagcctatcctctgctccatttcactcttgccctcacagactttcagcctccatgctctgagacaactgtggaagggatggaaaccctattttcttttctccaagaccatggttggtctgcttccctcactcgggctccttgacagtcttctagaagagagaaggaggaaaagaagcagttcctgatgttacaaatgaacaaggatctcccagccttagtctttgagaaaagatggctgaaagagaggaactctccaagtcattccgcaaacaaatgcccatttaaacatcatccttgtcttgtgaagaaaacaggaagaatgtcatgtaccatgtggatcaccttcagttcaaagttgcagcaaagtgaagaaagaaactactggaagccacccagcaatgcactgtttagtcatcaattaggagcccatgggaggataatagggagactgggtggaggctcagtgtgtaataatctcttgtctaatgtatgtgtgtcactgccatgttgtatgaacaatagtgagggctcacatttacttaacacttgtgtgcgcaaatctgggtttttcttcctttccagaactatgactcgatcataaaatctgttttgtttgcatgcatgcccaaaacaaccctggaagtagaacattgtcattatctctgttttagagatgaggaaacaggctcagagaagctcagaaatttgttcaagatcgcacagctagtaaatggcagaagtag

SEQ ID NO: 356053 - DNA, 1215 bp, Homo Sapiens
  misc_feature (160)..(160): n is a, c, g, or t
  misc_feature (208)..(208): n is a, c, g, or t
  misc_feature (225)..(275): n is a, c, g, or t
  misc_feature (550)..(612): n is a, c, g, or t
cctccaggaggcgcgcgccgccctggagccggccagcgagcccggcttcgccgcccgcttgctgacgcagcgcatctgcctggaacgcgccgaggcgggcccgctgggcgtggccgggagcgcgcgcgtggtggacctggcctacgagaagcgcgtgagntgcgctggagcgccgacggctggcggagcaacgcgaggcgccagcgcnctacgccggtccggccnnnnnnnnnnnnnnnnnnnnnnnnnnnnnnnnnnnnnnnnnnnnnnnnnnnattgggggcgccctgctcttcgccttgcgctaccgtgtgacaggtcacgagttctgggacaacaacggcggccgtgactatgctctacgtgggcccgagcacccgggcagtggcggagctccggagccgcaggctggatccactttatctgagacgaggcgcctgcggccgacggcggaaaacaccaaaggcacccgggggcggggcgacccgatgtggcggggaggagtaggagagaccaggattggcgggagcggtccaagggagtcaagccnnnnnnnnnnnnnnnnnnnnnnnnnnnnnnnnnnnnnnnnnnnnnnnnnnnnnnnnnnnnnnnagtgagcggaaccaaagaagctccgggagatccgggtgttaaaagctgcgttggatgtgagtggaaggaactcagaatataggaggaaggagacccgaaacggcaccggaggaattataaaaaaaggaaaagaatggggatgatggtggccttcccttcagtgagtgggctctgggagaaagggaggaggtccatcaggcctaggcggttgaagaaggttaagaaccttttggagatggaggaggtatgatgtgaagtagcccacccagtcgaaggcatttacattgctgggtattctctgtgtcctcagctttggcacttttgttgatgttgctaaggagcagtgaccttgctaaaaagactgaataatccacccactgaatagctaacctggggaggaaatgaaaatttcctttgtggatctccccaaatccattgttgtcaccaggccctcccagaacctcctcagttccttcacagtgcaaccctgtgtacttggcccgcaacccaatagtattgtgcctcacttcaccttccgatggcaactgccctcccttctggacataaaacctcatattttaaataaagttgaaatatgaaaag

SEQ ID NO: 356054 - DNA, 176 bp, Homo Sapiens
gaatagagtatgaggcttgttggcttgttaccatgcccatcctgtccacagccttagtctttgagaaaagatggctgaaagagaggaactctccaagtcattccgcaaacaaatgcccatttaaacatcatccttgtcgtgtgaagataccacgaagaatgtcatgtaccagtgtg

SEQ ID NO: 356055 - DNA, 452 bp, Homo Sapiens
  misc_feature (104)..(104): n is a, c, g, or t
gaaaggaaagaggtctctacacaagcccgtgattcttcatggcaagggataacatcagaaaatgtttcatttccggctattagtttcccatccctttccccaanccaggcataaagagaaacaaaagacaatgatggtattctctgtgtccctcagctttggcacttttgttgatgttgctaaggagcagtgaccttgcttaaaaagactgaataatccacccactgaatagctaaccctggggaggaaatgaaaatttcctttgtggatctccccaaatccattgttgtcacccaggccctcccagaacctcctcagttccttcacagtgcaaccctgtgtacttggcccgcaacccaatagtattgtgcctcacttcaccttccgatggcaactgccctcccttctggacataaaacctcatattttaaataaagttgaaatatgaaaag

SEQ ID NO: 356056 - DNA, 1047 bp, Homo Sapiens
  misc_feature (920)..(920): n is a, c, g, or t
  misc_feature (989)..(989): n is a, c, g, or t
  misc_feature (1011)..(1011): n is a, c, g, or t
  misc_feature (1014)..(1014): n is a, c, g, or t
  misc_feature (1020)..(1020): n is a, c, g, or t
  misc_feature (1022)..(1022): n is a, c, g, or t
  misc_feature (1032)..(1032): n is a, c, g, or t
gccgctgtctcgtgagtccctctcgtgccgggcgggagttgttaagcggccagggtcaggtgtgctggagcggggtccgggcccgggttccagggcgaggcggcggagcgtggcaggcaagcctagagcggcgtggtccatgcgccggcgccgggggcagagcggagccgcagactcccctggccccggcgcggccccggcagccgcgggctaaggagtcgcgaggttcccccagctgccaccatgaaccccgagaaggatttcgcgccgctcacgcctaacatcgtgcgcgccctcaatgacaagctgtacgaaaagcggaaggtggcagcgctggagatcgagaagctggtccgggagttcgtggcccagaacaataccgtgcaaatcaagcatgtgatccagaccctgtcccaggagtttgccctgtctcagcacccccacagccggaaagggggcctcatcggcctggccgcctgctccatcgcactgggcaaggactcagggctctacctgaaggagctgatcgagccagtgctgacctgcttcaatgatgcagacagcaggctgcgctactatgcctgcgaggccctctacaacatcgtcaaggtggcccggggcgctgtgctgccccacttcaacgtgctctttgacgggctgagcaagctggcagccgacccagaccccaatgtgaaaagcggatctgagctcctagaccgccttttaaaggacattgtgactgagagcaacaagtttgacctggtgagcttcatcccccttgttgcgagagaggattttactccaacaaccagtatgcccgggcagttcatccatctcctgggatcctggttctggagtcggtgccagacattaacctgctggattacctgccggagatcctggatggactcttccagatnctggggtgacaatggcaaagagattcgcaaaatgtgtgaggttgttcttggagattcttaaaagaaatnaagagaaccctccagtgtgaantgntgagangncacatcctgngatcactgcagaaaa

SEQ ID NO: 356057 - DNA, 2057 bp, Homo Sapiens
  misc_feature (42)..(42): n is a, c, g, or t
  misc_feature (89)..(89): n is a, c, g, or t
  misc_feature (147)..(147): n is a, c, g, or t
  misc_feature (428)..(428): n is a, c, g, or t
cgctagtgccgggcgggagttgttaagcggccagggtcaggngtgctggagcggggtccgggcccgggttccagggcgaggcggcggangtggcaggcaagcctagagcggcgtggtccatgcgccggcgccgggggcagagcggancgcagactcccctggccccggcgcggccccggcagccgcgggctaaggagtcgcgaggttcccccagctgccaccatgaaccccgagaaggatttcgcgccgctcacgcctaacatcgtgcgcgccctcaatgacaagctgtacgaaaagcggaaggtggcagcgctggagatcgagaagactcagggctctacctgaaggagctgatcgagccagtgctgacctgcttcaatgatgcagacagcaggctgcgctactatgcctgcgaggccctctacaanatcgtcaaggtggcccggggcgctgtgctgccccacttcaacgtgctctttgacgggctgagcaagctggcagccgacccagaccccaatgtgaaaagcggatctgagctcctagaccgccttttaaaggacattgtgactgagagcaacaagtttgacctggtgagcttcatccccttgttgcgagagaggatttactccaacaaccagtatgcccggcagttcatcatctcctggatcctggttctggagtcggtgccagacattaacctgctggattacctgccggagatcctggatggactcttccagatcctgggtgacaatggcaaagagattcgcaaaatgtgtgaggttgttcttggagaattcttaaaagaaattaagaagaacccctccagtgtgaagtttgctgagatggccaacatcctggtgatccactgccagacaacagatgacctcatccagctgacagccatgtgctggatgcgggagttcatccagctggcgggccgcgtcatgctgccttactcctccgggatcctgactgctgtcttgccctgcttggcctacgatgaccgcaagaaaagcatcaaagaagtggccaacgtgtgcaaccagagcctgatgaagctggtcacccccgaggacgacgagctggatgagctgagacctgggcagaggcaggcagagcccacccctgacgatgccctgccaaagcaggagggcacagccagtggaggtccagatggttcctgtgactccagcttcagtagcggcatcagtgtcttcactgcagccagcactgaaagagccccagtgacccttcacctcgacgggatcgtgcaggtcctaaactgccacctcagtgacacggccattgggatgatgaccaggattgcagttctcaagtggctctaccacctctacatcaaaactcctcggaagatgttccggcacacggacagcctctttcccatcctactgcagacgttatcggatgaatcggatgaggtgatcctgaaggacctggaggtgctggcagaaatcgcttcctcccccgcaggccagacggatgacccaggccccctcgatggccctgacctccaggccagccactcagagctccaggtgccaacccctggcagagccggcctactgaacacctctggtaccaaaggcttagaatgttctccttcaactcccaccatgaattcttacttttataagttcatgatcaaccttctcaagagattcagcagcgaacggaagctcctggaggtcagaggccctttcatcatcaggcagctgtgcctcctgctgaatgcggagaacatcttccactcaatggcagacatcctgctgcgggagggagaacctcagttcgcctcgaccatgggtccacgccctcaacacccatctgctgacctccacagagctctttccgctaaggaaaccagctgaaaggacctgtaagaaccttggaagagccccgaacctgtttctggctgccctgtacccgctccctgggtggccccaaccccaggttcacccacgggggttccccctctgcctttcctcacccccagaaaataaccgggaaccccccttagaaacccccatttcccc

SEQ ID NO: 356058 - DNA, 1636 bp, Homo Sapiens
  misc_feature (1530)..(1552): n is a, c, g, or t
ccgggccaaacataggctaaggtgcgaggccgggtggcgaattcggcacgaggcaccatctacatcaaaactcctcggaagatgttccggcacacggacagccctctttcccatcctactgcagacgttatctggatgaatcggatgaggtgatcctgaacgacctggaggtgctgttgcgagcataatcgcttcctcccccgcaggccagatctggatcgacccaggccccctcgatggccctgacctccaggccagccactcagagctccaggtgcccacccctggctagagccggtcctactgatacacctctggtaccaaaggcttagaatgttctccttcaactcccaccatgaattcttacttttataagttcatgatcaaccttctcaagagattcagcagcgaacggaagctcctggaggtcagaggccctttcatcatcaggcagctgtgcctcctgctgaatgcggagaacatcttccactcacatggcatgacatcctgctgcgcggaggaggcacctcatagttcgcctcgatccatggtccactgccctcagacatccatcctgctgacctccacgagagctcttccagctaaggaaccaagctgaaggacctgaagacctggagagccagaacctgttctgctgcctgtaccgctcctggtggccacaacccagtcaccacggtgtccctctgcttcctcacccagaactaccggcacgcctatgacctcatccagaagtttggggacctggaggtcaccgtggacttcctcgcagaggtggacaagctggtgcagctgattgagtgccccatcttcacatatctgcgcctgcagctgctggacgtgaagaacaacccctacctgatcaaggccctctacggcctgctcatgctcctgccgcagagcagcgccttccagctgctctcgcaccggctccagtgcgtgcccaaccctgagctgctgcagaccgaagacagtctaaaggcagcccccaagtcccagaaagctgactcccctagcatcgactacgcagagctgctgcagcactttgagaaggtccagaacaagcacctggaagtgcggcaccagcggagcgggcgtggggaccacctggaccggagggttgtcctctgacaggcctggcacggaggagggcccaccgagtggtcccatgaaacactaagggtcgtcacgccctcccgaggagctcaaggacctgcctgtcaggaccagggctgggcctgccaacccagggcagtgttggggccggaggctgctgtgtctgcccaagctcctctcagagtccagtccccaggcctccagcgctgtcagctgcaccctggcattctcacagagctggctgcccacccagtggggggctatagcctcagagaccactcatcctctggaatcaacctctttctaataccctcttggaaaaagagcttgcccctcctccagcacactagagctctggccttgtgtgtatatgtatacatacgtgaacacatgccnnnnnnnnnnnnnnnnnnnnnnnacttgtatgcacgtaggcaccagcacaaagatctgaatgatgcaccccacccccaccccaataaagaaataacagaaaaccctc

SEQ ID NO: 356059 - DNA, 476 bp, Homo Sapiens
  misc_feature (364)..(384): n is a, c, g, or t
agggcccaccgagtggtcccatgaaacactaagggtcgtcacgccctcccgaggagctcaaggacctgcctgtcaggaccagggctgggcctgccaacccagggcagtgttggggccggaggctgctgtgtctgcccaagctcctctcagagtccagtccccaggcctccagcgctgtcagctgcaccctggcattctcacagagctggctgcccacccagtggggggctatagcctcagagaccactcatcctctggaatcaacctctttctaataccctcttggaaaaagagcttgcccctcctccagcacactagagctctggccttgtgtgtatatgtatacatacgtgaacacatgccnnnnnnnnnnnnnnnnnnnnnacttgtatgcacgtaggcaccagcacaaagatctgaatgatgcaccccacccccaccccaataaagaaataacagaaaaccctcaaaaaaaa

SEQ ID NO: 356060 - DNA, 506 bp, Homo Sapiens
  misc_feature (400)..(420): n is a, c, g, or t
ccagggcgaggcggcggagcgtggcaggcaagcctagagcggcgtggtccatgcgccggcgccgggggcagagcggagccgcagactcccctggccccggcgcggccccggcagccgcgggctaaggagtcgcgaggttcccccagctgccaccatgaaccccgagaaggatttcgcgccgctcacgcctaacatcgtgcgcgccctcaatgacaagctgcaccctggcattctcacagagctggctgcccacccagtggggggctatagcctcagagaccactcatcctctggaatcaacctctttctaataccctcttggaaaaagagcttgcccctcctccagcacactagagctctggccttgtgtgtatatgtatacatacgtgaacacatgccnnnnnnnnnnnnnnnnnnnnnacttgtatgcacgtaggcaccagcacaaagatctgaatgatgcaccccacccccaccccaataaagaaataacagaaaaccctcaa

SEQ ID NO: 356061 - DNA, 1102 bp, Homo Sapiens; identical to SEQ ID NO: 98939
  misc_feature (895)..(895): n is a, c, g, or t

SEQ ID NO: 356062 - DNA, 2154 bp, Homo Sapiens
tttccttccctcttcccggccctcccgagtagcgggagggacgggccggaattctccggatcagcggcgcggcgggctgcggggcccggcggggcgcgcagaggagcgggccgcggcgctgaggcggcggagcgtggccccgccatgggcttcctgcaccagctgcagctgctgctctggaagaacgtgacgctcaaacgccggagcccgtgggtcctggccttcgagatcttcatccccctggtgctgttctttatcctgctggggctgcgacagaagaagcccaccatctccgtgaaggaagtctccttctacacagcggcgcccctgacgtctgccggcatcctgcctgtcatgcaatcgctgtgcccggacggccagcgagacgagttcggcttcctgcagtacgccaactccacggtcacgcagctgcttgagcgcctggaccgcgtggtggaggaaggcaacctgtttgacccagcgcggcccagcctgggctcagagctcgaggccctacgccagcatctggaggccctcagtgcgggcccgggcacctcggggagccacctggacagatccacagtgtcttccttctctctggactcggtggccagaaacccgcaggagctctggcgtttcctgacgcaaaacttgtcgctgcccaatagcacggcccaagcactcttggccgcccgtgtggacccgcccgaggtctaccacctgctctttggtccctcatctgccctggattcacagtctggcctccacaagggtcaggagccctggagccgcctagggggcaatcccctgttccggatggaggagctgctgctggctcctgccctcctggagcagctcacctgcacgccgggctcgggggagctgggccggatcctcactgtgcctgagagtcaaaagggagccctgcagggctaccgggaatgctgtctgcagtgggcaggctgctgcgcgtgccaggcgcttctctgggctgtctgctgagctccggaaccagctggaccgtggccaaaggtctcccagcagctgggcctggatgcccccaacggctcggactcctcgccacaggcgccacccccacggaggctgcaggcgcttctgggggacctgctggatgcccagaaggttctgcaggatgtggatgtcctgtcggccctggccctgctactgccccagggtgcctgcactggccggacccccggacccccagccagtggtgcgggtggggcggccaatggcactggggcaggggcagtcatgggccccaacgccaccgctgaggagggcgcaccctctgctgcagcactggccaccccggacacgctgcagggccagtgctcagccttcgtacagctctgggccggcctgcagcccatcttgtgtggcaacaaccgcaccattgaacccgaggcgctgcggcgggacaacatgagctccctgggcttcacgagcaaggagcagcggaacctgggcctcctcgagcacctcatgaccagcaaccccaaaatcctgtacgcgcctgcgggctctgaggtcgaccgcgtcatcctcaaggccaacgagacttttgcttttgtgggcaacgtgactcactatgcccaggtctggctcaacatctcggcggagatccgcagcttcctggagcagggcaggctgcagcaacacctgcgctggctgcagcagtatgtagcagagctgcggctgcaccccgaggcactgaacctgtcactggatgagctgccgccggccctgagacaggacaacttctcgctgcccagtggcatggccctcctgcagcagctggataccattgacaacgcggcctgcggctggatccagttcatgtccaaggtgagcgtggacatcttcaagggcttccccgacgaggagagcattgtcaactacaccctcaaccaggcctaccaggacaacgtcactgtttttgccagtgtgatcttccagacccggaagggacggctcgctcccgcctcacgtgcactacaagatccgccagaactccagcttcaccgagaaaaccaacgagatccgccgcgcctactggcggcctgggcccaatactggcggccgcttctacttcctctacggcttcgtctggatccaggacatgatggagcg

SEQ ID NO: 356063 - DNA, 937 bp, Homo Sapiens
  misc_feature (27)..(27): n is a, c, g, or t
  misc_feature (33)..(33): n is a, c, g, or t
  misc_feature (41)..(41): n is a, c, g, or t
aggggctgatctctgcgaagtcagtgncccccncggctganttgtaggggtcacctggcagggcggagctggggcccacagagcggccggtgagggccttccccgggggctggaagatggccagaggtgcccttgggagagctgcccgggtggggcgtggtggctgagctggcctcgcctgagtcacactcggtggatggtgacaatcttgaaggggcggcaaggtgcaggtgcgtgaaccgggcattcttcagctgctggaagcccccctccgtcagtgtgtaccggcgacccttgtcctgcgtcttgcggctctgctcaaacagcgccgcctcattgaaggagacccggcggcccgtggagctggatggacaggaagcgttcggtctccgcatcctggcactcggggtcctctccccggaagtcggggtcttgggctggatgggtgccgttgtccaggtaggtggtggtggtcttctccgcttcctccatggccctgttgaggcgctggtggacgtcccagcagcgcttgcagaggagcaggacgccagacaacaccaccagcgtgccccccacgaacagcgacatcaccaccaccagcagcacgtagttgtccaggatggggtctggctctgccgtggggcgtccagtggcattgtcccacgacgtcgtcagggctactgtggcatgatgctgtgtcgtgtgcggctgtggccatggtggctgtgggctgcattctgaactggggaggagggccctcagcgccgggacgagcggcccatgggcgccgggctggcggcgggcggctgcgtggcgctcgcggctggctccggcgcccggtggccgcggagcaggcggagaatttatgaatggagagcgcggcgcgggggaggccggcgcgagaggagggccgcgcacgtgaccgcgttgcggcgcg

SEQ ID NO: 356064 - DNA, 1511 bp, Homo Sapiens
  misc_feature (689)..(697): n is a, c, g, or t
gctagttgaagtgattattaatactaatacgaattgacttccttaggaagccggttcagaacaaaaagtaatcatatgtattgaagttaacattcctgaataaagggcgggtcacacgcgtagttagccctgctcacttcagccaataactgtaggttatcagaaaacatcccgcccctctctcccgattggagggaaaagcaaagggggtggagtgcggaggctactagtcaatcccgtgtgagctcccgttgcggctccgccctcaccggagacgtagacgtcattgcggagagcacaggcggcgaattctgagcgagtgtagccgggcaggctgggcagtggggtccaccgctggctctctggatggtaggcatcggcgaagggcagcttcaggagacctttgcggtcgcaaccgccgatgaccacgatcacttcagctaggtccatgaatctggcgtgcggataagcccagtgcctgtcgggccgcacccaagttcggccctctcttaccctctcgaccacactgcacggtcccgctgccctttcatgcgtttctgccatcccccccgcccacccgatcccccggcctcaatcccgctagaccctgccacttccaactttgactgtgggtactgggaagagaatcgctaatgcttaacgcattctgctgacctctaaactacagnnnnnnnnntctttacagagcccttgccctcacctagaaaaatcacctcgtttaatctgtatggcagttctattagtagggattattacccctttctcaggggaggaaactgaggctcacataccatggcgtgcccaaagctattaagcgtcagagctggaattcaagcccaggtttgtctgtcgctaactcatcttcaacacccttttctcacctccaaccgctgattctgctgcctccctcctcctatgacatcccctcatccctaattccattaagccggataactcaccctttcagtaaatcattcttccctctcactgaccccaccatctgacgccaccagaatttccatacccttttagccattggttttctaattcctttggcacatatttgaggatctctgtcccaggccctgtgcttagtgttagagagagtgtcgtctctgggggcatgattaagggctactctgcccagagcctcccagtctggctttccaaaggtggggcaggctgctttcactacttccccatgcccctgcctatttctatccctcattagactgcgagctcccagagggcaaagagtgttttcaaatcacttccgcatcccggcaccctgcacagaacttgcgtagagtagtaagtactcggaattacggttgcatgggccaaagagagtgtgcgcagctgtggggtctctgcatctccctcactggcttgttaactcttcaagggcagaattatgggcaccgagcctctaaaatgttgaacgaatgactgaatatcatcaagaggcagtactaaaagatgatgaaaga

SEQ ID NO: 356065 - DNA, 2284 bp, Homo Sapiens
  misc_feature (356)..(356): n is a, c, g, or t
  misc_feature (386)..(386): n is a, c, g, or t
  misc_feature (392)..(392): n is a, c, g, or t
  misc_feature (404)..(404): n is a, c, g, or t
  misc_feature (433)..(433): n is a, c, g, or t
cggcggcagtgtctgtggtggccgcggcggcgagagcgacggtcccatctttcccaccctcttggttgccgctggccacacgccctccgctggcggcgacttctcagctccgtgcgcccgggctggacagtgagcctcgagaggagacgcgggcggctagagccggagtggggcgagccgcggaacccggccgggagccgcgcgaggcgtgatcggagggtatggttggcatggaattgaatttcatctgtctgtgggaattgtaagcaagattgccatcacgaaagccaaagtggatttctccagtgtggtgtgcctgcccccttccgtcattgctgtgaatgggctggacggangaggggccggcgaaaatgatgatgaaccantgctcntgtccttatctncgtgcacccagtcccctagagttaagctnttgccaatgaactgcaggtagctctccttgcagcccgagctgaccctaggcctccaccctggcaggaatcccaatttgcctccacttagtgagcggaagaatgtgctacagttgaaactccagcagcgccggacccgggaagaactggtgagccaagggatcatgccgcctttgaaaagtccagccgcatttcatgagcagagaaggagcttggagcgggccaggacagaggactatctcaaacggaagattcgttcccggccggagagatcggagctggtcaggatgcacattttggaagagacctcggctgagccatccctccaggccaagcagctgaagctgaagagagccagactagccgatgacctcaatgagaagattgcacagaggcctggccccatggagctggtggagaagaacatccttcctgttgagtccagcctgaaggaagccatcattgtgggccaggtgaactatcccaaagtagcagacagctcttccttcgatgaggacagcagcgatgccttatcccccgagcagcctgccagccatgagtcccagggttctgtgccgtcacccctggaggcccgagtcagcgaaccactgctcagtgccacctctgcatcccccacccaggttgtgtctcaacttccgatgggccgggattccagagaaatgcttttcctggcagagcagcctcctctgcctcccccacctctgctgcctcccagcctcaccaatggaaccactatccccactgccaagtccacccccacactcattaagcaaagccaacccaagtctgccagtgagaagtcacagcgcagcaagaaggccaaggagctgaagccaaaggtgaagaagctcaagtaccaccagtacatccccccggaccagaagcaggacaggggggcaccccccatggactcatcctacgccaagatcctgcagcagcagcagctcttcctccagctgcagatcctcaaccagcagcagcagcagcaccacaactaccaggccatcctgcctgccccgccaaagtcagcaggcgaggccctgggaagcagcgggacccccccagtacgcagcctctccactaccaatagcagctccagctcgggcgcccctgggccctgtgggctggcacgtcagaacagcacctcactgactggcaagccgggagccctgccggccaacctggacgacatgaaggtggcagagctgaagcaggagctgaagttgcgatcactgcctgtctcgggcaccaaaactgagctgatttgagcgccttcgagcctataaagaccaaatcagccctgtgccaggagcccccaaggcccctgccgccacctctatcctgcacaaggctggcgaggtggtggtagccttcccagcggcccggctgagcacggggccagccctggtggcagcaggcctggctccagctgaggtggtggtggccacggtggccagcagtggggtggtgaagtttggcagcacgggctccacgccccccgtgtctcccaccccctcggagcgctcactgctcagcacgggcgatgaaaactccacccccggggacacctttggtgagatggtgacatcacctctgacgcagctgaccctgcaggcctcgccactgcagatcctcgtgaaggaggagggcccccgggccgggtcctgttgcctgagccctggggggcgggcggagctagaggggcgcgacaaggaccagatgctgcaggagaaagacaagcagatcgaggcgctgacgcgcatgctccggcagaagcagcagctggtggagcggctcaagctgcagctggagcaggagaagcgagcccagca

SEQ ID NO: 356066 - DNA, 1126 bp, Homo Sapiens
  misc_feature (1059)..(1059): n is a, c, g, or t
  misc_feature (1101)..(1101): n is a, c, g, or t
  misc_feature (1118)..(1118): n is a, c, g, or t
taagaataaatcaccttcacaaaactaagacaaactttttcaaagctcagcttgatttgctggaactacacagagacatgtttgatcacacaacagcaactgtacatcctcccaagtctggaatacagaattgatggaggacacttaacttgcttaaaatgtatttgattattctgcatttatgataaaaaatatcatccagggattatattcaagagggtaaatttaggattacatgtttctagaacatataatatgtaacaccatccaaaaacaacaacaacataaagcactggaaccaaagaaccacttaaaatttagaataaattaggaaatttcaatctataagtgtcaaacaacaaatgagttataatatttttctaataagaaaaatatcacctgggaactatgagatactacatccttgatctggctggccaccattttgaagaccaccacagatctcaaggcatgagactactcaccaacaaaatctatccctgctattgcacctagtgtcatctcagtatgtggctgacagcaaatgttctaacttaatctgatagatgctcctttagcatataaaagagcttgctaagtccctattacctgtagcagtctatcaactaaatatttaagaagtcatttcatagacaaggtttatgaatgacttagaagtaaaattagtaatttctaaaccactgtagtgttttctatgtttttagagatattccaaacacagagttttcaaaggagctgtaaaaccaagtacaaacatacgtaagtaattttgtcatggatatttctgtactaatttgggggagactggtgggccataaataaatgaaatacacatcctaaaaataatggtaaaaatgatcaagtaccactttcagatggttattcaagtatcaacttggtatgcaagtaagtccacccatgtctccacctatgaattcatattcaaagcgctacatcttacttaggtactgataaatttagaaactttataatcacctcttaaagaaatcagctttttcagatggtaactttcttacnacttagtgctgtactattcgatataccaacaaattttaaatntttcgtcagtccgatanctattttt

SEQ ID NO: 356067 - DNA, 964 bp, Homo Sapiens
  misc_feature (38)..(38): n is a, c, g, or t
  misc_feature (67)..(67): n is a, c, g, or t
  misc_feature (87)..(87): n is a, c, g, or t
  misc_feature (91)..(91): n is a, c, g, or t
  misc_feature (120)..(120): n is a, c, g, or t
  misc_feature (124)..(124): n is a, c, g, or t
  misc_feature (140)..(140): n is a, c, g, or t
  misc_feature (152)..(153): n is a, c, g, or t
  misc_feature (166)..(167): n is a, c, g, or t
  misc_feature (172)..(172): n is a, c, g, or t
  misc_feature (183)..(186): n is a, c, g, or t
  misc_feature (193)..(193): n is a, c, g, or t
  misc_feature (199)..(199): n is a, c, g, or t
  misc_feature (201)..(201): n is a, c, g, or t
  misc_feature (211)..(211): n is a, c, g, or t
  misc_feature (213)..(224): n is a, c, g, or t
  misc_feature (238)..(238): n is a, c, g, or t
  misc_feature (244)..(244): n is a, c, g, or t
  misc_feature (248)..(249): n is a, c, g, or t
  misc_feature (251)..(251): n is a, c, g, or t
  misc_feature (253)..(253): n is a, c, g, or t
  misc_feature (257)..(309): n is a, c, g, or t
  misc_feature (326)..(326): n is a, c, g, or t
  misc_feature (330)..(330): n is a, c, g, or t
  misc_feature (343)..(343): n is a, c, g, or t
  misc_feature (346)..(346): n is a, c, g, or t
  misc_feature (351)..(351): n is a, c, g, or t
  misc_feature (364)..(364): n is a, c, g, or t
  misc_feature (368)..(368): n is a, c, g, or t
  misc_feature (373)..(373): n is a, c, g, or t
  misc_feature (383)..(383): n is a, c, g, or t
  misc_feature (423)..(423): n is a, c, g, or t
  misc_feature (447)..(447): n is a, c, g, or t
  misc_feature (480)..(481): n is a, c, g, or t
  misc_feature (490)..(492): n is a, c, g, or t
  misc_feature (499)..(499): n is a, c, g, or t
  misc_feature (515)..(516): n is a, c, g, or t
  misc_feature (523)..(524): n is a, c, g, or t
  misc_feature (526)..(527): n is a, c, g, or t
  misc_feature (566)..(566): n is a, c, g, or t
  misc_feature (595)..(595): n is a, c, g, or t
  misc_feature (601)..(602): n is a, c, g, or t
  misc_feature (619)..(619): n is a, c, g, or t
  misc_feature (643)..(643): n is a, c, g, or t
  misc_feature (645)..(645): n is a, c, g, or t
  misc_feature (652)..(653): n is a, c, g, or t
  misc_feature (662)..(662): n is a, c, g, or t
  misc_feature (665)..(665): n is a, c, g, or t
  misc_feature (668)..(668): n is a, c, g, or t
  misc_feature (885)..(885): n is a, c, g, or t
  misc_feature (945)..(945): n is a, c, g, or t
  misc_feature (950)..(950): n is a, c, g, or t
ttgctctggcgttgattgatgggtcgagctgtacgcgnccatactgctggggggtagagccttcggnttagttgaattcctgagtanattnttgtttttgttttcaggctccctatggtntttnatgctctgttgtggcnggtggcatgcgnnactgatatgttcnntgttncagttcggttnnnntttatanactttnanttatcctgcngnnnnnnnnnnnngcacttaagttgcntccctnggcnntntntttnnnnnnnnnnnnnnnnnnnnnnnnnnnnnnnnnnnnnnnnnnnnnnnnnnnnnctacagtttcttatatnaaantgatttaaagtanctngtttnaaagaaaataatncaantgttnattccctgcncccactttgtggcttctttggtgtgccatagtgtccccangagaggggttttgggctttttgtnatgccttgtctaattgtcttctgttgctttttnnacaaaattnnntgttttntcccccccttttaaannttctgcnncnnggctggcttttctttgttctatctttcagtccctatttntttgcttcttcttcctgttggctgctttngccctnnaagttgggtctgtgttntttctttctgttctctgcttcttngnctctctnntttttcccnggnttnttatttcctcattgttagtaatctattctctgaaaaacttgggacttactgaataacattaatatcccaaactcttgtagagctagaagtttctagtgagcttaccaaaggatcagtcctttgacatctggaagccaggagcgattaccagatccctgggactaggaatatttcacttcctgtttcctttgcatagctctgtacctctatttctatnattacaatcatctctctttgtggtgtttttagagggcttaatttctgtcttaatacagtnaagcngaagtcaaagaaga

SEQ ID NO: 356068 - DNA, 1743 bp, Homo Sapiens
agcggactacggcttcttccagtcacctcggcccggatcgggaagtgtcaagcgggcgctcccccatctccgccgctattaccactgaacccggaccccctacccaggtccagggccagccgccatgacgaacgtgtactccttggatgggattctggtgtttggtttgctctttgtttgcacctgtgcctacttcaagaaagtacctcgtctcaaaacctggctgctatcagagaagaagggtgtttggggtgtgttttacaaagccgctgtgattggaaccaggctgcatgctgctgtggcaattgcttgtgttgtaatggccttttacgtcctgtttataaaatgaattccaaagcacccaagtcatcaactgccaaccaaggggacggggatgaagaacctgttggagacctgaacccagtgtaggagagttcagctgaaatcatcggtccccaggatgacaccacagcatctgcccctgctatatgtggggaaaactcatggtcacgaacattatttatgcttcaggggactacagaaagccagcttcctttgatctatgtgtaaatcagtccttggcagagtgcatataatgtccggataaattacacccctcggtgataagattacatacctccttcataaaaacctgtcatcctgttttgttcttcagctcctcatcaggatcttttcaaactgaggctcattagggaaggaactaggctgtgttcagacttcttttgaagagagagaattttcaagacttcttttcactctttgatttggatctggcaaattggggaggggatgctgggtgggaaacagttatgaaatgccaagaaattctttggctttagaaatttatctttcatgtacccatccgggaacataaaagagaggcatagtgctcattgcaaaaagagaacagatgaagtagctgtgttatgtgctggtatcttgagagttttgccaagaaaatctgggcctacataaaatttgagaattatctgtgtgatgagaccagaaagcagtggcttagacaagaaaaaatctttctgttcaccagtatcctcaaatggagacttcacttgatcagatggtatatgaaaaatgaatcaactattgctatttcgtaaaacctttttatattttctaaatttacttagtgctaaatactgttactcagttttaaatgccacgactaggggaaaaagaaactattgaagaaataattgtttagtatatttgcagttggggtagaagaaagaaatctagtatattgattcatatactagtaaattcatctagtataagaacttgtgatgttagattgaagttttgtcatcttataaaagacaacaaacttattttctgtttaagtctgagtgttatggcaatttttagttgattacttatttttcttagccaaattttaattttcttcatattgcattgctctttagttgtctctggaaattctatttactttaaggacatgagaaattcaaatgagagaagttgctgatattcatcagtgtgtttggacagttcatagggtccacaaatcaaatgaggttgtttcctgaagtagaagaaaacagaactttgcaattgatactgaggtactttgccatggagttagtaactcctgagcagaccattttagatggctcagcatttggcaggaagacttctccattccctgcttatatctatggaaggatcagctgttggatgtct

SEQ ID NO: 356069 - DNA, 401 bp, Homo Sapiens
gaaaatctgggcctacataaaatttgagaattatctgtgtgatgagaccagaaagcagtggcttagacttcactttgatcagatggtatatgaaaaatgaatcaacctattgctatttcgtaaaacctttttatattttctaaatttacttagtgctaaatactgttactcagttttaaatgccacgactaggggaaaaagaaactattgaagaaataattgtttagtatatttgcagttggggtagaagaaagaaatctagtatattgattcatatactagtaaattcatctagtataagaacttgtgatgttagattgaagttttgtcatcttataaaagacaacaaacttattttctgtttaagtctgagtgttatggcaatttttagttgattactt

SEQ ID NO: 356070 - DNA, 1665 bp, Homo Sapiens
  misc_feature (1620)..(1620): n is a, c, g, or t
  misc_feature (1632)..(1632): n is a, c, g, or t
ctggagcccagggccgctgtccggggaagggggcgccggagcagcccgggagttgaggccggcgctgcaggcagcggcggctgcgcggtgaacgaggcggcctgcgcggcagagctcgcccatggtgacccgccttttgcagcagcagaacctgccacagacaggggagcaggaactagagagcctggtgctgaagctgtcagtgctaaaggacttcctgtcaggcatccagaagaaggccctgaaggccctacaggacatgagctccacagcacccccagctccgcagccatccacacgtaaggccaagaccatccccgtgcaggcctttgaggtgaagctagatgtgaccctgggtgacctgaccaagattgggaagtcacagaagttcacgctgagcgtggatgtggagggtgggcggctggtgctgctgcggagacagcgggactcccaggaggactggaccaccttcacgcacgaccgcatccgccagctcattaagtcccagcgtgtccagaacaagctgggtgttgtgtttgagaaggagaaggaccggactcagcgcaaggacttcatctttgtcagtgcccggaagcgggaggccttctgccagctgttgcagctcatgaagaacaagcactccaagcaggacgagcccgacatgatctcagtcttcataggcacctggaacatgggaagtgtaccacctccaaacaaacgtgaccatcctggttcacatcgaagggtctggggaagaccctggaacgaggtcacagtgaccataccccatgacatctatgtctttgggacccaggagaactcagtgggcgaccgcgagtggctggacctactgcgcgggggcctcaaggagcttacggatctggattaccgcccgattgccatgcaatcactgtggaatatcaaggtggcagtgctggtcaagccagagcacgagaaccgtatcagccatgtcagtacgtccagtgtgaagactggcatcgccaacaccctggggaacaagggggctgtgggcgtctccttcatgtttaatggcacctcatttggctttgtgaattgtcacctcacctcgggaaatgagaagacggctcggaggaaccaaaactacttggacatcctgcggctgctctcgctgggcgaccggcagctcaatgcctttgacatctctctgcgtttcacacacctcttctggtttggggacctcaactaccgcctggacatggatatccaggagatcctgaactacatcagcaggaaagagtttgagcccctcctcagggtggaccagctcaacctggagcgggagaagcacaaggtcttccttcgattcagtgaggaggagatctccttcccacccacctaccgctatgagcggggttcccgggacacatatgcctggcacaagcagaagccaactggggtccggaccaatgtgccctcatggtgtgaccggattctgtggaaatcctaccctgaaactcacatcatctgcaattcttatgggtgcactgatgacatcgtcaccaccgaccattccccccgtgtttgggacattttgaggttggagttacctccccagttcatctccaagaaagggctctnaaagacttcagnccaggcctacattgagtttgagagcatgcgagg

SEQ ID NO: 356071 - DNA, 946 bp, Homo Sapiens
  misc_feature (4)..(4): n is a, c, g, or t
  misc_feature (7)..(7): n is a, c, g, or t
  misc_feature (9)..(9): n is a, c, g, or t
  misc_feature (12)..(12): n is a, c, g, or t
  misc_feature (14)..(14): n is a, c, g, or t
  misc_feature (16)..(16): n is a, c, g, or t
  misc_feature (18)..(19): n is a, c, g, or t
  misc_feature (26)..(26): n is a, c, g, or t
  misc_feature (31)..(31): n is a, c, g, or t
  misc_feature (34)..(34): n is a, c, g, or t
  misc_feature (41)..(41): n is a, c, g, or t
  misc_feature (48)..(48): n is a, c, g, or t
  misc_feature (50)..(50): n is a, c, g, or t
  misc_feature (55)..(55): n is a, c, g, or t
  misc_feature (57)..(57): n is a, c, g, or t
  misc_feature (61)..(61): n is a, c, g, or t
  misc_feature (63)..(63): n is a, c, g, or t
  misc_feature (67)..(68): n is a, c, g, or t
  misc_feature (87)..(88): n is a, c, g, or t
  misc_feature (140)..(140): n is a, c, g, or t
  misc_feature (152)..(152): n is a, c, g, or t
  misc_feature (154)..(154): n is a, c, g, or t
  misc_feature (157)..(157): n is a, c, g, or t
  misc_feature (172)..(172): n is a, c, g, or t
  misc_feature (181)..(182): n is a, c, g, or t
  misc_feature (200)..(201): n is a, c, g, or t
  misc_feature (215)..(215): n is a, c, g, or t
  misc_feature (268)..(282): n is a, c, g, or t
tttnaananagnanantnnttttttntttgntantttaaantaatttntnttttngnattntnagannatttttggatagggggagnnattaggggtttgtacaggagtgactccatgcttgtatacagagtatttatanaaattttttagnangtngatatggggtgttanggggtagtnntgtagaggatattgtgtnnaagtatttttttanaagcttgtgctttagcacatgccttctgctgcagaagtggacgccctggcacnnnnnnnnnnnnnnngtggggggccacgccttcatgggacattgccacttctgccctggaactcgtgcaggtacgtagtagctgctactgccacaacggcaacaccaagcaagagatggtccatgcttttctgacgttctcagaatagtggctagcttcaaacctgacaagcgctgcttgaagccggaacactagagaatgttgctgagagcagaaacggccacgcgggtcacgactatgcgtgggaaagtctcaagcttccctcctgccagcaacaagaaggctttggagtaggcatgatgttttcacgtgtgcgtgccgtttctccaagcactgcaggttccaccgtgtgtcagaggctgcaagtttaacatcctcctgcctgaaaacaaataggtcctttgctgaaaagagggtaaaaaaagagctttgatcttctcagccaggagaagagggtggtgttttcacgcgggcaactgctcgccggcctacatggggttaattcaagtctgctgcgagcacgactccgcccttggcactggcctccagcaagccctgttctctttggggtacaggggaacgggatggtttagactttcctgctcagtgtgtaaaaaatgtagctaaagccactatttttgctctccttaagctgttcaataaaccggttcctcatttt

SEQ ID NO: 356072 - DNA, 1487 bp, Homo Sapiens
  misc_feature (38)..(38): n is a, c, g, or t
ttcccgggatttcgagtcccgccctgcgcgcaggccanccggcgctgctcggatcctcccttttcggagatttgaatttcccccagcgaggcgagtgaggcgaaatacccgtatggtgatagctggccttttcgcgccaatactgaaaaaggcagaacgttcctccgctggcgccagcaaatcagcaggactcctgccttccttcggggcaaggtcgcagcatctgcctcggaaatcacgaaatcacggggcttctttctgctggctcagccgggaggcccagagtgttctgcagaggctgcgtattgaaggctgctctctgaagctccctgccccaggtcacgccgccggttccagatgaatccagagtgggggcaggccttcgtgcacgtggccgtggccggtggcctctgtgccgtggctgtgttcacgggcattttcgacagtgtttccgtgcaagtgggctatgagcactacgccgaggcgcccgtggccggcctccctgccttcctggccatgccgttcaactcactcgtgaacatggcctacacgctgctggggctgtcgtggctgcacaggggcggcgcgatggggctggtccccgctacctgaaggacgtgttcgcagccatggccctgctctatggccccgtgcagtggctgcgcctgtggacgcagtggcgccgtgccgcggtgctggaccagtggctcacactgcccatctttgcatggcccgtggcttggtgcctctacctagaccgcggctggcggccctggctgttcctctctcttgagtgcgtctccctggccagttatggcctcgctctgctgcatccccagggcttcgaggtcgcactgggtgctcacgtggtggccgctgtggggcaggcgctgcgcacccacaggcactatggcagcaccacctcggctacctacttagctttgggggtgctctcttgcctgggctttgtggtcctcaagctgtgtgaccatcagctcgcacggtggcgtctcttccagtgcctcacaggccacttctggtccaaggtctgtgacgtgctccagttccactttgcgtttttgtttctgacgcatttcaacactcacccaagattccatccctctggcgggaagacgcgttgaacccagggaagaacctgctgaaaaccgatgacccccagcattgaaatggactctgagatggcagcgtggtgccagtgtcagacatcctgtgtgtgatgatatgcactgatcacacaagactgccctttcctgagaagctgcgggcttcggtgtggaggggtggagtgctgtgatctcgacaacttactttcaaagacataaagcacagatctccgcacaggggatgtgtgtgttcctgatgtaatttgcataacttttctgtagtttgaaatgtttccaaataaatattggcaaggggagtggaaatgacaccaagaagcccctcatgctcatggttggacagag

SEQ ID NO: 356073 - DNA, 915 bp, Homo Sapiens
gggccccccccaaagttaagtagggtagcccaaggtggtgcctccatatttccctgggggtgtgcaggtgcttggcccccccggggcccaccacgggagccccccagtgcgaccctcgaagcccctggggatgcagcagagcgagggcccataaatgcgccaggggagacgccactcaaagagaagaggaacagccagggcccgccagccgcggtctaggtagaggcaccaggccacgggcccatgcaaagatgggcagtgtgagccactggtccagcaccgcggcacggcgccactgcgtccacaggcgcagccactgcacggggccatagagcagggccatggctgcgaacacgtccttcaggtagcggggacccagccccatcgcgccgcccctgtgcagccacgacagccccagcagcgtgtaggccatgttcacgagtgagttgaacggcatggccaggaaggcagggaggccggccacgggcgcctcggcgtagtgctcatagcccacttgcacggaaacactgtcgaaaatgcccgtgaacacagccacggcacagaggccaccggccacggccacgtgcacgaaggcctgcccccactctggattcatctggaaccggcggcgtgacctggggcagggagcttcagagagcagccttcaatacgcagcctctgcagaacactctgggcctcccggctgagccagcagaaagaagccccgtgatttcgtgatttccgaggcagatgctgcgaccttgccccgaaggaaggcaggagtcctgctgattggctggcgccagcggaggaacgttctgcctttttcagtattggcgcgaaaaggccagctatcaccatacgggtatttcgcctcactcgcctcgctgggggaaattcaaatctccgaaaagg

SEQ ID NO: 356074 - DNA, 463 bp, Homo Sapiens
  misc_feature (21)..(21): n is a, c, g, or t
  misc_feature (29)..(29): n is a, c, g, or t
  misc_feature (39)..(39): n is a, c, g, or t
  misc_feature (244)..(244): n is a, c, g, or t
gggaaggcccggcccacgggnccctcggncttaatgctnaatagccccacttgcacggaaaacactgttcgaaaaatgccccgtgaaacacaagccacggcaacaagaagccaccggccacggcccacgtgcacgaaggcctgcccccactctggattcatctggaaccggcggcgtgaccctggggcagggagcttcagagagcagccttcaatacgcagcctctgcagaacactcctggccntcccggctgagccagcagaaagaagccccgtgatttcgtgatttccgaggcagatgctgcgaccttgccccgaaggaaggcaggagtcctgcttgaattgtggcgccagcggaggaacgttctgcctttttcagtattggcgcgaaaaggccagctatcaccatacgggtatttcgcctcacttcgcctcgctgggggaaattcaaatctccgaaaagg

SEQ ID NO: 356075 - DNA, 782 bp, Homo Sapiens
  misc_feature (117)..(161): n is a, c, g, or t
ccttgtacagcgcaaaggcgccgaacttcatgtgcggatctgtgtacgcaggacgctttcgctgaacttcttgctctttgcctatacgcggttccgcgaggggactttgggggcggnnnnnnnnnnnnnnnnnnnnnnnnnnnnnnnnnnnnnnnnnnnnnttgtcgatcaccttcaggttcaggatgatgcggttccgcttgggctcccgcggcttcaccttgcggttgatgatgcgcaccgtctccgagaagggcgaaatgggcgggcgcagtccggggctgcccccctgcgggtccgggcggggcaggggacggcgggacatacggtggcagcggcggatgtccttcttgagccggtgcacggctgcgctggagtgcagcttgggcgaggaggcactggcgctcggcttgacagagaaatgcacatcactgatgcggagggcctcggcctgggcccgcgccttcaggaggaaagttttgggtttgggtcccctcttcttgggcccatacagctcacgctccctctccttttgttcgaaggctgcaatgagccgcgagtccaggatgttctcctcgggctcccaagtgctgtacttgatcgcccaccccttccatttcaccaggtactcgatgcgtccctttcggatccgccgtttgatgatggattcggccgcgaagacccgctcgcccactgcagacagctccatcttgctcagcggcacccacagcccataatactccctgcgccccggccggtgcggcaccgctcgcgcacgcgcc

SEQ ID NO: 356076 - DNA, 922 bp, Homo Sapiens
  misc_feature (120)..(120): n is a, c, g, or t
  misc_feature (178)..(178): n is a, c, g, or t
  misc_feature (880)..(881): n is a, c, g, or t
tcagggctgggcagcccttgtttgaaaactcccatgtagttgcagtcatgtgtcatcaaaaggcttgaaaggagcagggggtcaacatctagggtaggtcactcacatggctggaaaaanaatgccagcaattgtccaggggctcagtatcttcccctggggtcctgtttatggagcngcccgagtgtcctcatggtctggtggctggcttaccccggaacgagccattcaggagagcaaggtggaaactacaagcctctcaccttggaaaacatctgctgagacttctactgtaatccagtgatcaaagccagccctgattcaacgtgagagggggccgagaagtgtgtgaatgccagaagcaaggatcccaaggatacatcttggaggctggctacaaaaaaaggtgtcttaataagccctgtatccttagccacttgcagagccaccatggggtggctctcaggcaattgctggatgagtacagagtagaatagaaggatggggcttgtccacatggctctctcctgtgaagcagtgctgtggcaggatgtgctcacaaggaagagacgacccacagactactgctggccacccttgcctggagtgtggtttgtagggggtgagggagttggggcacaagctgccttctacctctaaagacaaagcaaaagccctgagaagggtctctgattgtcctgcctctggacccaacagccagttaaagaccagtgatatgccccatggtggctcccagtcacctcctctctggactgaattgatttcggcatgagggaagacaccagaacacgccctgggcatgtgcaggtgaagctgcatgcatgggatgaatcagaagttaaaggtgcagggagagggnnagagtcacatgggtgtgcatgtcacaacttatttctccaac

SEQ ID NO: 356077 - DNA, 605 bp, Homo Sapiens
  misc_feature (28)..(28): n is a, c, g, or t
  misc_feature (75)..(75): n is a, c, g, or t
  misc_feature (443)..(479): n is a, c, g, or t
gggttgctggggttgtgtactgtgcctngagggcggggttcctgtacattcctacttcaccagataacctgcccncaacaccacttcagcttctgccagacagatggaactctccagcatgaaaatctgcgcagcattccaacaagcagggctctgcctgaggttgtccgaagatgccgaggaaaaggatatcaggactggaatggctcttacagcaagatccaggtttttcattagtcaatacagtgaaggctggcatgatcatcagcttcccatccaataatatctactcatcagtgtgctgttgtcaatcagagattttcaagtatgagttctccaactcaaagaaaagtagctggatccaggaagaaaggcatttggggaagaacaacgttctttacagtgctcatgatgtgtctccagagaaagttacttcagcactnnnnnnnnnnnnnnnnnnnnnnnnnnnnnnnnnnnnntttcctctacagtatcttccagggtctaaactattagacaggttcctaagtttatccagatctctcctatgtctgaattcttggtcatcttccttgcctctggctccacaggtaaagaagaaataa

SEQ ID NO: 356078 - DNA, 1925 bp, Homo Sapiens
  misc_feature (106)..(106): n is a, c, g, or t
gccagtgaaaaaagaacctaggaatccacgaagcccctgaaccccggcccaagtgaattttccaggccccctagtttaacctatcctgtaaaaaagggccaaaaanccccgtaggccctgttatgatgatcaaataagtagccccaagtaactgtaagctgtttgtaagggttacagtgcccccctgttccagcaggagagagtgtttgcctcagggctcttttcagaggcagtcactgtgttgtcactgtcacgtacctgaagaagcaagcagactgtttacttccagattgcaggtgccaaggcattgaaaccccaggcatggtcaaaggaaaaagggggtatggcatttgggttatagtgtctctttcctagttatagggtaatttgcatgggacaatttgtttcatacagctggtaattctatcacaagggtgttcattttctgaaatgtgctaataactgtgtcgattgccttcctttccatagtcacatcatttttacttgaacaccagaccttttggtctgtgttcctcattttacagaaagctgttaaaagctaattggtaccttttaaccaaacccagcaaacacctttggtgcagggtattctcacggaataagtagagctcataatctttgtttagttatgctaattgtccccattgtgaaacttttttcccctttatgtatttctttatgttcatggcctataagtgagctcaaataccaaggaacagttgtcctgtctgtaggtatgttttcctgggacttagcttcctaaaccccaggcctttaacatgtggtccacaaagggctcatggagcagccactgcctagcatgggccacaaaacagtgcctggcctggcccatgtcagcaattcagtcccttggtcacagcactcaggcacccccatccacccgcacacgagtctgtcagagtccccctgagagggaggctcacttggtatccaaatggaggttgagttctcatcagttacacaaagattctatttatttctcttacttttcagttcaagtaggagagcatgttttggaaataaaagaactgactagcacaaacatctcctctctgatttgacaacctcttctgaagagtgaaccacatttggtacaaatccactattaaaaaattaacagccctcctggattgtaatctccccccttttaaccagctcatatatgtctcttgtcaggtctgtgaaggctttctccacattaatggcatctcgggctgacgtttcaatgtacttcatgccgtatgcagcagccagtttctcggcctcgtggcgagtcacttgcctctgtgtatccaggtcacacttgtgacccaccagaacaaatacaatttggtagggctgaacgtgtactttggtctcttctaaccactcatggacattctggaaggacctgcggttggtaatgtcaaataagagaagaccacctactgagttcctgtagtaggcgcgagtgatggatctgaacctctcttgacccgcggtatcccagatctggagcttgatgcgttttcctggctcgatctccaccaagcgggagaaaaaatccacccccacggtggggtcagaaacctgggcaaagcgaccctcggtgaagcggcggatcaggcaggacttgcccactgtggaatccccgatgacaatgagccggaactggtacagccagatggcctccatggccgcggctctgcaggtctccttggcccggaccggggacggcgggagggggcgccccgccgacgcctcagagagcgcggctcggcaggatctagctcagccgcgagcgcatcgctggcctgggagcccgaagctgggtaggcccaggcgccgggagagcggagggatggatgctgcgctcgcaaaggtgatgaaatgcagcagcatca

SEQ ID NO: 356079 - DNA, 936 bp, Homo Sapiens
aatgtcccaagcaaatacctaataatgggcacagagacactataacccaaatgccataccccctttttcctttgaccatgcctggggtttcaatgccttggcacctgcaatctggaagtaaacagtctgcttgcttcttcaggcacgtgacagtgacaacacagtgactgcctctgaaaagagccctgaggcaaacactctctcctgctgaacaggaggcactgtaacccttacaaacagcttacagttacttgggctacttatttgatcatcataacaggcctacgaggtttttgccccattttacagaatagtaaactaagagccatgaaaatcacttggccagggtcaaggactcgtgactcctagctcttttcactgcatcatactgctgtcagatgaataaatgattatgaatttgtttacttgggaagagatatgactataaataaatgttctctacatgttaggatatgttttccttattgattacaactcagctataatcctgagggaacatgggaaggaatcaaaggtaaagcccattcaggcattattgacaagagggctttaaacaagtgaataattgcacaactaaaaagacattagaactgtgtgggctataagtgttcttatcactgagacacagtggatttttattgaaaggaaccacgtacagcaatgcggagtgggatagggataaaatacccaccccaaaatgaccttggccacctgtctgccatatacgtacactgagttcctgtctacccaagagagtcagcccttaattctcaggtgaacaaacagctaactgcatcagcaaattggaatggctggcttgaagtttccattatgttcttgaagagaggtgatgctttaaattactttttggattgtagccagttcagctaggcaaaagccatacttttcacaatt

SEQ ID NO: 356080 - DNA, 1104 bp, Homo Sapiens
  misc_feature (109)..(109): n is a, c, g, or t
  misc_feature (117)..(117): n is a, c, g, or t
  misc_feature (881)..(943): n is a, c, g, or t
tgagtgagcggcccacattgtagaaggccacaccgacgtacttgaggcagaggttattgaaggtgatcatgccgatgaagaccaccgacaggggcaggacgctgcggtnttccctgnggtctaggcgcaagctggggaagtccacggcaccagggcagcaggcggccagagcgctgaggcctttgcacagcagcgtggtcaccaggcactggtagaaggtgacgaagatgggggtgtccaacccccagggaggggccgtccagcaggtacttattaaggaacaccatggagatggaggtgacccagtagagggagaccaccagcgcgatctgcaatgcccgcagcagaaagggcctctccccgtttggcctctgcctctgcagaggggtctgaggccccggtcagcgccatgtgcaggatcctggaccgctttcagaggggccctattcatggtagcagaggagctgggtcaccccgcggccagaactctgattccctggagtccagggcagtgagctcacttgtgctctccgcaaggaagccgcagccctccattgtcacatgtgggctggcctaaaggcctccccattgtcctcatggattgagaagttctgctttggggtgagcccagttgtgctgctccacaacctactcccaccccgagggggctctgagacaagacacagggcaagggagaggaataggataaggcggtgaggccaggacagagaagacctgtgaggggagaagaggctggggcctaacagggaggggtcgcagagagaagggaggggagaggaatggcagggcggggcaggagtaggtacgcggggcgaaggtgcaggaaaaggacgcgtggcagagtgggaagagctgccgannnnnnnnnnnnnnnnnnnnnnnnnnnnnnnnnnnnnnnnnnnnnnnnnnnnnnnnnnnnnnntgccggaggccgggcgcggctggagggagggctgcggaagggtcagaggggctcggggcttggggctgaaggacgcgggagggggctgggccggcgcccacgtctcgctgccttcccgggcacttcgccggctcagcccagatcccggatattccggaccg

SEQ ID NO: 356081 - DNA, 1846 bp, Homo Sapiens
gaagcacaggaagtactggccaagtggtatctaaagaagatcaattgtttcatcattacgattagcctataaggatcttgaaattcaaatgaagaaagacgaaaagatgaacattagtggcaaaaaaaatgttgactcagacagactcggcatgggatttggaaattgcagaagtgttatttcacattcagtgacttcagatatgcagaccatagagcaggaatcacccattatggcaaaaccaagaaaaaagtataatgatgacagtgacgattcatattttacttccagctcaagttactttgacgagccagtggagttaaggagcagttctttctctagctgggatgacagttcagattcctattggaaaaaagagaccagcaaagatactgaaacagttctgaaaaccacaggctattcagacagacctactgctcgccgcaagccagattatgagccagttgaaaatacagatgaggcccagaagaagtttggcaatgtcaaggccatttcatcagatatgtattttggaagacaatcccaggctgattatgagaccagggcccgcctagagaggctgtcggcaagttcctccataagctcggctgatctgttcgaggagccgaggaagcagccagcagggaactacagcctgtccagtgtgctgcccaacgcccccgacatggcgcagttcaagcagggagtgagatcggttgctggaaaactctccgtctttgctaaaggagtcgtgacttcaattcaggatcgctacggttcttaatactgaagtcatgatgtgtatttcctgggagaaattcctctttaaatgaacaagtaaccacatcttcaggcggcagtgaagtccagatagttttgcagattgttttgctactttttcatatgggtatatgtttctgatttttaatatttcttttgagaaattctgagttctgatgtaggagctttcctgtgatttctgtttcacgttccttcctgtcacaccctcctttggcgtctctgtgtatatccttgctttattttcttggaacctttgatttcaacactgagggcctggagacctcggctcctcctgctcctgaaccaggaggcttcatgtgggggaggaggagaggtctccatgtgacacatgggctcagggctgccagaatcagcggatgctggatgggcctgcagaaacaacactcaccacacacacttccttcaaaagaccaaaagtgactggtgtctcgtgtgacagattgcttcatttatgtttctacatagtaaggtgactgccaaataatatttgaagtcatctgtctctttgtaaattattttatatgacctataaatttaaaaatgtttttcagtgagtgcttttaacaaacttaagcttctgccctgccaagggaattaatgttatcttgtgaaaggtgttgctgtttgaattgatgagaaatggaagatgagaactccctaagagttctcataataaatcatctcatcacaaatcaatacggtatacagagttaaagtggaatgaggtaagaagatacagctacagaaaatagttgcgtgtatgggagaacagtcattgtaattgggtagttttgttaataaatatttttaaatcttgcttttcagaaattaccgaatgtgtataaacaaataaagaaaaataatttagctgtgttttagacagcattagaatatattgttcagcacagtaaaatatatttgaaatttgataagccaaaaatgtggttttgaatgaatattttgtgaatctttcttaaaagctcaaatttgtagacttctaaatagaataaacacttgcaggcag

SEQ ID NO: 356082 - DNA, 892 bp, Homo Sapiens
  misc_feature (388)..(418): n is a, c, g, or t
  misc_feature (881)..(881): n is a, c, g, or t
atctgtttcccttccctcccccatacctagcccgagtctgagccctaacgagaaggctgggcctaggccgctggatgctggagtgaaaggaagggagaaagggaaaaagcgggaagagtcgagaaggctgagtgttaagaggccaagtgcgacgcgcgtatccgggcagacggactgacggacgggcccgtgcttctgccgcggctgcggcgcccgcgcgagtcgcgtctaagcggcggcggcggtggcagcggcggaaaccgaagggaagccatggcggctgacagtcgggaggagaaagatggagaacttaatgttctggatgatattttaactgaagtaccagaacaagatgatgaactgtataatccagagagtgaacaagatnnnnnnnnnnnnnnnnnnnnnnnnnnnnnnngtgatcgaatggaatctactgataccaaacgacaaaagccttctgtccattcaagacaactggtttctaagccactgagctcatctgttagcaataacaaaagaatagttagtacaaaaggaaagtcagccacagagtataaaaatgaggaatatcaaagatctgaaagaaacaagcgtctagatgctgatcggaaaattcgtctatcaagtagtgcctccagagaaccttataagaatcaacctgaaaaaacctgtgtccggaaaagggatcctgaaagaggggccaaatctcctacgccagatggttctgagagaattgggcttgaagtggatagacgtgcaagcagatccagccagtcttctaaggaagaagtgaactctgaagaatatggctctgaccatgagactggcagcagtggttcttctgatgagcaagggaacaacactgagaatgaggaggnaggagtggaag

SEQ ID NO: 356083 - DNA, 1122 bp, Homo Sapiens
  misc_feature (208)..(208): n is a, c, g, or t
cggtccggaattctccggatcgcagctgcggcggcggcggtgtttgagtggaggaagatggcggctccgggcggctcggggtcccgccagctgtgaggagccccgagcacggctgtcgcggcctgaggcagagcgcctctgctctggccctgtccctggctccctcattaccgtcgccagcggagcgaacccgagagcgtggagcggngctgggccagctgttgagtggaatgtcatggccagctcctcggacagtgaagatgacagtttcatggctgtggaccaggaagaaactgtgctggaagggacaatggatcaagatgaggagccccacccagtattggaggctgaggagactagacataataggtccatgtcggagctgccagaagaggttttggagtatatcctgtcctttctctcaccgtatcaggaacacaaaactgcggcccttgtctgcaaacagtggtatcgacttatcaaaggtgtagcccatcagtgttatcatggtttcatgaaggctgtccaggaaggaaacattcagtgggagagccgtacctatccttatcctggaaccccaatcactcagcgcttctcgcacagtgcatgctattatgatgctaatcagtctatgtatgtgtttggaggctgtacccagagcagctgcaatgctgctttcaatgacctctggagacttgacctaaacagcaaagagtggatccgacctttggcttcagggtcctatccttcccccaaagctggagcaactctggtcgtgtacaaggacttgctaagtgctggtttgggggctggaccccgccaagccctttatcccctacaccagccagaagagaattctttgaatgaaatacaccctttacctcaccctctaaaaaaattggtggaaacttgcattgtgaccaccccatggggccaacctccccttgggctgggcccctccctccctgggggggaaagatggtaaaaaaggatttgccctgtggggggcctcctttagggatccccgggcaaatgggcccaatggatgtcctgggggcctctgaaccttgaaacatggggggcgggggtccccaaaccgaaactttctcttgggcccccagt

SEQ ID NO: 356084 - DNA, 1052 bp, Homo Sapiens
  misc_feature (4)..(4): n is a, c, g, or t
  misc_feature (6)..(6): n is a, c, g, or t
  misc_feature (25)..(25): n is a, c, g, or t
  misc_feature (34)..(34): n is a, c, g, or t
  misc_feature (50)..(50): n is a, c, g, or t
  misc_feature (66)..(66): n is a, c, g, or t
  misc_feature (73)..(73): n is a, c, g, or t
  misc_feature (170)..(237): n is a, c, g, or t
  misc_feature (785)..(824): n is a, c, g, or t
atgntntgggggaagagaggtatcntggcactgncccatccacttcagcnggacacttcagccagnaaatcgntaattccagcagggtgggttccttggcctgcagcccacaggtggagccccatggctctcagggcgggcaggtccggctccagggactccagaaactnnnnnnnnnnnnnnnnnnnnnnnnnnnnnnnnnnnnnnnnnnnnnnnnnnnnnnnnnnnnnnnnnnnngcggtgggcacaaaagcagtgcgcaggccggccctggccagccccgaaccagagccacagaaactctgggccaccggggaggagcagcgccacaggtgctccaggtgacagaggggcggcggctcctccacctcctggcggcaccgtcccctccggcaaactccgcgccgcttccggccgctgcatctccggctcccggcgctgcccgctcgccttctccagcgctcccctcgccgctgtcgccgccgtcgggtccccagtcccagcctagcgcacgtaggaaggcgcgtgcagccctgttactctcgcgctccgcctctgagtagctaaagcgccgcgagccgtgaatgagaaaggtgtgcgcggcgcgctgctgggccagttccgcgaggcgccaggccaggctgcagcccccctcgggaccttccgggtcggcggcagccgcggccagggcgcgagctcgaagagcccttttgcagcacagagctcgcaccgcaaaggccaagtccgccggaagccagcgcaactgcggccagaggtgtagcttnnnnnnnnnnnnnnnnnnnnnnnnnnnnnnnnnnnnnnnnaggagggcagccatggagcccgcttcctctatcggcaccgtctggttccagccgctcgcaaacatccctgatcctcccttccgaaaacctagggccgctcgttctagctgagacttctccttccagggagcgcgcgtgcgctggcacacgcccattcccacccaggcccccaccactccacacgggcggagagcagaaacccgggaggagtgacgggtgtggggcggc

SEQ ID NO: 356085 - DNA, 2137 bp, Homo Sapiens
  misc_feature (156)..(156): n is a, c, g, or t
  misc_feature (827)..(827): n is a, c, g, or t
  misc_feature (1389)..(1397): n is a, c, g, or t
gtcattgcccagggttccccttaggaaaccaggcttatgccccaggttccatcttgcctgcgggggcccgccgggccaaaacagaaggttttagaaagatttctggagggccgggggcggcccaccaagggggattgtgtggtgggtgttgtgggnattagtcaagcttttaatggaagaggtcataaaataacagtttcttatccgctgtacatttaagactgcacacttctcgaaatggagagatcagtcgttggggaattgcttttctatgacactggccagctgtgtagctcaagctctgacctgaattttatacaaactctcaaggggacatgaactcaatgtgacaagtgacagcggcggtggccagtacaggagtgcggatccccggtgtccctccccccttctgggaagggcataaaacaaaacatgatccctcttccagttccaattaaacaaaacagctataaccccatccctcccccctccccttcgagggattttgcgagaaattgagccagtgcccaacctgggtcccccccggggtgggagagggcagagggaagctagtgatgggtggggtagagaggctcccctcagcacctggccccacggggcccgccaagtggagggtgggagccctggggatcctccctgccccagtgaggtctgttatgcagcatttttgaggtcaataaattacagcaataaatagcaaggtgaggtagggggagggggtcctggtagaaagttaaagtggggtgactgaagccggggcatcctaggaagggggtcctgggcagcctcagttcccaccgctcatncccacccccaccccggcgtggaatgtcagactgaggctccagttaggtccctccccagccctcactcctggcgtctgattcacaggttcagtaacatctgccccaacggggttctgggaaataggaggaccttggtccctttagggggcatgccagggctgagagcccttgtctgctctaaggcctggcacctttggcttttgtcccccacgcctgggggtggacggatgcagcctcctgctccctgagccctgccctccggctgcccaggcctcaccccaactcaggatggccgcagagggcagggggtcagcctgcccagcggcccagcccggatcgcactcctgcacagggcctgaggtccagtgaatactgacggattttgggagtgggtgggcggcccggtgcccccgagtggtgatgaacggtaaacacacagggctgcctgaggtggggaaagttggtgagggtccggatcgttcatttcacaggctgaggtgtatggctatgctgcgagtctctgagattcttatttgcttaaaggttcatcttttctcttccnnnnnnnnngcaatcctggaggagcccttgctggggctcggtccggcgggagcatgcagtggcggagcccggcctgccacccgctcactcgccccaagtctgagaaataaatacattcatcactgcacaaacatattgatacaaaaacaacactgttaagagtgtttgcaccgtctatgttggtaaggaccagacccagtcagccccttccgctgcctggggtggggttagggggccccaggagtggggacccaccagagtcgacagagctgcgcaaaggtcccggctttttggcttgagtgggaccctcgcatcaacccatccccaagggtcacgggcagagcagcagggggacccaagcccagactcgggtcctgtggccagaactgacggccatccccgcgtaggctagctggtcaggaccagcatggtccggccagagggccttgggggctggtcagcacgggcccaagctctttggtgccagctgggcttggaggggccctgggaatggggacgagggctcaggtgactccagggaggcttccaatccctcccccagccccagggctacccttctctgcccgtgagccactccagggccaactcagaagggtttccagcagcaggggagggttccctggactggccttacagctgctgaggtctgaaactgtaaaagcttatgtaaacaatgagataaatatattagcatcttttttctgagcccatggaggttccatactcat

SEQ ID NO: 356086 - DNA, 1441 bp, Homo Sapiens
  misc_feature (8)..(8): n is a, c, g, or t
  misc_feature (142)..(150): n is a, c, g, or t
  misc_feature (335)..(336): n is a, c, g, or t
  misc_feature (420)..(420): n is a, c, g, or t
  misc_feature (505)..(505): n is a, c, g, or t
  misc_feature (609)..(609): n is a, c, g, or t
  misc_feature (611)..(611): n is a, c, g, or t
  misc_feature (780)..(906): n is a, c, g, or t
  misc_feature (1394)..(1394): n is a, c, g, or t
gcttccantcagtctccaacactcaagaattatttgtgagattcttatagaactaaaatctgtcactagctagttctcctgtcttctttcatggcacctgagagtttgaaaaataaaaggttatgaattgtatgcatgccannnnnnnnnctgtattgtatgcatgaaaccatcaaagatggaattctttctacctgtagatatccatttctcctccaagagatctcaggtcccatgacaatgtcaccacttctgctcctcctctgcaagtgtaatgaagagggtatttcagtggaagcaatgtattactttccctctcttggattatgacttgnnagaataacattcacacatttgtgaacctgttcatgccccacttcagttatcagtattattcctcattgcttccctgcacatgtnggttaatatcctcactcaccttttctattcttgcaccccttccatgcaggcaaaatgttatacagttttcaaccctcattgatcncatcccaaactccctccactttggtcacttgtagtagagtcagtgtctctcacccataagactttgagttctcattaaactgtgaagtcagagcttattacatntntatctttgcatccctagtacctagcaaaaatgtctgccagtggccaaatgctcagaaattactggtaaatgatttgaagatttccactgactatgctggtctaccctgttctgaacttcacatcaaaacctatatgttgagagttttcattatgacaaaaatatactgnnnnnnnnnnnnnnnnnnnnnnnnnnnnnnnnnnnnnnnnnnnnnnnnnnnnnnnnnnnnnnnnnnnnnnnnnnnnnnnnnnnnnnnnnnnnnnnnnnnnnnnnnnnnnnnnnnnnnnnnnnnnnnngagctactgaaatgctaaacaagacagaaaaatgtccctcgagattcttgctattgagctgacgaccaaattcaggcacttgcagagtagttgaccttctcttaagaaggagccctcctctgtgccctcactataagaaggagcctcccaacattagattttctcttgaagagccctttggactgttgttctgtctgagagctactggagaatctctttgatagctttgcttttgacggttttctctggagaaaggtctaatagaagcaaacagttaaaacccttttccatccttcacgttttttaaaaaaagtctcccttttaatatgattttctaactctgtagcttctttgtgtcattttgttcctacaagtgttcatatatacttttaggtcacatgcatttccacacacaatctgaatgtttcctacaccatagagaaggtgttagagactggatacttatacaatgttatttaggggtcggngaagagggagactctatttcttaaacagggacacatattaaaatata

SEQ ID NO: 356087 - DNA, 2167 bp, Homo Sapiens
tgcagcgagagcgcggcggatctcagcgcgggagcagtgcttctgcggcaggcccctgagggagggagctgtcagccagggaaaaccgagaacaccatcaccatgacaaccagtcaccagcctcaggacagatacaaagctgtctggcttatcttcttcatgctgggtctgggaacgctgctcccgtggaattttttcatgacggccactcagtatttcacaaaccgcctggacatgtcccagaatgtgtccttggtcactgctgaactgagcaaggacgcccaggcgtcagccgcccctgcagcacccttgcctgagcggaactctctcagtgccatcttcaacaatgtcatgaccctatgtgccatgctgcccctgctgttattcacctacctcaactccttcctgcatcagaggatcccccagtccgtacggatcctgggcagcctggtggccatcctgctggtgtttctgatcactgccatcctggtgaaggtgcagctggatgctctgcccttctttgtcatcaccatgatcaagatcgtgctcattaattcatttggtgccatcctgcagggcagcctgtttggtctggctggccttctgcctgccagctacacggcccccatcatgagtggccagggcctagcaggcttctttgcctccgtggccatgatctgcgctattgccagtggctcggagctatcagaaagtgccttcggctactttatcacagcctgtgctgttatcattttgaccatcatctgttacctgggcctgccccgcctggaattctaccgctactaccagcagctcaagcttgaaggacccggggagcaggagaccaagttggacctcattagcaaaggagaggagccaagagcaggcaaagaggaatctggagtttcagtctccaactctcagcccaccaatgaaagccactctatcaaagccatcctgaaaaatatctcagtcctggctttctctgtctgcttcatcttcactatcaccattgggatgtttccagccgtgactgttgaggtcaagtccagcatcgcaggcagcagcacctgggaacgttacttcattcctgtgtcctgtttcttgactttcaatatctttgactggttgggccggagcctcacagctgtattcatgtggcctgggaaggacagccgctggctgccaagcctggtgctggcccggctggtgtttgtgccactgctgctgctgtgcaacattaagccccgccgctacctgactgtggtcttcgagcacgatgcctggttcatcttcttcatggctgcctttgccttctccaacggctacctcgccagcctctgcatgtgcttcgggcccaagaaagtgaagccagctgaggcagagaccgcaggagccatcatggccttcttcctgtgtctgggtctggcactgggggctgttttctccttcctgttccgggcaattgtgtgacaaaggatggacagaaggactgcctgcctccctccctgtctgcctcctgccccttccttctgccaggggtgatcctgagtggtctggcggttttttcttctaactgacttctgctttccacggcgtgtgctgggcccggatctccaggccctggggagggagcctctggacggacagtggggacattgtgggtttggggctcagagtcgagggacggggtgtagcctcggcatttgcttgagtttctccactcttggctctgactgatccctgcttgtgcaggccagtggaggctcttgggcttggagaacacgtgtgtctctgtgtatatgtctgtgtgtctgcgtccgtgtctgtcagactgtctgcctgtcctggggtggctaggagctgggtctgaccgttgtatggtttgacctgatatactccattctcccctgcgcctcctcctctgtgttctctccatgtccccctcccaactccccatgcccagttcttacccatcatgcaccctgtacagttgccacgttactgccttttttaaaaatatatttgacagaaaccaggtgccttcagaggctctctgatttaaataaacctttcttgttttttttccctccaatggcaaccaaacaacacagtagcgaatgatacacagattgcttacccaaatcatagtacaacaagagggggg

SEQ ID NO: 356088 - DNA, 815 bp, Homo Sapiens
  misc_feature (34)..(34): n is a, c, g, or t
  misc_feature (100)..(161): n is a, c, g, or t
ggggggacatggagagaacacagaggaggagccnaggggagaatggagtatatcaggtcaaaccatacaacggtcagacccagctcctaccacccccagnnnnnnnnnnnnnnnnnnnnnnnnnnnnnnnnnnnnnnnnnnnnnnnnnnnnnnnnnnnnnntgttctccaagcccaagagcctccactggcctgcacaagcagggatcagtcagagccaagagtggagaaactcaagcaaatgccgaggctacaccccgtccctcgactctgagccccaaacccacaatgtccccactgtccgtccagaggctccctccccagggcctggagatccgggcccagcacacgccgtggaaagcagaagtcagttagaagaaaaaaccgccagaccactcaggatcacccctggcagaaggaaggggcaggaggcagacagggagggaggcaggcagtccttctgtccatcctttgtcacacaattgcccggaacaggaaggagaaaacagcccccagtgccagacccagacacaggaagaaggccatgatggctcctgcggtctctgcctcagctggcttcactttcttgggcccgaaacacatgcagaggctggcgaggtagccgttggagaaggcaaaggcagccatgaagaagatgaaccaggcatcgtgctcgaagaccacagtcaggtagcggcggggcttaatgttgcacagcagcagcagtggcaccaacaccagccgggccagcaccaggcttggcagccagcggacgcgtggtcgacgatatcccggaactccggaccgtacagcctg

SEQ ID NO: 356089 - DNA, 1247 bp, Homo Sapiens
gcccggcgcgggctgcgctctccagctgtggctatggccccagccccgagatgaggagggagagaactaggggcccgcaggcctgggaatttccgtcccccaccaagtccggatgctcactccaaagtctcagcaggcccctgagggagggagctgtcagccagggaaaaccgagaacaccatcaccatgacaaccagtcaccagcctcaggacagatacaaagctgtctggcttatcttcttcatgctgggtctgggaacgctgctcccgtggaattttttcatgacggccactcagtatttcacaaaccgcctggacatgtcccagaatgtgtccttggtcactgctgaactgagcaaggacgcccaggcgtcagccgcccctgcagcacccttgcctgagcggaactctctcagtgccatcttcaacaatgtcatgaccctatgtgccatgctgcccctgctgttattcacctacctcaactccttcctgcatcagaggatcccccagtccgtacggatcctgggcagcctggtggccatcctgctggtgtttctgatcactgccatcctggtgaaggtgcagctggatgctctgcccttctttgtcatcaccatgatcaagatcgtgctcattaattgtaagctgggccaggagggggcctatgggaggaggcatgcccaactacccccactcttttttcagacccagcgttagccagagagaagcccagcctccgccctggaaggaatggatgctgtgaacagctgggattcagaaggcctgaatgggcctggaccagggctgggagggggcagagagaagggcagctcagcctcaaggctcaccaagagtaaagtaggaatgacagggatctgtcttcttgggcacccccaagcaccagccctagctcccctgctcatgcccgccctgtttccccagcatttggtgccatcctgcagggcagactgtttggtctggctggccttctgcctgccagctacaacggccccatcatgagtggccagggcctagcaggcttctttgcctccgttggccatgatctgcgctaattgcccagtgggctcggagctatcagaaagtgccttcggctactttatcacagcctgtgctgttatccatttagaccatcatctgttacctgggcctgcccggctggaatctaccgatataaccagcagtcaagcttgaaagacccgggagcagaaacaattggacctcatta

SEQ ID NO: 356090 - DNA, 943 bp, Homo Sapiens
gcctggaccaggctgggagggggcagagagaagggcagctcagcctcaaggctcaccaagagtaaacatttggtgccatcctgcagggcagcctgtttggtctggctggccttctgcctgccagctacacggcccccatcatgagtggccagggcctagcaggcttctttgcctccgtggccatgatctgcgctattgccagtggctcggagctatcagaaagtgccttcggctactttatcacagcctgtgctgttatcattttgaccatcatctgttacctgggcctgccccgcctggaattctaccgctactaccagcagctcaagcttgaaggacccggggagcaggagaccaagttggacctcattagcaaaggagaggagccaagagcaggcaaagaggaatctggagtttcagtctccaactctcagcccaccaatgaaagccactctatcaaagccatcctgaaaaatatctcagtcctggctttctctgtctgcttcatcttcactatcaccattgggatgtttccagccgtgactgttgaggtcaagtccagcatcgcaggcagcagcacctgggaacgttacttcattcctgtgtcctgtttcttgactttcaatatctttgactggttgggccggagcctcacagctgtattcatgtggcctggggaaggacaggctgctgggtgccaagcctggtgctggacccggctgggtgtttgggccaactgctgcctgcttgtgccaacaattaagcccccgccgcttaccttgaatgggtgggcctaccgaggcaccgatgccctgtgttcaatcttctttcatgggctgccatttggcctttcgtccaaagggttaactcaccaagcctctggcatgtgcatcggggcccagagaagtgtaaaccagcgtgagggcgaggaaccggaagaggc

SEQ ID NO: 356091 - DNA, 994 bp, Homo Sapiens
  misc_feature (11)..(11): n is a, c, g, or t
  misc_feature (864)..(864): n is a, c, g, or t
ggctgggcagnacaacttacggctaggtagcgaggcctgggtgttgaattcggcacgagggagggagctgcagcgagagcgcgcggatctcagcgcgggagcagtgcttctgcggcaggcccctgagggagggagctgtcagccagggaaaaccgagaacaccatcaccatgacaaccagtcaccagcctcaggacagatacaaagctgtctggcttatcttcttcatgctgggtctgggaacgctgctcccgtggaattttttcatgacggccactcagtatttcacaaaccgcctggacatgtcccagaatgtgtccttggtcactgctgaactgagcaaggacgcccaggcgtcagccgcccctgcagcacccttgcctgagcggaactctctcagtgccatcttcaacaatgtcatgaccctatgtgccatgctgcccctgctgttattcacctacctcaactccttcctgcatcagaggatcccccagtccgtacggatcctgggcagcctggtggccatcctgctggtgtttctgatcactgccatcctggtgaaggtgcagctggatgctctgcccttcttggtcatcaccatgatcaagatcgtgctcattaattcatttggtgccatcctgcagggcagcctgtagggtctggctggccttctgcctgccagctacacggcccccatcatgagtggccagggacctagcagggccttctttgccctccgtgggccatgatcttgcgctattgccagtggcctcggagctatcagaaagtgccttcggctactttatcacagcctggggctgttatcattttggaccatcatctgttacctggggcctggccccgncctgggaattctaccggctacctaccagcaggctccaagcttgaagggacccgggggaagcagggagacccaagttgggaccctcctttagccaaagggaaagggagccccaagaacagggccaaaaaag

SEQ ID NO: 356092 - DNA, 1221 bp, Homo Sapiens
  misc_feature (169)..(169): n is a, c, g, or t
  misc_feature (1121)..(1157): n is a, c, g, or t
attcctttggctaaaggagggtccaaacttgggtctccttgctcccccgggtccctttcaagccttgaagctgcttggtagtagccggtagaaattccaggcgggggcaggcccagggtaacagatgatggtcaaaatgataacagcacagggctgtgataaagtagcngaaggcactttctgatagcttcgagccactggcaataacgcagatcagggccaaggaggcaaagaagcctgctaggcgctggccactcatgatgggggccgtgtagctggcaggcagaaggccagccagaccaaacaggctgccctgcaggatggcaccaaatgaattaatgagcacgatcttgatcatggtgatgacaaagaagggcagagcatccagctgcaccttcaccaggatggcagtgatcagaaacaccagcaggatggccaccaggctgcccaggatccgtacggactgggggatcctctgatgcaggaaggagatgaggtaggtgaataacagcaggggcagcatggcacatagggtcatgacattgttgaagatggcactgagagagttccgctcaggcaagtgtgctgcaggggcggctgacgcctgggcgtccttgctcagttcagcagtgaccaaggacacattctgggacatgtccaggcggtttgtgaaatactgagtggccgtcatgaaaaaattccacgggagcagcgttcccagacccagcatgaagaagataagccagacagctttgtatctgtcctgaggctggtgactggttgtcatggtgatggtgttctcggttttccctggctgacagctccctccctcaggggccaggtgcccagactggccagcagaagggtcagagcagagcaagcctgggcagtccctaggaggtgctcctagttcaggctcaggcagtgggccttgtccacgggctccagatcgatggggatcacccgtccactcgcctgccccttgcggaggtcaacgtgaccgcagcctgttttaggcccgggagccaggccgccccgcccagcttgggtcccggtccccgcagggtcctcaggctccctccgctctcgacgaattcgagctcggccgatttggcctgatnnnnnnnnnnnnnnnnnnnnnnnnnnnnnnnnnnnnncggccgccaccgcggtgaatccagtcgcccaatagactattcagtcgcgggggaggaggggggg

SEQ ID NO: 356093 - DNA, 1552 bp, Homo Sapiens
  misc_feature (1263)..(1272): n is a, c, g, or t
gctggtccggtccggaattctccggatgtgcaaactgtgtggtctggcaggtgtggattccgccggtgaaggctgaaggcagctaccttaaagatgccgggatccgcagcgaagggctcggagttgtcagagaggatcgagagcttcgtggagaccctgaagcggggtggtgggccgcgcagctccgaggaaatggctcgggagaccctagggttgctgcgccagatcatcacggaccaccgctggagcaacgcgggggagctgatggagctgatccgcagagagggcaggaggatgacggccgctcagccctccgagaccaccgtgggcaacatggtgcggagagtgctcaagattatccgggaggagtatggcagactccatggacgcagcgacgagagtgatcagcaggagtccctgcacaaactgttgacatccggaggcctaaacgaggatttcagcttccattatgcccaactccagtccaacatcattgaggcgattaatgagctgctagtggagctggaagggacaatggagaacattgcagcccaggctctggagcacattcactccaatgaggtgatcatgaccattggcttctcccgaacagtagaggccttcctcaaagaggctgcccgaaagaggaaattccatgtcattgtagcagagtgtgctcctttctgccagggtcatgaaatggctgtgaatttgtccaaagcaggtattgagacaactgtcatgactgatgctgccatttttgccgttatgtcaagagtcaacaaggtgatcattggcacgaagaccatcctggccaatggggccctgagagctgtgacaggaactcacactctggcactggcagcaaaacaccattccaccccactcatcgtctgtgcacctatgttcaaactttctccacagttccccaatgaagaagactcatttcataagtttgtggctcctgaagaagtcctgccattcacagaaggggacattctggagaaggtcagcgtgcattgccctgtgtttgactacgttcccccagagctcattaccctctttatctccaacattggtgggaatgcaccttcctacatctaccgcctgatgagtgaactctaccatcctgatgatcatgttttatgaccgaccacacgtgtcctaagcagattgcttaggcagatacagaatgaagaggagacttgagtgttgctgctgaagcacatccttgcaatgtgggagtgcacaggagtccacctnnnnnnnnnntccttgatactgttgcctgcctttttagtcaccccgtaacaagggcacacatccagcactgtgtcttgcctttcagatcttaacagagcagcagggcttaacttgttgattttggagcctcttagtgacctggttgcgtctgtgtcaggaacttaaactttctggttcagtagtgtgttaaacataacactgaataccttactgggatacagatttttgctcagaaatggctatgacactttttctaggctctaccaataaaagccacttgaaggttcaa

SEQ ID NO: 356094 - DNA, 502 bp, Homo Sapiens
  misc_feature (14)..(14): n is a, c, g, or t
  misc_feature (214)..(223): n is a, c, g, or t
aaaaatgggggggnaatgcaccctccccctaaacctaccgccctgaaggagtgaaacccctccccacccctgatggaccatgttttaatgaccgacccacacgtgcccctaaagcagattgccttaggccagatacagaatgaaagaggagacttgaagtgttgcctgctgaagcacatccttgcaatgtgggagtgcacaggagtcccacctnnnnnnnnnntccttgatactgttgcctgcctttttagtcaccccgtaacaagggcacacatcccagcactgtgtcttgcctttcagatcttaacagagcagcagggcttaacttgttgattttggagcctcttagtgacctggttgcgtctgtgtcaggaacttaaactttctggttcagtagtgtgttaaacataacactgaataccttactgggatacagatttttgctcagaaatggctatgacactttttctaggctctaccaataaaagccacttgaaggttc

SEQ ID NO: 356095 - DNA, 736 bp, Homo Sapiens
ctcgcccgcccggaagtgcaaactgtgtggtctggcaggtgtggattccgccggtgaaggctgaaggcagctaccttaaagatgccgggatccgcagcgaaggtgctcggagttgtcagagaggatcgatgagcttcgtggagaccctgaagcggggtggtgggccgcgcagctccgaggaaatggctcgggagaccctagggttgctgcgccagatcatcacggaccaccgctggagcaacgcgggtgaggccggcctgcctccgccggcgaacctggcccctgtctgttcccgatcccaggctgaaaatttcccaggcctcacttcgcgttggctcctcttatcctctctcttttggactgtaggggagctgatggagctgatccgcagagagggcaggaggatgacggccgctcagccctccgagaccaccgtgggcaacatggtgcggagagtgctcaagattatccgggaggagtatggcaggtcaggctcacgtcctgggctcctggttggatccagtgacactttttgcacgggcccctctacctgctcggagactttattggagctgaacagcccttgttacctgcctgaccactcctccccactctctcttgggtcttgtgcctctatagactccatggacgcagcgacgagagtgatcagcaggagtcctgcacaaactgttgacatccggagggctaaacgaggatttcagcttccattatgcca

SEQ ID NO: 356096 - DNA, 2106 bp, Homo Sapiens
  misc_feature (8)..(8): n is a, c, g, or t
  misc_feature (33)..(33): n is a, c, g, or t
  misc_feature (50)..(50): n is a, c, g, or t
  misc_feature (81)..(81): n is a, c, g, or t
  misc_feature (85)..(101): n is a, c, g, or t
  misc_feature (158)..(158): n is a, c, g, or t
  misc_feature (192)..(192): n is a, c, g, or t
  misc_feature (260)..(260): n is a, c, g, or t
  misc_feature (266)..(266): n is a, c, g, or t
  misc_feature (405)..(405): n is a, c, g, or t
  misc_feature (413)..(413): n is a, c, g, or t
  misc_feature (416)..(416): n is a, c, g, or t
  misc_feature (433)..(433): n is a, c, g, or t
  misc_feature (436)..(436): n is a, c, g, or t
  misc_feature (456)..(456): n is a, c, g, or t
  misc_feature (506)..(506): n is a, c, g, or t
  misc_feature (509)..(509): n is a, c, g, or t
  misc_feature (512)..(512): n is a, c, g, or t
  misc_feature (903)..(903): n is a, c, g, or t
  misc_feature (1840)..(1870): n is a, c, g, or t
aacacaantattttcagttcaggaggcgctttngattgcacagccctgcnagctccggaaaagagggacacagaagctggntcannnnnnnnnnnnnnnnngggttcttggtccctcctgttttggtacccaacattgaagaccgggacgagcttgcntaccacatcagcatcatgttctatataatattgnggtgtggtactctcctcctcatccttgtcatcattgtgttcaaggagaaacctaaatatccccccagnagggcncaatccctgagctatgccttgacctctcctgatgcctcatacttaggttccatcgcccggctcttcaaaaatctcaactttgtgctgcttgtcatcacctatgaaactccaagaggaggaggaggagagcaacaccagnaaagtgcncantgctgtgtcagaggatnatntctgagaggaaggtggtganaactcagggaacacgaacaccccaccttttccttcagcacagctctcacngcnagnacaaagggcttcgctagagatgtttttggagggaatcagtgggactatttgtggcatggatggcctattcctcctagaacccacgtaagagcttggatgatttagttggagaaaattgcacctatcaccaaatgcaaatttgattcccacctccacccccttttaggttatgggagttggtgttgggacagggtggcagagaatattggagtcaatcctagcttggtctcttgccttccctcttttcctccatccatcgtggacaatgcctgcaaaattttcacaggaagaaagcctattcaggatattaacttgaaatttccagtgtcctaagagcctctcatgaagcccagttctaataagtggcaagctgctctgccggggtcatctncctgggtaatcggactgattgctcaagttctgcaggagaggaagcaccattagaacaactccatcagaacagctccaccgggacttgtgggcctaaattttcctggcctaacgggtctgtccccaaaccctctttcctaagagctgagcaaaccaaccataataaacttgacaaaagactttgttgtggccatgacagagataccgactcaggagggctacctacctaggtgtgatcatgctgggggctaccttctgagtatatttgtgaaagcacatatttgggaactctggtagcttgagttgggaatgggaaggttcttttttacagaagtacttccccagggacttctgtgtgtcacagtcacctctgatgcctttatcttgatgttgcattgggaatctcagccatcagcccaagtgcttgttttattccaaggcagggtaatccccgtcaacttactctaacctttgctgaaaactaatcttgattcattctactctgaaaatccaaaggtgcttctgagagataagagggaaggggtagaaggaaaggtgccccttgaaatgggaattgagcctgttagaattaaaagcttatctcacctctgctggggacagtatttgcaccaccaacccctctcctcacctgctttgagcgataatctttatcagatattctaaacttaaagggattccctttaaaccaactcaagctgatctttcctatctagcctgctgtttgcctgtactcatgggctttgggaatatctcctaaaaatgaggttttggtaatttttcctatgcattgggcaactgggatcggaaccactgtgctgtcttgctccagccactgccctggcctcaaaatatcagggcagcctgggctggctgcaatactgtggggcctgggccactgcctgagaggagccaggttnnnnnnnnnnnnnnnnnnnnnnnnnnnnnnnttgtacagattcaagcaatggatgcaaggaacatgctgtatgtaatagaagaaagaagtccacgttttcggcagaagtagtgagtcagtgtggaagagaggtgagggtgtgctttactttttgataaagagaaagatgtttactcataaacccttcaaaaggtattaacaaaatgtttaccaaacctattgctttattttaaaaacataatttgtgttttctatttgtaagatctg

SEQ ID NO: 356097 - DNA, 2166 bp, Homo Sapiens
  misc_feature (81)..(81): n is a, c, g, or t
  misc_feature (84)..(84): n is a, c, g, or t
  misc_feature (96)..(120): n is a, c, g, or t
  misc_feature (127)..(127): n is a, c, g, or t
  misc_feature (163)..(163): n is a, c, g, or t
  misc_feature (174)..(174): n is a, c, g, or t
  misc_feature (318)..(318): n is a, c, g, or t
  misc_feature (343)..(343): n is a, c, g, or t
  misc_feature (345)..(345): n is a, c, g, or t
  misc_feature (362)..(396): n is a, c, g, or t
  misc_feature (541)..(541): n is a, c, g, or t
  misc_feature (1439)..(1439): n is a, c, g, or t
  misc_feature (2163)..(2163): n is a, c, g, or t
cgggatgcggggcgggagcgcggaccggcgctggggacggcggcgccagtctgcgggtcctcccgccagcccggccggagnagnccgaggccgctnnnnnnnnnnnnnnnnnnnnnnnnngagccgnagcgcatctcgcccaggagccggagcagcggcactncctggtaagcnccgcgcccacacccgctgtctttccgggcgggcggcggcagcccttcatccgctcgctgccgccccggagccgctgtccagggtcctcgaagccccccggcggcggggctcggacacctcgcgcggcatgagcccgggtgtgtncgcgcggctgggggcggtgggtgtntntttccaggctcctcgcnnnnnnnnnnnnnnnnnnnnnnnnnnnnnnnnnnntcccgcagccctgggccgaacatcagaggggcccggcgggcatggctgacctggctgtggggtcggccccgcgcccggccttgccgccgcccgctggctttgttcggcatggccgcgcgggagggggtgcttcccgccactgggngggagggcgtcctcccgcgttgattcatcttccccggagcgagctcaacgctccactggctccactcgcactactgagcacactcgccgtcacacaaccagtgtggcacacactccgggggcgcgatcacacaacaccgcgttcacgcacgggcgcctcatttcctcgagtgaggccacaggtctaccgcacacacacaatggctgttggtcattccattagactcatacacacggccacctgtcacccagggtactgggtgggagccttgcgtacacacccaggcacagctacgcactcaaaccagccatcgcggatcacagcatggacatcaactcaacaatactccctgatcacaacacactcggggccaccctgccctggcctgctcacccctgctcatggggtcccttgcgtacccagataccctggagtagactgccacccttgtgcacacactccctcttacacacacactctgtctcttagcgtgctgcccactcccacccacactggcccacgtttgcacgtccatgaacgtccattcttgccctcctatgtatgtatgtatgcatggtctgagggccgtttctggaagcaggtctggctaacacctttagattccttctccccccacacccccgagcaggagacttcgctgctctgagggcactacgagagaaggggacgaggggcagcagactgagattctcagacacactcagatgcctgacgaagtccctcaagcctttgttggtcttgtcagcacagaagaggtatttgcaggtgcttggcagttctggccctgtttatgggtgtaaggatagctccatgctggaaagaaatcctagagggaaaggaatggctggccaggtctctgtggcctgaatgggcagcncacaggggctgctgctctccctgggagcaggacacaggcacctgtgcaacacccagataagctctcctaggagtgagatacccacagggtccaagtagcccccacgaggcacaaacacacaggccattctgcacatgcagggtgtacatacgcacaacaagctcttcttgagcagaacacaggagccaggtcctggccccagagtggcccaagctggtacatacatccacaagcagtctgttcactcctttgcatgccaggtgagcccgcctacatacctagcagacatttctgccttctgcctcagtcaggccacactcaacctgtttgtgcccaagtgtacaggctcatctgctcatagggtgtgtgcgttcccacaggtgggggaatgtatgcagggggaggggagctcttgcttcttctactgcatgctccttggcactgttgcttgggaggaaccttggcctgacctcaaaaaccagaaagggggttttgagaaccaagtgtcaggccaggtgcagtggctcatacctgtaatcccaatgctttgagaagcccaggcgggaggattgcttgaggccaggaatttgagacaagcttgggcaacataccaagacccccatctctacaaaaatttaaagattagctgggtgtgatggcgcatgcctatagctacttaggagtctgatgagggaagattgcttgagctgaggagttggaggcnaca

SEQ ID NO: 356098 - DNA, 849 bp, Homo Sapiens
gacggcagtaaccctagcgtataaggtagcgaggcctgggtggcgaattcggcacgaggctggtggcaaagcagaaacaaagctccctgggcaagagggcgctgcagcaccaggagaagcaggggctgtgtgtttgaaaaaggagacaccacaggcctcagagaaggtggatcctggatcctgcagaaaagcagagccccttgcctcagggaagggagagcctgtgtccctggggaaagccgactctgcaccttccagaaaaacggagtccccatccttggggaaggtggtccccctgagtctggagaagaccaagccgtcctcctcctccaggcagttagaccgcaaagccctcggctcagcccggtctcccgagggtgccaggggcagtgaaggccgcgtggagccgaacgccgagcccgtgtccagcaccgaggcctccagtctcggccagaaagacctggaagccgctggggccgagagaagcccctgcccagaggccgcagcgcccccgccggggccgcggaatcgcgacaagcttcaccaaggcgccgtcgtgggaggcgagcgccccgccgccgccgcgcgaggacgcgggcactcaggcgggcgcgcaggcctgcgtctcagtggccgtgagccccatgtctccgcaggacggcgctgggggctcggccttcagcttccaggcggcgccgcgcgcgcccagcccgccctcgcgccgagatgcgggcctgcaggtgtcgctgggcgccgccgagacgcgctccgtggccactgggcccatgacacatcaagccgccgcgccgcccgccttccccgaagtgcgggtgcggcccggctcagcgc

SEQ ID NO: 356099 - DNA, 2173 bp, Homo Sapiens
atggagccggcgctggtgtgacggcgtgctgccgatgttgctgggtctccctgccatgccctggccggaggcagccgatggccgctctgtggcggctggtcggcggcggctggcgtggagccggatgcgcatctcgcccaggagccggagcagcggcactgcctgaaccagacagcagccttgggtgcaggcgtggtcatgagggcagatggacactgctgaagacccggcctggctccagctgcttcaaaaggattccagccccccaggaccccgacccacagccttcttctgcccacaggatgggagcctgggggctggcagctcggctatgagggattactgcccctcccagcaaaaggcaagccctgcaccccccaggcacacccctgaccaaagcccaggcatggagtctagacacagaagccccagtggggctggggaaggggcctcctgctctgacggccccagagggagcctggcctgcccctccccaacctgcttctctccccaggagtcaccctccaaggagacattggaggcacatggagcctccatctcagggacaccagaagccaccacgtctgggaagccagagcctgtgtcctccgtgaaaactgagcccaaatcctcagatgacagaaatcccatgttcttagagaagatggatttcaagtcctcaaagcaggccgattccacttccataggaaaggaggatcctgggtcctcacggaaggcagatcccatgtttacaggaaagggcagagcctgaaatcttggggaaagggggatcctgtggctcctggaaggatggatcccatgactgtaagaaaggaagatcttggatccctgggaaaagtagatcctttgtgctccagcaagacgtatacagtgtcaccaagaaaggtggatcctgtgtcctcagacaaagtggaccctgtattcccaagaaaggaggagcccaggtattcaggaaaagagcatcctgtgtcctcagaaaaggtcgctcctacatctgcagaaaaggtagatcttgtattgtcgggaaagagagatcctgggccctcgggaaaggcagatcccgtgcccttggaaagcatggattctgcgtccacaggaaagacagagccggggctcctgggcaagctgattccaggctcatcaggcaagaatgggcctgtatcctctgggaccggggctcctgggtccttgggaaggctggatcccacatgcttggggatggcagatcccgcatctgtgggaaatgtagaaactgtgcctgccacaaaagaggactcccggttcctgggaaagatggaccctgcctcctcaggagaggggcgtcctgtgtctggccacacggatactacggcttcagcaaagacagatctcacatctttgaaaaatgtggatcccatgtcttcaggcaaggtggatccagtttctctgggaaagatggaccccatgtgctcaggaaagccagagctcttgtctcctggacaggcagagcgtgtgtctgtgggaaaggcaggaactgtatccccaggaaaagaggaccccgtgtcctccagaagggaggaccccatatctgctggaagtagaaagacatcatctgaaaaagtgaatcctgagtcttcaggaaagacaaaccctgtgtcttcaggtccaggcgatcccaggtccttggggacagcaggtcccccatctgcagtaaaggctgagccagcgacgggggggaaaggagatcccctgtcctcggagaaagcaggtctggtggcctctggaaaggcggctcccacagcctcagggaaggccgagccccctcgcgtgggccaaggaggaccctgtgagcaagggaaagcagacccctggcccctctggacaaggggactctgtgtccattaggtaaagtggtctcaccttcccggaaaaacagtcccgggggccctccggggaaggtgggttcccgtggcccctgggaaaggccaaagcttttccctaggggataaaggggggtcctcgtgcctctagaagaggggtaaattcctgtttccacccatcaagcgtctttctccagcggcccctttggaaaacgatcagtcctgcctcttgtccgtccaccacacatacgagaccccccccgcgcctaaagaggcccctctaagaatcatcg

SEQ ID NO: 356100 - DNA, 910 bp, Homo Sapiens
gagcgaggcctgggtggcgaattcggcacgagggtccaggcgatcccaggtccttggggacagcaggtcccccatctgcagtaaaggctgagccagcgacggggggaaaaggagatcccctgtcctcggagaaggcaggtctggtggcctctggaaaggcggctcccacagcctcagggaaggccgagcccctcgcggtgggcaaggaggaccctgtgagcaagggaaaggcagacgctggcccctctggacaaggggactctgtgtctataggtaaagtggtctcaactccaggaaaaacagtcccggtgccctcggggaaggtggatcccgtgtccctgggaaaagcagaagctatcccagagggaaaagtgggttctctgcctctagagaaggggagtcctgttaccaccacaaaggcggatcccagggcctcggggaaagcacagccgcagtctggtggcaaagcagaaacaaagctccctgggcaagagggcgctgcagcaccaggagaagcaggggctgtgtgtttgaaaaaggagacaccacaggcctcagagaaggtggatcctggatcctgcaaaaaagcagagccccttgcctcagggaaaggagagcctgtgtccctggggaaaaccgactctgcaccttccagaaaaacggaagtccccatccttgggggaaggggggtcccccctgaatctgggagaagaaccaagccctccctcctcccttccaggcagttaaaaccgcaaaaccccctccggctccaaccccgggtctccccaaggggggcccagggggcaattgaaaggcccccctgggaacccaaaagacccaaacccgcgggtccagcaccgcaaggggcctcccaggtgtgcgggcgagcaaaacacgctgtgaaaaccct

SEQ ID NO: 356101 - DNA, 1165 bp, Homo Sapiens
gtgcgcgacaggacgcgcccacggcggccggccgcctctggcgcccgtacgtgccaagacggttcaggcggccgttgtgtccgcgaggttgcccggggggattcccgctctttttgtcgggacccccgcggcggggtgtctcccccgtcttcgaaagccgccggaggcccgccgtgtttttgtcccggggggtgtggcaagggcccctttcttgcccacaggggaagcttttgtttttgggtcttttgcccccccagacctgggggccgtgggtgtttcccccggaaggccccggggggatcccgccttttggggggggtaaccagggactccccctttttctaggaggccaggaggaaccccacttttcccctccggggatagctttctggtttttcccaagggacacgggatcccccctttcccggagggcaaccgggactgtttttcctggagtggagaccactttacctatagacacagagtcccctggtccagaggggccagcgtctgcctttcccttgctcacagggtcctccttgcccaccgcgaggggctcggccttccctgaggctgtgggagccgcctttccagaggccaccagacctgccttctccgaggacaggggatctccttttccccccgtcgctggctcagcctttactgcagatgggggacctgctgtccccaaggacctgggatcgcctggacctgaagacacagggtttgtctttcctgaagactcaggattcactttttcagatgatgtctttctacttccagcagatatggggtcctcccttctggaggacaccgggtcctcttttcctggggatacagttcctgcctttcccacagacacacgctctgcctgtccaggagacaagagctctggctttcctgagcacatggggtccatctttcccagagaaactggatccaccttgcctgaagacatgggatccacatttttcaaagatgtgagatctgtctttgctgaagccgtagtatccgtgtggccagacacaggacgcccctctcctgaggaggcagggtccatctttcccaggaaccgggagtcctcttttgtggcaggcacagtttctacatttcccaccagatgcgggatcctcgtgccgaattcgccacccaggcctcgcttcgt

SEQ ID NO: 356102 - DNA, 818 bp, Homo Sapiens
tcggccttcggctccacgcggccttcactgcccctggcaccctcgggagaccgggctgagccgagggctttgcggtctaactgcctggaggaggaggacggcttggtcttctccagactcagggggaccaccttccccaaggatggggactccgtttttctggaaggtgcagagtcggctttccccagggacacaggctctcccttccctgaggcaaggggctctgcttttctgcaggatccaggatccaccttctctgaggcctgtggtgtctcctttttcaaacacacagcccctgcttctcctggtgctgcagcgccctcttgcccagggagctttgtttctgctttgccaccagactgcggctgtgctttccccgaggccctgggatccgcctttgtggtggtaacaggactccccttctctagaggcagagaacccacttttccctctgggatagcttctgcttttcccagggacacgggatccaccttccccgagggcaccgggactgtttttcctggagttgagaccactttacctatagacacagagtccccttgtccagaggggccagcgtctgcctttcccttgctcacagggtcctccttgcccaccgcgaggggctcggccttccctgaggctgtgggagccgcctttccagaggccaccagacctgccttctccgaggacaggggatctccttttccccccgtcgctggctcagcctttactgcagatgggggacctgctgtccccaaggacctgggatcgcctggaccctcgtgccgaattcgccacccaggcctcgcgtccta

SEQ ID NO: 356103 - DNA, 1197 bp, Homo Sapiens
gaggcctgggtggcgaattcggcacgaggatcccgcatctgtgggaaatgtagaaactgtgcctgccacaaaagaggactcccggttcctgggaaagatggaccctgcctcctcaggagaggggcgtcctgtgtctggccacacggatactacggcttcagcaaagacagatctcacatctttgaaaaatgtggatcccatgtcttcaggcaaggtggatccagtttctctgggaaagatggaccccatgtgctcaggaaagccagagctcttgtctcctggacaggcagagcgtgtgtctgtgggaaaggcaggaactgtatccccaggaaaagaggacccggtgtcctccagaagggaggaccccatatctgctggaagtagaaagacatcatctgaaaaagtgaatcctgagtcttcaggaaagacaaaccctgtgtcttcaggtccaggcgatcccaggtccttggggacagcaggtcccccatctgcagtaaaggctgagccagcgacggggggaaaaggagatcccctgtcctcggagaaggcaggtctggtggcctctggaaaggcggctcccacagcctcagggaaggccgagcccctcgcggtgggcaaggaggaccctgtgagcaagggaaaggcagacgctggcccctctggacaaggggactctgtgtctataggtaaagtggtctcaactccaggaaaaacagtcccggtgccctcgggggaaggtggatcccgtgtccctgggaaaagcagaagctatcccagagggaaaaatgggttctctggcctctagagaaggggaggtcctgttaccacccacaaaggcggatcccagggcctcggggaaagcacagccgcagtctggtggcaaagcagaaacaaagctccctgggcaagagggcgctgcagcaccaggagaagcacgggctgtgtgtttgaaaaaggagacaccaccggccctccgagaaaggtggatcctggatcctgcagaaaagcagagccccttgcctcagggaaagggagagcctgtggtccctggggaaagcccgactctgcacccttcaagaaaaaccggagtcctccatccttgggggaaggtggcccccccctgatcctgaaaaaagaccaggccggtccttcttcctccaaggcaggttaaaccgccaaagccctcgggttcaaccc

SEQ ID NO: 356104 - DNA, 1231 bp, Homo Sapiens
gcaggctggtaccggtccggaattcccgggatccccaaggccgcggccccgacgctgggcccgggagcggtccccgcgcacagcgcccggacgcgtaggtcccgaagtaggcccgcgctttgcttcgtaactggggatctctgaggacatcttagttctgaccttgtggaggccgcgtctctgctgcgtgttcgcgggccagtcgggccactttgtagaaatcatagccctctaaatcaagggacgaacgctgctggctggagtttgctggacactttcattccacctcctaacaaagagaattcctattccttgaggtcccttggggcagcagttaaagactacacgatccaggagcacctaggacctggggccaccttcctgcccgctttattggatggagcactgcctccccagtttctgggacaccttggggtgtggccttggtgagtgaaacttggggtgctgcctgctgggaaggaaatccggaaacgcagagaggactctctggtggtgacccaggccttgtcagatctgagattcttggaatctcagattgtgggggtgtggatggtgaatgaatttgggtatgcccccctttaccccagaactgaagaggaagcaaactacttgccacacttgaggctgcatgactattcagagaagggaggagccacttctgaattcagagtaggactgcatcaccaggcaaatacctgttctgagccagaaagactctggcttctgaggagatcctgagagtctgagtagtgccaggaagcagcctcagaatttgggggcccattacacaccccagccatgttcctgcgacggcttggtggctggctacctcgcccttggggccgccggaaaccaatgaggcctgacccgccttacccagaacccagacgggtggacagctcctcggagaattcaggaagtgactgggatagtgccccagaaaccatggaagatgtggggcatcccaagactaaggactcgggggcattgagggtttctggggctgcttccgaaccaagcaaggaggagccccaagttgagcagctagggagcaaaagaagtggattccctcaagtgggaccagcctatctctagcactcaagagtctgggagactggaggctggaggggccagtcccaaactcagatgggatcatgtggattcaggtgcaaccagaggaccaggggtgggtgagagcggaagtcctgtg

SEQ ID NO: 356105 - DNA, 624 bp, Homo Sapiens
  misc_feature (471)..(471): n is a, c, g, or t
  misc_feature (586)..(586): n is a, c, g, or t
accagagacccggttagcacgcggatggggtgtaattcagtgtttttgtgttgtacagcctgaagaaaatgccagtggcctgacagcagcagacattgcacaaaccccagggtttccaagagtgtgcccagtttctcttgaacctccagaattgtcatctgaaccatttctataacaatggcatcttaaatgggggtcatcagaatgtatttcctaatcatattagtgtgggaacaaatcgaaagagatgcttggaagactcagaagactttggagtaaagaaagctagaactgaagctcaaagcttggattctgccgtgccactcacgaatggcgacacagaagacgatgctgacaaaatgcacgttgatagggagtttgctgttgtaacaggtgggagtggacagtttcctgttagctgcaacaacaatccaatggttgaagacaccaaacagcaggagagtggttctnttggaccaaaagaaatagaaatatatactgtgtcagcaatgcagaccccctgtcgttgcaggaatcaatatgaaaaacagtagctccgtatcgaatacattgacaaatggatgtntcatcaatggacatttggacttcccctccacgaccccg

SEQ ID NO: 356106 - DNA, 193 bp, Homo Sapiens
gcggccgcctactactactatacggctgcgagaagacgacagaagggaatgtgagggaaatactgatggcccaagtgtaaatgtctatgtggaactttttgagcacccatgtttacctgccgtgaattagattttttaatttgttgtatctgtttgaaatatatctattaaagaaaatctgccactgtgcctg

SEQ ID NO: 356107 - DNA, 977 bp, Homo Sapiens
  misc_feature (624)..(675): n is a, c, g, or t
gttgtgagctggctatccagtagggactccctgcgtttccgagagctcaggtcagtgtcttttaggaaccttggtgcaggtgcattggttgccccagcacggcactgttcgtaccgctcctgcaccttcacggacttggaatgctcgaccacactgttcagttctgggatgctttcagcagtgtccccatacccgtggtagtgtccatagtacaggttatccccaatgtcttccacccaggaaggcctactggctatgcagctacttggactcccgttcaggtgcagagaaccgcacaactcagggttagctctcagggtcttctctggctcctcagtcccactaatgcagagagaatcctggctactcggaaacggctgtcctggggctaatccactgctaattccgttagttcctgtcaagcactggccattcctgctttccatcccactgagcggggtcgtggaggggaagtccaaatgtccattgatgacacatccatttgtcaatgtattcgatacggagctactgtttttcatatctgcattaagaaatacacctgtcaccaaaattcagaaccaatgagggaggagaaactataaaatgcttcactgccattacaannnnnnnnnnnnnnnnnnnnnnnnnnnnnnnnnnnnnnnnnnnnnnnnnnnnaagtaaaatcaatgtgcataagtagacttactattaaaacgttaacagtagtatttgcctggtaagataggaaaatcatatgtgtgtcagtagcatcaggtagctcaactgaaaaatgtaagctgacaaatacactgcatgaaaaataccaacacagtcctgaaaagccatcaataaagtgctctcattttaagactactttcgagagcggtttttaaaaaatcgcccctgaaaaggtccatcagaactgagtgtaaagtgttctacagagggttccaacagaacacaaacttctctagttc

SEQ ID NO: 356108 - DNA, 1808 bp, Homo Sapiens
agcgggcgggctccgctcggcagcctgtgggacgcgaccgcggcgctagtctcgttcctttgtgctgcggcggcggcttctcgagtcctccccgacgcgtcctctaggccagcgagccccgcgctctccggtgacggaccatgtcggcggcgggagcgggcgcgggcgtagaggcgggcttctccagcgaggagctgctctcgctccgtttcccgctgcacggcgcctgccgcgacggggacctgaccacgctctgctcgctgctgcagcagacaccccacgcccacctggcctctgaggactccttctatggctggacgcccgtgcactgggccgcgcatttcggcaagttggagtgcttagtgcagttggtgagagcgggagccacactcaacgtctccaccacacggtacgcgcagacgccagcccacattgcagcctttgggggacatcctcagtgcctggtctggctgattcaagcaggagccaacattaacaaaccggattgtgagggtgaaactcccattcacaaggcagctcgctctgggagcctagaatgcatcagtgcccttgtggcgaatggggctcacgtcgacctgagaaatgccagtggcctgacagcagcagacattgcacaaacccagggtttccaagagtgtgcccagtttctcttgaacctccagaattgtcatctgaaccatttctataacaatggcatcttaaatggggggtcatcagaaatgtatttcctaattcatattagtgtggggaacaaatcgaaagagatgcttggaagactcagaagacttcggagtaaagaaagctagaactgaagctcaaagcttggattctgccgtgccactcacgaatggcgacacagaagacgatgctgacaaaatgcacgttgatagggagtttgctgttgtaacagatatgaaaaacagtagctccgtatcgaatacattgacaaatggatgtgtcatcaatggacatttggacttcccctccacgaccccgctcagtgggatggaaagcaggaatggccagtgcttgacaggaactaacggaattagcagtggattagccccaggacagccgtttccgagtagccagggttctctctgcattagtgggactgaggagccagagaagaccctgagagctaaccctgagttgtgcggttctctgcacctgaacgggagtccaagtagctgcatagccagtaggccttcctgggtggaagacattggggataacctgtactatggacactaccacgggtttggggacactgctgaaagcatcccagaactgaacagtgtggtcgagcattccaagtccgtgaaggtgcaggagcggtacgacagtgccgtgctgggcaccatgcacctgcaccacggctcctagagacgctgacctggctctcggaaacgcaggagtccttcctggtagccagctcagaatacccatgtagcagcaacttgaacgaatgtcacaacttgtacgttttttatatacttcaactttctgaaaaagtaaacttcgacaagttcccagcaactgcttgtttgtgcatgagtagggcttactaagtgcatagatgtttctacagtgaggtgtcctttttataaggtgcacttttggagttcttctgatgccaatctcaacattgtctttttttatactgtcacccagatatttgccattttttcctttttgttaaaaggattatattgatcaaggattaaatttgggggtgggtaaaatcaagggtggcctggggaaaattttaaacctcttttggccat

SEQ ID NO: 356109 - DNA, 878 bp, Homo Sapiens
cctataatgttctgggtttaaaagccatcttttccacattttctgtaaataatggataatcattttaaaaatttttatttttagtgctgttttaacaatgtagatagatcataaatgtacttgctgaattcaatcatttttaacaagccaataaagtttgataattcatattctttaatgaagatttgctatgaatttgtttactctttcataccaccttcagatagctagtcagttcagcaggagcagagaccaggttagcacgcggatggggtgtaattcagtgtttttgtgttgtacagcctgagaaatgccagtggcctgacagcagcagacattgcacaaacccagggtttccaagagtgtgcccagtttctcttgaacctccagaattgtcatctgaaccatttctataacaatggcatcttaaatgggggtcatcagaatgtatttcctaatcatattagtgtgggaacaaatcgaaagagatgcttggaagactcagaagactttggagtaaagaaagctagaactgaaggtgagaccgctttgcgggtgggaagagcacacttatttttcctttctgtaatatgttttctttttatggctgagcgcaccttcgagatgagaccttcacttcaggtggtaatgcgcctggtggattgtgcggtgacggtggagatttctcctgtactgccactgcgaagatgggacacttaacaaaagggaatgtgagggaaatactgatggcccaagtgtaaatgtctatgtggaactttttgagcacccatgtttacctgccgtgaattagattttttaatttgttgtatctgtttgaaatatatctattaaagaaaatctgccccgtgaaaatagca

SEQ ID NO: 356110 - DNA, 1682 bp, Homo Sapiens
  misc_feature (699)..(735): n is a, c, g, or t
  misc_feature (1509)..(1521): n is a, c, g, or t
ggatgtcctcggacgtgggatattgggggtatctagggcttggatggtttgtggaatgtcctcagcatcctcccgtcccaacccaaccttccttcttcctcattgtggacttggatttattctcaggctaggagtccaaaactccgtgaaaccttattgctgctgggtgtggagtggagagtgacaaaaatgtgggggacggtgattgttggctccagttactaatgtttaagcagaaaaaccactttcttgttgaaaatatccctgaaaaggtcgctgctgctttgaggaggcgtgactttttcctggtggagtgtgacggaggcatggggcctgtgctcccaggctcgggggagccccctctgcacacggggagggaggaacttggggacatcagtcatgggtcacaggtggcttcaggccattcacaagagtccccggaagttgcgtgccaagtttggttttttccctgaatctctgcatatgagcatttttctggagaaaggaccatagcttttattagattctcaaaggttcagaatggggaatgtgttaaacaaaccgaaaacctgtttcagctttaaaatcctccaaaactttaaagacttttcttttttctgagaaaggctggtaaatcactgagtcatcattcagaacatacagcctcgaagggcagagctcacacccatatatgacgtnnnnnnnnnnnnnnnnnnnnnnnnnnnnnnnnnnnnncccaggggcagactccagatcatcagacactgatacagagagcgatgctatctcctcaactctccctcttctcctaaaagctgagtctatatagggatgacaggctcaggctgagcagtcgacttctctgggttttgctgtgtaagaataggtccctcaacatgaagatgtgtctgcgtctgagccagatgctgcctgggtcggttgcctggcctccgtctggtctccctccctcctactagggtggtcaagctgtgagatctcttccagcctccaaatccagctttcccattttactgatgagaaaatcaaggccacattgcagctgggtggggagtgggagcgtgacaggcacggggagaggacagcgattgttgactctaggttcctgatggttaatcaggaaaaaccacttttcctgtagagcacatttttcttaaaagcctgctgctttgtaggggaggggtgggccttttccttgggtccctgtgaaaggaaggaaagggaccgccaatcctgaaactgtcttggaccagatatgacaaaattaaaagatttgggcaaaaacttgggggtttcccccggcttttttttaaaatttgttggggagggggctctttccagggagtgttccattttacatttttggaaaaaaggttaccccaaatggggagggggttggatctttctggggtttttttaagggccgcggttttatttgtagaggtgtctcgggggggcttttttaaccctcttcgggggggaagaatgcgnnnnnnnnnnnnnccccacacccccaaaatattctttggtttataatggggcctttaacaaaatacatgtgtgtcgcccccataatataccccaccttggttaaaaacctgggataaatcctcgggggaaagggggtggggaaaatcacaaaatgggggtttccaaaaagacac

SEQ ID NO: 356111 - DNA, 727 bp, Homo Sapiens
gggagcggggaggaggctctagcgaggcctgaaaggctgcgtaaccaggcaggagtaggggttggggttcggggttgggggacagccagggatcgcgtctgatatgctgttggggtcgtgaccgtctgggggccgaggcaggcactggccagacccagccagggatcctcgtattcgtcgagcctaatttccagcagccgggtaggcctcaccagaggctcctttccgtgaggccgcccccaattcctgcccctattctctgcctgggagatggcttccccgagccccccgccggagtcgaaggaggagtgggattatctggacccagctcagagaagcctgtataaagatgtcatgatggagaattatggaaacctggtctcactggttttaattccaggttctttggcgaaacccactttgagacaactatctgtgtagaaaaattggccatgaccacaggatgggaagatattgcataagcattgccaagcccagatctaatggatagtcacttcaaggcttgctctgtgtggaagccttactcttgtttttttcacctgcctatcctgttgacctatttatttttatgtgaatgtcattgttttattcgctttacaatatattacattttgtgtctggtaatataagtcattctttaataatcttttttcaggatgtacttcactagtctgccttcttctaactttagattatttactttttt

SEQ ID NO: 356112 - DNA, 1129 bp, Homo Sapiens
  misc_feature (925)..(942): n is a, c, g, or t
  misc_feature (954)..(956): n is a, c, g, or t
  misc_feature (1002)..(1002): n is a, c, g, or t
  misc_feature (1012)..(1012): n is a, c, g, or t
  misc_feature (1017)..(1017): n is a, c, g, or t
  misc_feature (1035)..(1035): n is a, c, g, or t
  misc_feature (1038)..(1038): n is a, c, g, or t
  misc_feature (1046)..(1046): n is a, c, g, or t
  misc_feature (1048)..(1049): n is a, c, g, or t
  misc_feature (1058)..(1058): n is a, c, g, or t
  misc_feature (1062)..(1062): n is a, c, g, or t
  misc_feature (1071)..(1071): n is a, c, g, or t
  misc_feature (1079)..(1079): n is a, c, g, or t
  misc_feature (1081)..(1081): n is a, c, g, or t
  misc_feature (1089)..(1089): n is a, c, g, or t
  misc_feature (1092)..(1092): n is a, c, g, or t
  misc_feature (1095)..(1095): n is a, c, g, or t
  misc_feature (1098)..(1098): n is a, c, g, or t
  misc_feature (1102)..(1102): n is a, c, g, or t
  misc_feature (1104)..(1104): n is a, c, g, or t
  misc_feature (1107)..(1109): n is a, c, g, or t
  misc_feature (1114)..(1114): n is a, c, g, or t
tcatcctccgtcgccctgtgacctactggtattggaacattcatagctaagactccaggacacccacaaagccgagaaatgctgagtttgcgggtcagggcgtccggagactggggaggcctcatcggagtcggccggaaatggcggtggcgggaccgagtctgtgagcctgagcccccctcagctcagccctcagtctcctctggtgcagggtacccaggcgtcctgtaccgtttcagcacagcggctttggccccagcctgtagccctctttgcgcagctctgcgcccgcatcttccccagcttgtgaggtgatgaggagaggttcaccagggaaagacgccgacttggtgtgcagggcttctgcgtggaaggagctctggtctgtggggtcaccagtccctactttaacctattcagacataaacggaggcaccattaaaacattaaagaatttatatgagcaaacagtgatgaaccagtgggacagccccagacatggtttgtcgtttgggggctaccagcgggtcttgaagaaaaggctttaaggtttgtgaagaggcaaagcaaactaaataattgattgggtacagttatgtagtcgtttcatttagagtgtccaggagaaaattttctggttatgtaatcagattaattggagatttatggttggttaagcctgaattttgttttctcctaaggtagtaacttacgagatacgcatttgagttagatcgttttgttgctgttacacaggaacctagatccctagagccacttcagtctacctgctatttaattattttaactttaatcagaagcactgtttttttcctacattttccaaatgtgtggcaagcagagtcttaaatctgttctgccagcctaacttggcttgcagtaaaatcttaaatttccagtttcnnnnnnnnnnnnnnnnnngtttgtgacggnnntcactctattggccaggctgcaacctccgtctcccaggctcaaggnattctcctgnctcancctcccaagtggccgggnatnacggcatntnncacaaaccnggtnatttttttnttttatananaggggttnacnttntanccangngcnnnccaancctggctcagggatc

SEQ ID NO: 356113 - DNA, 693 bp, Homo Sapiens
  misc_feature (26)..(26): n is a, c, g, or t
  misc_feature (96)..(96): n is a, c, g, or t
  misc_feature (489)..(499): n is a, c, g, or t
  misc_feature (506)..(595): n is a, c, g, or t
agcaagcagaaacaaccttactcacnagtgcaagctcaagcaagcccaaaagtggccctgtgatgtggaggtagatggagtccgagagagactgtnagagcaacagtacaacagactggtggactacatcacaaagacatcttgtcacctggcccccagctgttcttccatgcaaataccatgccctgtggtggctgcagaacctcccccctccactgttaaaacataccattacctggttgatccacattttgctcaggtcttccttagtaaatttaccatggtgaaaaataaagccctgaggaaagggtttccttgagtcccctctgaggtgtttattcctgcttgtgtgatttagtttttgggtttctttgagacagggtctcactgcagcttaagctcactgcctgggctcaagtgatcttactccagcctcccaagcagctgggactacaccaccacaggtatgcaccaccatacctggctgannnnnnnnnnnctagagnnnnnnnnnnnnnnnnnnnnnnnnnnnnnnnnnnnnnnnnnnnnnnnnnnnnnnnnnnnnnnnnnnnnnnnnnnnnnnnnnnnnnnnnnngtgtgagccaccatgcccaacacccactgatctttaactctcacatgttgggcataagaagtcactatataattgttactgggcaagacttaacgact

SEQ ID NO: 356114 - DNA, 1805 bp, Homo Sapiens
  misc_feature (488)..(488): n is a, c, g, or t
  misc_feature (1085)..(1085): n is a, c, g, or t
  misc_feature (1267)..(1356): n is a, c, g, or t
acaagtagctacgactgacaagcacctgccaccataaagggctgcattttgccaccataaagggctgcatttttttaaaaagcctaggcagctctaacatcatctgatatggacacaaggccaacagtttccttatttacatccttacctctaaaagatacttcaaagtgacaaaaacgtgttccttccccacttagagacaatgattaacagggccctatatgttcttaccacatacagaggatgcatttatttttgctctatgacacttgcaaaaatctctactgtaattaatttgggtctattattaactctctgttccatcatagaatgtggccaggccttacaatggagagccagagttaaaacttcaagttgcatctgtttttggggctgagtcaccacctttgcctcatgctcctttgtctggcaaaggcctagggattctttctttaaatgaaatgcttagggactttgtgggcttgttnacatttgtccatttaacttgcagtgctattctttgaaagctgctatgtgtattttctctgaagtctgcattttactaaaatttacaacagtctgatgattgattgattactgtccaggtacattttagaaaaagtgttcttcttccagtttgttttactaagcaaactttgagtaaatccctttgtcctatattgaatccagtcccaaagtgttcaggtgagtttctctagttccataaacaaaacatacatagtgggaactccctggtatgccatagagcacacaagaaccccaatattaatgctaacaattataccagtccattttgtttattctgtggaattgacttgacaaagcatgaagatattcccagtgtctgtctgataatattttgcatctaagaatgggtttgactcaagatcttgggttaccaagatgtcttaaatgttcagtaaatatctttcttacagtccagtagcttagagcatgtttgctgattgatattacatttaaacttggggctacagcttgttacctagaattttgagatactaagagaatgcaattttaaatgcccactggttttatttgttttnggagagagggtctcattctgtcacccaggctagagtacagtgggaacagtcatggctcactgcagcttaagctcactgcctgcgctcaagtgatcttactccagcctcccaagcagctgggactacaccaccacaggtatgcaccaccatacctggctgatttttaaaattttttctagagnnnnnnnnnnnnnnnnnnnnnnnnnnnnnnnnnnnnnnnnnnnnnnnnnnnnnnnnnnnnnnnnnnnnnnnnnnnnnnnnnnnnnnnnnngtgtgagccaccatgcccaacacccactgatctttaactctcacatgttgggcataagaagtcactatataattgttactggaaagcaagacttaacgaacaattctgactatgaaaaatgtctctttcagtttgttctgtaaatatttagaaaagtgacagctgtcaacctcagagtaactatttctaaaaatgtaaatatgtattaatccttgtatcttttatggtaattttgcatattgatatgaattatataaaattgtttaaaataaaaggtgtccttgaattactgaccacccatagatgtctactgttaccaggttttacaatgcaaattttcactaatacctgggtttaatacagctcacatcactgaatgttacacatgagtttaaatgggtaatatacaggttttgttataataaagttactgattaaattaaaaaaaa

SEQ ID NO: 356115 - DNA, 612 bp, Homo Sapiens
  misc_feature (451)..(510): n is a, c, g, or t
aacatatcaagaccggttaacaaagctacaggataatcttcgccaactttcagttctcttcaggaagctgagaattggtatatgacaaatgcaatgaaaaatgtggtgggatgaatcccattccagtcgagcaacttattccatatgtggaagaagatggctcaaaagaatgatgatcgggctggcccacctcgttttgctagtgaagagaggcgagaaattgctgaagtaaataaaaaaactcaaacagaagaatcaacagctgaaacaaattatggatcaattacgaaatctcatctgggatataaatgccatgttggcaatgaggaactaagctgatatttaaatttcctgctttacacatgttataccattgttttttccctcaagtattttttccctgtgaagaagattatttatctgcttttattttagtcactaaaactaaagnnnnnnnnnnnnnnnnnnnnnnnnnnnnnnnnnnnnnnnnnnnnnnnnnnnnnnnnnnnntgaaagattattgtaataaactttgatggggtttgtattttggttaatcttcatgaattgaataattgtttttttaaagcaaaataaagttttttaaataaa

SEQ ID NO: 356116 - DNA, 1099 bp, Homo Sapiens
  misc_feature (44)..(76): n is a, c, g, or t
ggatgatcatatagggaatgcagcttacgcggtggcggcgcatnnnnnnnnnnnnnnnnnnnnnnnnnnnnnnnnnatcaggccaaatcggccgagctcgaattcgtcgagagcggacgtcacggtgggcggaagtcgcggccgctgttttgaaatcgggccgcggggggtctctcaagctggttccaacgctgaggccccacagcctcccaattccgggcagacccctgacacctgctgtctggccccttccggcctgaagctgcagccgcgccatgtccacccctccgttggccgcgtcggggatggcgcccgggcccttcgccgggccccaggctcagcaggccgcccgggaagtcaacacggcgtcgctgtgccgcatcgggcaggagacagtgcaggacatcgtgtaccgcaccatggagatcttccagctcctgaggaacatgcagctgccaaatggtgtcacttaccacactggaacatatcaagaccggttaacaaagctacaggataatcttcgccaactttcagttctcttcaggaagctgagattggtatatgacaaatgcaatgaaaactgtggtgggatggatcccattccagtcgagcaacttattccatatgtggaagaagatggctcaaagaatgatgatcgggctggcccacctcgttttgctagtgaagagaggcgagaaattgctgaagtaaataaaaaactcaaacagaagaatcaacagctgaaacaaattatggatcaattacgaaatctcatctgggatataaatgccatgttggcaatgaggaactaagctgatatttaaatttcctgctttacacatgttataccattgttttttccctcaagtattttttccctgtgaagaagattatttatctgcttttattttagtcactaaaactaaagtttttatttttacattgtgatttttacattaaaatattaactttttttaatgctattttatgaaagattattgtaataaactttgatggggtttgtattttggttaatcttcatgaattgaataattgtttttttaaagcaaaataaagttttttaaataaatgttaaaaa

SEQ ID NO: 356117 - DNA, 1069 bp, Homo Sapiens
acactgcactaagaaatcccaagagtaggcagtaagacgatgtagtcttgtaggccacgttggagaaagacgaagtataatcctcgaagaagccacacatgcagcagcttgcaaagatacttccaggaagtaatctgcatatttggccatgtagagtttagtcttttccaagcaaatcattggccagccgtcatgaagatctgtttcgtgtactgcttcagagagataattcctcaatgaaaatgggcggctgttggaaggcagagggttccactgaaaggtttctaataataatagttccatatgtagcaaattttgttttgttaatactagattcatattagtcatacaacccaggctgttgagctgctccagcttaggcacactgtcttctttttcttcaaatttacttgctagaagcaggcaggaaagcgcaactaaatgcagctgctggatagagatgtcatagcggtccataaacaggtccagtaaatagacagcaagatggcgggcagaagggcagagtgtgaagcgattgctcacaatggcaatcaagtcagcaaaataccgtctgagacttaactgaggggactggcctttataggagggcaacttcagctccttgtagcgaagcgcttggtgaatatcggcggccagctgtcctcgccaccactgcccctccagctccatgggacccggcggcgcgcccagcccgacgcggcaactcgagtccggaaccgcggccctcacagccccagccccgccgtcgtgcggcggacgccggccccgctcatgctgcggacagtgggccgctaagcgccggcctcagctagagcccagcgcctggacgctcgcgccgcccattgttaaaggaccggcaggcaggctccgcatacaaagccagcgcgggggcacttgaggcccacgccgctgccaatctcgtctcgcgatacacgcggggtcgccccgagcacgtccaattggcggccgggccgggacccaggtgcagcgccaggacggcggcgcggcggctcccgcctgggtacggtcagcatcacgcgccacgctc

SEQ ID NO: 356118 - DNA, 902 bp, Homo Sapiens
tctttgcagctgctgatgtgtggcttcttcgggattatcttcgtctttctccacgtggcctacaagactacatcgtcttactgcctactcttgggatttcttagtgcagtgtattgaacgactgttgatcgctcatgataatgatgtgaaagaagcaaacaaacagagagggcaagcaggacctcagtcagctcaactaagtgtattccagacagcctcccagccatcacggccagttcactttcagcaacctcagtatctccatcagacacatcagacctcactgcagtatcgccatcctacgtcagaacaaccaagctgtcagcagattgtatcgaccacacacacctcatcttacacactacagacatgtcctgctggcttccaaactagtgttcagggccttgggacatgcagactggtgttgggatgtcactggcaataccagtagaagttaagccctgtctgagtgtttcttacaaccggagttatcagataaatgaacattacccttgtattactccatgttttgaaaggtgattatttgtgaagctgataaccgacccagactgctttgtgacatgaagctatgggtaagcgttttgtaaacttctgttcaaaaggaaagggatctaaatgacatcagaactcttcaggtaccagcaccagggagactgaatatcctttttaatgcaccatgaatcctggggagactaaggcaaatttaacagtatgttcaaatttctgtttacaacaaatccctgtatggacaaaaatgtttcaagtcctggctgatggtccaaatatttcaaaaatattcagtacaacaggaaaatttggacagacttcaatttgccattttgagaattgacctgtggtagcatctgggcctaatgttggct

SEQ ID NO: 356119 - DNA, 901 bp, Homo Sapiens
atcaggccaaatcggccgagctcgaattcgtcgagagcggagtcagtgcgcggccaggtacgggccgacgggcccgcggggccggcgccgccatggcggccgtgtttgattggatttggagacggagtgaaggcagcgagggcgagggcgagccagagctcagccccgcggacgcatgtccccttgccgagttgagggcagctggcctagagcctgtgggacactatgaagaggtggagctgactgagaccagcgtgaacgttggcccagagcgcatcgggccccactgctttgagctgctgcgtgtgctgggcaaggggggctatggcaaggtgttccaggtgcgaaaaggtgcaaggcaccaactttgggcaaaaattatatgccatgaaagtcctaaggaaggccaaaaatggtggcgcaatgccaaggacaacagcacacaacaacgggctgagcggaacattctagagtcagtgaagcaccccttttatgtgtggaactggcctattgccttccaagactggtggcaaactctacctcatccttgagtgcctcagtgtagactgaggcgtcctgagggcagtggctgggtctcttcatcctgtccccagcttcacccagcacagggccaggcaccgagtaggcgtcggtagatgtatgctgaatttgacatcgaatccccacggcaagctctgtgaggcaggtggcgagctcttcaacgcatctggagcgagagggcatcttcctgggaaagataccgcctgcttctacctggctgaaatcacgctggccctgggccatctccactcccaagggcatcatctaccgggacctcaagcccgagaacatcatgctcagcagcaggccacatcaactgaccgacttggactctgcaaaa

SEQ ID NO: 356120 - DNA, 1799 bp, Homo Sapiens
taaggctaggtacgaggctgggtgtcgaattcggcacgagggtcagtcagtgcgcggccaggtacgggccgacgggcccgcggggccggcgccgccatggcggccgtgtttgatttggatttggagacggaggaaggcagcgagggcgagggcgagccagagctcagccccgcggacgcatgtccccttgccgagttgagggcagctggcctagagcctgtgggacactatgaagaggtggagctgactgagaccagcgtgaacgttggcccagagcgcatcgggccccactgctttgagctgctgcgtgtgctgggcaaggggggctatggcaaggtgttccaggtgcgaaaggtgcaaggcaccaacttgggcaaaatatatgccatgaaagtcctaaggaaggccaaaattgtgcgcaatgccaaggacacagcacacacacgggctgagcggaacattctagagtcagtgaagcacccctttattgtggaactggcctatgccttccagactggtggcaaactctacctcatccttgagtgcctcagtggtggcgagctcttcacgcatctggagcgagagggcatcttcctggaagatacggcctgcttctacctggctgagatcacgctggccctgggccatctccactcccagggcatcatctaccgggacctcaagcccgagaacatcatgctcagcagccagggccacatcaaactgaccgactttggactctgcaaggagtctatccatgagggcgccgtcactcacaccttctgcggcaccattgagtacatggcccctgagattctggtgcgcagtggccacaaccgggctgtggactggtggagcctgggggccctgatgtacgacatgctcactggatcgccgccctttaccgcagagaaccggaagaaaaccatggataagatcatcaggggcaagctggcactgcccccctacctcaccccagatgcccgggaccttgtcaaaaagtttctgaaacggaatcccagccagcggattgggggtggcccaggggatgctgctgatgtgcagagacatccctttttccggcacatgaattgggacgaccttctggcctggcgtgtggacccccctttcaggccctgtctgcagtcagaggaggacgtgagccagtttgatacccgcttcacacggcagacgccggtggacagtcctgatgacacagccctcagcgagagtgccaaccaggccttcctgggcttcacatacgtggcgccgtctgtcctggacagcatcaaggagggcttctccttccagcccaagctgcgctcacccaggcgcctcaacagtagcccccgggtccccgtcagccccctcaagttctccccttttgaggggtttcggcccagccccagcctgccggagcccacggagctacctctacctccactcctgccaccgccgccgccctcgaccaccgcccctctccccatccgtcccccctcagggaccaagaagtccaagaggggccgtgggcgtccagggcgctaggaagccgggtgggggtgagggtagcccttgagccctgtccctgcggctgtgagagcagcaggaccctgggccagttccagagacctgggggtgtgtctgggggtggggtgtgagtgcgtatgaaagtgtgtgtctgctggggcagctgtgcccctgaatcatgggcacggagggccgcccgccacaccccgcgctcaactcgctcccgctggaagattaaagggctgaatcatgaaaaacctctacacaaaccc

SEQ ID NO: 356121 - DNA, 1921 bp, Homo Sapiens
gtcacttcctgaatcctgcttcctgcttcccagaggccgggatccggagccgcccgaagccggtgccgcagccccctgcgcccccggtgcccccgacatgtccttccgcaaagtggtccggcagagcaaattccggcatgtgttcgggcagccggtcaagaacgaccagtgctatgaggacattcgcgtgtcccgtgttacctgggacagcaccttctgcgccgtcaaccccaagttcctggcggtgattgtggaggccagtggagggggtgcctttctggtgctccccctaagcaagacgggccgcattgacaaggcctacccgacggtgtgtgggcacacgggacctgtcctggacatcgactggtgtcctcacaacgacgaagtcatagccagcggctcggaggactgcacggtcatggtgtggcagatcccagagaacgggctgacctccccgctgacagagccggtggtggtactggaggggcacaccaagcgagtgggcatcatcgcctggcaccccacggcccgaaacgtgctgctcagtgcaggctgcgacaacgtggtactcatctggaatgtgggcacagcggaggagctgtaccgcctggacagcctgcaccctgacctcatctacaatgtcagctggaaccacaatggcagcctgttttgctcagcatgcaaggacaagagcgtgcgcatcatcgacccccgtcggggcaccctggtggcagagcgggagaaggctcatgagggggcccggcccatgcgggccatcttcctggcagatggcaaggtgttcaccacaggcttcagccgaatgagcgagcggcagctggcgctctgggacccagaaaacctcgaggaacccatggccctgcaggaactggactcgagcaacggggccctgctgcccttctacgaccccgacaccagtgtggtctacgtctgcggcaagggtgactccagcatccggtactttgagatcacagaggagcctccctacatccacttcctgaacacgttcaccagcaaggagccgcagcggggtatgggcagcatgcccaagcggggcctggaggtcagcaagtgcgagatcgcccggttctacaaactgcatgagcgcaagtgtgagcccatcgtcatgactgtgccaagaaagtcggacctcttccaggatgatctgtaccccgacacagccgggcccgaggcagccctggaggctgaggagtgggtgagcgggcgggatgccgacccgatcctcatctcactgcgggaggcctacgtgcccagcaagcagcgggacctgaagatcagccggcgcaacgtgttgtctgacagccggcccgccatggccccgggctcctcccacctaggggcccccgcctccaccaccactgctgctgatgccacccccagcggcagcctggccagagccggggaggctgggaagctggaggaggtgatgcaggagctgcgggccctgagggcgctggtcaaggagcagggcgaccgcatctgccgcctggaggagcagctgggccgcatggagaacggggatgcgtagggccacagccacacgccaccttcatctcctccgccgcccccttcccactcagcttctgccagcgggtcgcaccgggctagctggctgcccagagcctctgaggcagcgcaggggtcagttcccacccccacccgtcccaggcccaggccgaagccagcgcccagctttcctcactgttcctgtggaggatgtctacgcccaggcgagctcctcgacctctgagggaccatctccccgaccactgcccagccctctgctccctccccagaggaggcgggagggtgggctctatattttcattccaaataaaattctctttctaaaaaatgccaacagacaataaacaaacacggg

SEQ ID NO: 356122 - DNA, 1072 bp, Homo Sapiens
  misc_feature (21)..(21): n is a, c, g, or t
  misc_feature (54)..(54): n is a, c, g, or t
  misc_feature (82)..(82): n is a, c, g, or t
  misc_feature (141)..(263): n is a, c, g, or t
  misc_feature (939)..(939): n is a, c, g, or t
  misc_feature (957)..(957): n is a, c, g, or t
  misc_feature (982)..(982): n is a, c, g, or t
  misc_feature (1011)..(1011): n is a, c, g, or t
gaattaattcctgcatcttgnagaggccatccaccagtgatcacctccgctgtngaaaagctaactttcaacaaccccacanaggactttaggagaaagttgctgaaggcaggaggggaccctaataggagtattcatacnnnnnnnnnnnnnnnnnnnnnnnnnnnnnnnnnnnnnnnnnnnnnnnnnnnnnnnnnnnnnnnnnnnnnnnnnnnnnnnnnnnnnnnnnnnnnnnnnnnnnnnnnnnnnnnnnnnnnnnnnnntagtaccagtttttcaaagcctcacaaattaatgaaggagcacaaggaaaaaccttctaaagactccagagaacataaaagtgccttcaaagaaccttccagggatcacaacaaatcttccaaagaatcctctaagaaacccaaagaaaataaaccactgaaagaagagaaaatagttcctaagatggccttcaaggaacctaaacccatgtcaaaagagccaaaaccagatagtaacttactcaccatcaccagtggacaagataagaaggctcctagtaaaaggccgcccatttcagattctgaagaactctcagccaaaaaaaggaaaaagagtagctcagaggctttatttaaaagtttttctagcgcaccaccactgatactcacttgttctgctgacaaaaaacagataaaagataaatctcatgtcaagatgggaaaggtcaaaattgaaagtgagacatcagagaagaagaaatcaacgttaccgccatttgatgatattgtggatcccaatgattcagatgtggaggagaatatatcctctaaatctgattctgaacaacccagtcctgccagctccagctccagctccagctccagctttcacaccatcccaggaccagggcaacaaggtcctttggaggtctattattgaaaggttctggcattntggatggacaatgagggngggattcaggttgaagtgggagggntaacgacaatggattctggaattgggagngggctgttaaataggggggggcagccgaagttcgcagggtttaggtttaagtgattgggtt

SEQ ID NO: 356123 - DNA, 1184 bp, Homo Sapiens
  misc_feature (71)..(91): n is a, c, g, or t
  misc_feature (231)..(253): n is a, c, g, or t
  misc_feature (736)..(858): n is a, c, g, or t
agcgggaggctcggagcccgggtgtcaggcgccacggcgcatgctccgcaatcatcttctttaccctggannnnnnnnnnnnnnnnnnnnntttgcttttggggctgagtttaataagcgagcgagcgagcaagcgagcgcggggggaaaaaggcagagaatgtccgccatctaccctccgctcctgggcgcgctctcattcatagcagcctcttcatgaattacagctgnnnnnnnnnnnnnnnnnnnnnnntaccacacaacaccccagcaaacctccgggcccccaggcatggctagctcgtgtgccgtgcaggtgaagctggagctggggcaccgcgcccaggtgaggaaaaaacccaccgtggagggcttcacccacgactggatggtgttcgtacgcggtccggagcacagtaacatacagcactttgtggagaaagtcgtcttccacttgcacgaaagctttcctaggccaaaaagagtgtgcaaagatccaccttacaaagtagaagaatctgggtatgctggtttcattttgccaattgaagtttattttaaaaacaaggaagaacctaggaaagtccgctttgattatgacttattcctgcatcttgaaggccatccaccagtgaatcacctccgctgtgaaaagctaactttcaacaaccccacagaggactttaggagaaagttgctgaaggcaggaggggaccctaataggagtattcatacnnnnnnnnnnnnnnnnnnnnnnnnnnnnnnnnnnnnnnnnnnnnnnnnnnnnnnnnnnnnnnnnnnnnnnnnnnnnnnnnnnnnnnnnnnnnnnnnnnnnnnnnnnnnnnnnnnnnnnnnnnntagtaccagtttttcaaagcctcacaaattaatgaaggagcacaaggaaaaaccttctaaagactccagagaacataaaagtgccttcaaagaaccttccagggatcacaacaaatcttccaaagaatcctctaagaaacccaaagaaaataaaccactgaaagaagagaaaatagttcctaagatggccttcaaggaacctaaacccatgtcaaaagagccaaaaccagatagtaacttactcaccatcaccagtggacaagataagaaggctcctagtaaaaggccgcccatttcagattctgaagaactctcagccaaaaaaa

SEQ ID NO: 356124 - DNA, 1549 bp, Homo Sapiens
  misc_feature (1486)..(1502): n is a, c, g, or t
cacccacgccggcgggagccgcccgttcgcgctgccagcagcttccgcctgctacggtcctggcaagcacctcgggatcccattccttcacagggaccctagccagttaaagctgatacattcctgtgggtcaactatgcaactaactcagattttgagcaaacaaagctctcaagttggtgatcctcaggagtctctgcattagttggacagctcttctggaattatcttctaagtcaactgtgggttgggtaggtggctctgctgatttttcgctggacttccacatttgggaccagttggctgtcatcagctctagaaagggtgtggctgttttacattggctgttttcctcacattcctcaagcaggtactgtaataaagaactggagaaatacagtcagatgggaagtagcccctgctgtcaaggagcttgccatctaatgggggagacaggcaagtaaaccaaagactacacagtgcagtatggtaagtgccatgattttgatgtgacagggcacagtggacgaccttccaaatcaaagcaagtaactaggggttgacaatggtaagtatcatagttgaagtatccttgaacaaggtttcaggaagaagaagaagggaatttcatgcagggaaacagccaaagctcagtgagtcaaaatatcacagcattcttggtaagcccaattgttttttctgttttgctattttggtggagagaaaggaacacataaaggaataacatgagagaaggctatttggggaagtgtagtagttaaaggttctggctcaaacaacaactgcagctcataaagttgactttagtggaaggatactggggtatctcatggaatcttgggaactgttgaataaccagggaaactctgggaaactcactggtaggaatccataaactgtcctcctggtgggctgtaaacaactcaccctctatgcatctcacatcaaaattccagtttcttgggaaaacaagtctgtttgcccaatttgggtcatatttccacctccatgttactcaggcatgattcatctgcaagttatgtgtatagatattttgctactgttccacccttacgctgtgctggggagggaggtgtcactgtgagctgtgtcggtgccttaagagatatctgttgtgtcttattacttggttgcttttccccacatgtacaatgacaaaaatgccttcaacctatttgatccagccgttccagtacaactcctatacttgccatctttccaagcccaaaggtacatccagctgatggaaggagcatcttggtgttaatattcttttagtcatggtctctgaaagtaaaatgtctattcttctaattctggcacaatcttatctagctatagttcctcatggtcctgcactccatggactaaattgtaagtataattactaccaatgtactctataaataacttttggggccagggtggcaatagttgctagagnnnnnnnnnnnnnnnnnggaaggagaagaaaacagtgatagttcttattttaaaaggaaaaaaa

SEQ ID NO: 356125 - DNA, 1719 bp, Homo Sapiens
  misc_feature (668)..(702): n is a, c, g, or t
  misc_feature (1195)..(1263): n is a, c, g, or t
  misc_feature (1294)..(1314): n is a, c, g, or t
  misc_feature (1327)..(1412): n is a, c, g, or t
  misc_feature (1416)..(1416): n is a, c, g, or t
  misc_feature (1461)..(1474): n is a, c, g, or t
ggatcgccgcgcggctccagctggggcgcggtggtcccgacggtcacccgaatcgcagggagtcgccgctggagaggggctcggcgcccggcggggactgcaggtgtgtgactgggcggccagggcggatgcggagggcacgcatgggagctccaggcagagctggagcaagctggggaccgtcggggagagtgggctccgcgagcagccgccgcagcccgagggctggacagatcctgctatcttccggccccgtggacctggcccaccgcgggggcagcgggtctgcaaacctgcgctccagataaccccagagacttaaggggcgtcgcggggaccacttatcgttatccgggtaacctctgctgggcggctctgcgcactgtgtcctcagcctcctgcctctgacacaggacgccctgtgtcgtagggttaggtcccctgcccgctccagcggggaactgtccgtgagcgtgggcatcagggctcttgtgccgtcagaacctgggagtcatggaagtgcccgcgtaaggcgccctccgtcgagcctcactcagcctgctagttagccagccttgggcccagacgcggctgctgtcctagagaactgcacgctttctgctctcagaggatctgtgtttacacactggacatccccgcgtgactcnnnnnnnnnnnnnnnnnnnnnnnnnnnnnnnnnnnggcatgcgcatgtgcgcgtgctggcccatcccggcctggggtaaatacacaaaaagttcaggtcagtaggaggaaggagattgttcagaaggaaaaggaaggcgaggttaaagcagcaggatgtggtataaagcgagttaacaagactcggagtagagaggagggggtgggtttaggcagaataagggctaaaagtaggccaagcctgcctccaaggtcctctctggactgacaccctcgttttccttctgtgtcttctcatccaccccacactttccttcctgccctcaggaccacctgtaaggcactggctcccagagctgactgcaggtagggctctcttggagccaaccctacaacgtggctttccagggatgggatctggaatctgtagttttcaaaactttgaatgagctccttaagtgatgatgctgaagccgttgcttgggaaccatgcatgatgtggaaaagagacccaagttccaaccggatnnnnnnnnnnnnnnnnnnnnnnnnnnnnnnnnnnnnnnnnnnnnnnnnnnnnnnnnnnnnnnnnnnnnnctgtcatactgacccatagagctgtgtggannnnnnnnnnnnnnnnnnnnngagacagggtctnnnnnnnnnnnnnnnnnnnnnnnnnnnnnnnnnnnnnnnnnnnnnnnnnnnnnnnnnnnnnnnnnnnnnnnnnnnnnnnnnnnnnncccncccagtagctgggattacaggtcagcaccacgggggccagctaannnnnnnnnnnnnngagaaggcgggtttttcccatggtgccccggttgggccccaattccttgagctaaagcgatccgtctacccttggcctttcaaagggctgggattatagacattaaccccctgtgcctggccccattgggaaaaattagtgaagcctctttttatgagacggctttccttgggaaaaccccccttgttttttggtgaaccctggcttccggttacctttttggcgctggtgggcgggccatctcc

SEQ ID NO: 356126 - DNA, 922 bp, Homo Sapiens
  misc_feature (107)..(107): n is a, c, g, or t
  misc_feature (188)..(188): n is a, c, g, or t
  misc_feature (208)..(208): n is a, c, g, or t
  misc_feature (214)..(214): n is a, c, g, or t
  misc_feature (765)..(765): n is a, c, g, or t
  misc_feature (805)..(805): n is a, c, g, or t
  misc_feature (819)..(819): n is a, c, g, or t
  misc_feature (824)..(824): n is a, c, g, or t
  misc_feature (828)..(828): n is a, c, g, or t
  misc_feature (861)..(861): n is a, c, g, or t
  misc_feature (870)..(870): n is a, c, g, or t
  misc_feature (876)..(876): n is a, c, g, or t
  misc_feature (879)..(879): n is a, c, g, or t
ggctgactgcccgtagaggaaacgacattcggagctgcgctcccgcccacgccggccctgacgcgggcctcgtcagccagtaacagggagcagaggtgggagttagngaggcgaccacgaaaacggtgaaggtcggaaccgacagcctcctccgagaaagggcaggagctgggaaggaggcggcagcngcggcggcagaaacagcagnggcggnggcggcggcagctgggaggaggtggtgacggtggcaacggcagcgtcggggacgatggcgcagactcatggcaatgtgcagaggaaggggaggaggagttccccattcgagaggaaggcagattcccctctacatagacgacaccctgaagatggtgatggaatttcctgataatgtgttaaatctcgatggacaacagaataatggtgcacagctaaagcagattcattcagcgaacatggtatgcttaagcaacaggatctaagtatatgccatagtggtgacatcacgcgaagtcctgagtgcactttctcagcttgtcccatgtgttggttatcatacgcagtgtggaacatcatcttttcccagcttgtagagtctagaaatcctgctcttgaacacctaacaagtagggcccaaggggagtccttgtctataactagaagctgcatgactgatgcaaagaagctttatacattattttatgtacatgggtccaaactaaatgacatgatagatgctattccaaaaagtaagaagaataagagatntcagttgcactccttagatacgcacaagccaaaacctttnggaggttgttgganggatntatnggaactaatgtcgcaggaatgcagggatgaagnagttttaantgactnganttgtcttttagaaaaatagaaacatatctgcgaaaacacaggt

SEQ ID NO: 356127 - DNA, 1122 bp, Homo Sapiens
agtattagtaatgggttcccaatgacctgagccaaaatgaatcaagttaaatgaaaactgacatctgatatgagcatatattattagtctattcaagcacagttttgaagttagcaaacatctaaatcctcacatctctacaaggtaggtcaaagtatgattcttctcagttgtacaagataaatggctgtataacatgtctagtcatagttaagacaacaattggggacagtgctttggtctgattgccatgccagcatcatattttatctgtgaagggtggcttggttgtggaaaactataaaaactggatgcaaaagtaaaatgcaaccttgtttggtgacgtccagttcctctggaattaggaaaaaccacttgtgtttaagaacaggagtcaaatcaatttttaaggaaacagattctaatacaaaaaccttttctgttgggtctagtaggtctggacaaaacatctccctcttttccttttatattttcctcatcctcttcttgcagcgctggttgaaaacaggggaggaccccatgaggctgtcagtggagtgggaaccatagctgctatctgagtcatcagggctctgaggaatcccagcttcactcatgcctgacataggctcctcgaagacatcactgcccagcacaccatgcccagagacattgccttcttcactttcttgaggctccattttcacatgggccagattccaaagaggagaagcatttacctctgcacttgaagcctgtggtgaagcttcaacctccaggttagatgggaagcgttcgctctgagccccaagcactcccataggcagtgactggtctccagaagcaaggtcagcctccagctcctcactgacaggaaaagtgatgtcgctcacaggttcctccttgatcttcacaggtttagcgtcctctgtggccttctcaggattgacaatcctttcatattcttcagagagttgcttactaatctgtagcatgtaactgtgatagtccttgatgcggtgctgccagaacttctggagggagagcacactgccaatacccacttcatggaatacctgctccatcacatcaggaaaaggagtctgtaacagctagaaccga

SEQ ID NO: 356128 - DNA, 1607 bp, Homo Sapiens
cccgggatcgccaaacgaatcgtggaggtggcgaaacgaggaggagataacgcggccttgggctctggtgtctcccagtctgctaaagccctaaggccatcaccatggacttccagcatcgccccgggggcaagaccgggagcgggggcgtggcctcctcctccgagagcaaccgtgaccgcaggaagcgcctccggcagctggccctggagaccatcgacatcaacaaggacccgtacttcatgaagaaccacctgggctcctatgaatgcaaactctgcctgacacttcacaacaatgaggggagctacctggcacatacgcaggggaagaagcaccagaccaacctggcccggcgagcagccaaggaggccaaggaggcccctgcccagcccgcgcctgagaaggtcaaggtggaggtgaagaagtttgtgaagatcggccgcccgggctacaaagtgaccaagcagagagactcggagatgggccagcagagcctcctcttccagattgactaccctgagatcgccgagggcatcatgccacgtcaccgcttcatgtctgcgtacgagcagaggatcgagcctccggaccggcgctggcagtacctgctcatggccgccgagccctacgagaccattgccttcaaggtgccgagcagagagatcgacaaggcggagggcaagttctggacacactggaaccgggagaccaagcagttcttcctccagttccactttaagatggagaagcccccggctccacccagcctccctgctggcccccctggggtgaagcggcctccacccccgctgatgaacggtctgccccctcggccaccgctgcctgagtctttgccaccgcccccgccaggaggcctgcctctgccacccatgccccccacagggcctgcgccctcagggcccccgggaccaccccagctacccccgccagctccaggggtccaccccccggccccagtggtgcatccccctgcatctggggtccatcccccagctcctggcgtccaccccccagctcctggcgtccatcccccagcccctggggtccacccaccaacctctggggtccaccccccagctcctggagtccaccctccagcccccggggttcacccaccagcccccggagtccacccaccagcccctggggttcacccaccagccccaggggtccatcctcccccatcagcgggggttcacccccaggccccgggggtgcacccagcagcccccgccgttcaccctcaggccccaggggtgcacccaccagccccagggatgcaccctcaggccccgggggtccacccccaacctcccggggtccatccgtcggctcctggggtccaccctcagcctccgggagttcacccctcaaatcctggggtgcaccccccaactcccatgcccccaatgctgaggcccccacttccctccgaaggcccagggaacatacctccccctcccccaaccaactgagaagctgctccctcccccagcaagcccagcgccaggtgctcttgccttttcccactgagagaaggctgctcttttgtactgccccccgctcattaaacagcctccccc

SEQ ID NO: 356129 - DNA, 1128 bp, Homo Sapiens
  misc_feature (965)..(965): n is a, c, g, or t
  misc_feature (975)..(975): n is a, c, g, or t
  misc_feature (985)..(985): n is a, c, g, or t
  misc_feature (1030)..(1030): n is a, c, g, or t
  misc_feature (1043)..(1043): n is a, c, g, or t
  misc_feature (1048)..(1048): n is a, c, g, or t
  misc_feature (1055)..(1055): n is a, c, g, or t
  misc_feature (1080)..(1080): n is a, c, g, or t
  misc_feature (1092)..(1092): n is a, c, g, or t
  misc_feature (1106)..(1106): n is a, c, g, or t
  misc_feature (1116)..(1116): n is a, c, g, or t
aaaggagcgagcaaccaatggctaggtcgaggcctgggtgttaattcggcacgaggggcgaaacgaggaggagataacgcggccttgggctctggtgtctcccagtctgctaaagccctaaggccatcaccatggacttccagcatcgccccgggggcaagaccgggagcgggggcgtggcctcctcctccgagagcaaccgtgaccgcaggagcgcctccggcagctggccctggagaccatcgacatcaacaaggacccgtacttcatgaagaaccacctgggctcctatgaatgcaaactctgcctgacacttcacaacaatgaggggagctacctggcacatacgcaggggaaaaagcaccagaccaacctggcccggcgagcagccaaggaggccaaggaggcccctgcccagcccgcgcctgaaaaggtcaaggtggaggtgaagaagtttgtgaagatcggccgcccgggctacaaagtgaccaagcagagagactcggagatgggccagcagagcctcctcttccagattgactaccctgagatcgccgagggcatcatgccacgtcaccgcttcatgtctgcgtacgagcagaggatcgagcctccggaccggcgctggcagtacctgctcatggccgccgagccctacgagaccattgccttcaaggtgccgagcagagagatcgacaaggcggagggcaagttctggacacactggaaccgggagaccaagcagttcttcctccagttccactttaagatggagaggcccccggctccacccagcctccctgctggcccccctggggtgaagcggcctccacccccgctgatgaacggtctgccccctcggccaccgctgcctgagtctttgccaccgccccgccaggaggcctgcctctgcaaccaggggcccacaggcctgcgcctcaggggccccgggaccacccagcgancccgccaacncaggggtcancccccggcccagtggtgcatcccctgcatctggggtcatccccanctctggcgtcacncccanctctggngtcatccccagcccttgggtcaacnacaactttgggncaccccactctggnttcacctcanccccgggttaca

SEQ ID NO: 356130 - DNA, 1008 bp, Homo Sapiens
  misc_feature (912)..(912): n is a, c, g, or t
tgtaaaaagcaggctggtacccggtccggaattccccgggatatcgtcgaccacgcgtcgactaaacgaagtcgtggaggtggcgaaacgaggaggagataacgcggccttgggctctggtgtctcccagtctgctaaagccctaaggccatcaccatggacttccagcatcgccccgggggcaagaccgggagcgggggcgtggcctcctcctccgagagcaaccgtgaccgcagggagcgcctccggcagctggccctggagaccatcgacatcaacaaggacccgtacttcatgaagaaccacctgggctcctatgaatgcaaactctgcctgacacttcacaacaatgaggggagctacctggcacatacgcaggggaagaagcaccagaccaacctggcccggcgagcagccaaggaggccaaggaggcccctgcccagcccgcgcctgagaaggtcaaggtggaggtgaagaagtttgtgaagatcggccgcccgggctacaaagtgaccaagcagagagactcggagatgggccagcagagcctcctcttccagattgactaccctgagatcgccgagggcatcatgccacgtcaccgcttcatgtctgcgtacgagcagaggatcgagcctccggaccggcgctggcagtacctgctcatggccgccgagccctacgagaccattgccttcaaggtgccgagcagagagatcgacaaggcggagggcaagttctggacacactggaaccgggagaccaagcagttcttcctccagttccactttaagatgggagaagcccccggctccacccagcctccctgctggccccccctggggtgaaagcggcctccaacccccgctggatgaacgggtctgcccccctcgggccacccctgcctgaanccttttggcaccgccccccgcccaggaggcctgccttcttgccaacccatggccccccaacagggccctggggccctcaaggggcccccgggaaac

SEQ ID NO: 356131 - DNA, 1072 bp, Homo Sapiens
ggaccggtccggaattcccgggatgtggcgaaacgaggaggagataacgcggccttgggctctggtgtctcccagtctgctaaagccctaaggccatcaccatggacttccagcatcgccccgggggcaagaccgggagcgggggcgtggcctcctcctccgagagcaaccgtgaccgcagggagcgcctccggcagctggccctggagaccatcgacatcaacaaggacccgtacttcatgaagaaccacctgggctcctatgaatgcaaactctgcctgacacttcacaacaatgaggggagctacctggcacatacgcaggggaagaagcaccagaccaacctggcccggcgagcagccaaggaggccaaggaggcccctgcccagcccgcgcctgagaaggtcaaggtggaggtgaagaagtttgtgaagatcggccgcccgggctacaaagtgaccaagcagagagactcggagatgggccagcagagcctcctcttccaggtgagatcagggacttgggcgtggggggcggccaaaggcacccaagaggcggctctgccacccggccgtgtccctgcagattgactaccctgagatcgccgagggcatcatgccacgtcaccgcttcatgtctgcgtacgagccagaggatcgagcctccggaccggcgctggcagtacctgctcatggccgccgagccctacgagaccattgccttcaaggtgccgagcagagagatcgacaaggcggagggcaagttctggacacactggaaccgggaagaacaagcagttcttcctccagttcccctttaagagggagaaagccccggattccacccagcttcccggctggcccccccgggggggaaactgccttcccccctgcggagaaaagggtgtgtccctatcgataacggtcgatccagaatcgttgtatagacacctttactaaaaggcgggtcccatcgacagacagcggtagccgccggggcgcaggctctaaaaggatgtattggtaagcattacgaatctcacttgctgcttcttatccgtgagcgtttttgg

SEQ ID NO: 356132 - DNA, 1241 bp, Homo Sapiens
  misc_feature (7)..(7): n is a, c, g, or t
  misc_feature (27)..(27): n is a, c, g, or t
  misc_feature (30)..(30): n is a, c, g, or t
  misc_feature (67)..(67): n is a, c, g, or t
  misc_feature (98)..(98): n is a, c, g, or t
  misc_feature (399)..(399): n is a, c, g, or t
  misc_feature (969)..(1023): n is a, c, g, or t
  misc_feature (1027)..(1027): n is a, c, g, or t
  misc_feature (1031)..(1032): n is a, c, g, or t
  misc_feature (1034)..(1034): n is a, c, g, or t
  misc_feature (1076)..(1092): n is a, c, g, or t
aaaagcnggcctactgaacaattcaantgngcagtagtagactgaaagcaggatttgttgaggagtnacagctcctgtccagagcaaatcctgtagtnatacaaggagaatgtaaacttgccagcttagacagggatcagtcctgagactgctggcagtagcaaatggctattagagtaactgtataatggttttgcctgcactttctctatgtatatacaaatgtacatgtataaatataaaaattaagtgatcatggttcttggtaacctgtcccaagtgctgtgattcacacgcctgacactaaaaggttcttcctggtccagtcagccagctgtgaccaccagcagcacagctgagtgctgagaatctggctggaaagagaaatgtggctcaagngctggctcaccttctagctgtgtggccctgggcaggttactgaggctcttccaacctcacttttcacatgtaaaatggcatttctaaaagtacctaccctacctcaaaggaattctgaaaaaagtaagtgaatttgtataaagcaaagcactcacaatatgcctgacacacaaactgcttaataaatgttagtaatttttaaaacctcctcataagcggcttagaaattattcatgtttggtacatatttattgcaagtcaagcagatccaacttttttgaaagctggtggtctaggagtatagttttaattatatttgtaaatactcaaaagtattagatgccagtctaatttaaatgcagtctgactgtagcgagtaactgacctgggcaatgaaaaagcagttgtatttttcttgtggtttttcaagaaaatatcctttttatacagatttagaaagaagaatcaatggctatatcgaagttgattgtgactaatttgttaatacagaaaacaacattaacacaaatctaagagtacctttcctaaaataaaatattttaaactttnnnnnnnnnnnnnnnnnnnnnnnnnnnnnnnnnnnnnnnnnnnnnnnnnnnnnnngggngggnngnttttaaaggttttccctggagggggctaaagttttacgcggnnnnnnnnnnnnnnnnngtaaaaaagggggtccccaattggggaacctccttttttaaagccttagggcctttggccccctctttttacacagccctcgaggaactggggaaaaacgggtataaatttgggggaatttttgggggaagagaaccccttatatcttt

SEQ ID NO: 356133 - DNA, 4024 bp, Homo Sapiens
  misc_feature (3544)..(3557): n is a, c, g, or t
  misc_feature (3867)..(3867): n is a, c, g, or t
cgtgtatctaggcagatcgcggctgttacaaccattcagaaaaaggaaaataaagcaacgcacgagccggctgggccaggaccttggggctgggctggagtgaaggtggctacgagttttccagatttaggagacttcagaaaggtggggcagatagaatggagatggcaaagatctctttgggcatatatgggcctggcgaagtaatggaataatttctaattttcggagaagccctcatgccgggatggcagaagatgagcctgatgctaagagccccaagactgggggaagggcccccccaggtggtgctgaggctggggaacctaccacccttcttcagaggctccgaggtaccatttccaaggccgtgcagaacaaagtagaggggatcctgcaagatgtacagaaattttctgacaatgacaagctgtatctctaccttcagctcccctcaggacccaccactggagacaaaagctcagagccaagtacactgagcaatgaggagtacatgtatgcctataggtggatccgcaaccacctggaagagcacactgacacctgtctgccaaagcaaagtgtttatgatgcctatcggaagtactgtgagagtcttgcctgttgccgcccactcagcacagccaactttgggcaagatcatcagagagatcttccctgacatcaaagctcgaaggcttggtggccggggccagtccaaatattgctacagtggcataaggaggaagaccttggtgtctatgccacccctgcctggacttgacctaaagggttctgagagtccaaaaatgggcccagaagtaaccccagcacctcgagatgaactggtggaggcagcgtgtgccctgacctgtgactggccaagagcggatcctgaaaacggtcctcaagttcccatcgttgaggtcgcccgcttccttgcaacagcagcatctcatctctgcccgatctgcacatgcccatgtgcttaaggccatggggcttgctgaagaggacgaacatgcacctcgggaacggtcatctaaaccaaagaatggttaagagaacccagagggtggagcccacaagaagccagagagactggcccagcctcctaaggatctggaagcccgaactggggccggtcctctcgcacgtggagagcggaagaagagtgtagttgagagctcggccccaggagccaataacctgcaggttaatgccctagtggctcggctgcctctgctccttccccgggcccctcgctcactaattccgccaatcccagtctctccacctattctggcccccaggctttcttcaggtgccctgaaagtggctacactgcctctgtctagtagggccggggcacccccagcagctgtgcccatcattaacatgatcttaccaactgttcctgctttgcctggacctggacctgggcctgggcgagctccacctgggggactcactcagccccggggcacagagaacagagaggtaggcataggtggtgaccaaggaccacatgacaagggtgtcaagaggacagctgaagtacctgtgagtgaggccagtgggcaggctccaccagctaaagcagcaaagcaggatatagaggatacagcaagtgatgccaaaaggaaacgggggcgccctcgaaaaaagtcaggtggaagtggggaaaggaattctacccctctcaagtcagcagctgccatggaatctgcccagtcctcaaggttaccatgggagacatggggctcaggaggggaaggcaactcagctggaggggcagagaggccagggccaatgggagaggctgaaaagggggcagtacttgcccagggtcagggagatggtactgtttccaaaggaggaaggggccccggttcccagcataccagaagcagaagataaaattcccttggtcccctcaaaagtgagtgtcatcaagggcagcagaagccaaaaggaggcttttcctttggcaaagggagaggtagacactgcaccacagggtaataaagacttaaaggagcatgtgcttcaaagttccttatcccaggagcataaagacccaaaagcaacacccccatgatacaggtctgtggggaagagtgtttatatccctacgttaactttgcctagtagaggcccttctttgcacttgcttctcatttggctattcttttcctaaggaagtccattctcctctgtacagacagctgagtcacccagtctacttagtacctggttgctgcctctgaccttttcagcttgataccctgggctttagtgtaaccaataaatctgtagtgaccttacctgtattccctgtgctatcctgtgggaaggtaggaatgggctaagtatgatgaatatataggttagggatcttttggttttaaatcacagaaaacctaattcaaactggcttaaaataaaaaggatttattggttcatgtaactagaaagtccataggtagtgctggctccaggtgaagacttgacccagtagttcagtatgtctctaaataccggactgacttttttctcactgttgcatcttctgtaggaccatttaagtctgggccacttaatggctgccagcattcctaagattacacttttccccatttatgtccaatcagaaaaagaaggcatctttgtaccagaaatctcagcaaaagccctaatattcacactgattaggcctgggtcacatgtccaccctgaccaatcactgtggccaggaggatgatacatgctaatttgcttattctatatcatggacaacacctttggggaaaagggtgggggtcagcctccccaaaatcacatggattccccaagtggaaactaggagcagggagttgcttgggtggccgctaacaccaggctactcttattttagcttgctaagttgagatcagctagacctgctttcttttctcctcagtcttgcatttccctcaatacaagctgtagcctctttcctcgtttctagtctcagaaggaaggagagggaagccattctcctctagggactcttcagtctcatttagatgatagtccctttttttctacctccatattagagatggagctccttccttttcctgtttcttaatttttgtcttctcattcctgcttccctctcaccctattgccagttccaccaactagagtgaaagacttcctagccatttcattaaatctattctgtatccaccaaggtggcagcatcttgtcattacgtgtcacgacttaagactgcggggtttacgttacatgccacggaaaaagctagttctgcggtcaggcggcaccaaatgagaaaaaggaatgcagaccccccagaattgtatccttgggaaaaaaggcagtaaacccacctaaatatttatttgaaaacctacttttgtccctccaccctaagggtagccttctgtcaggggaatctttgggtccttccccaaaaaaaccctcgattttttcctcttcagggaagacctttcatgcggttctcatttttcttttnnnnnnnnnnnnnnacaatctttggggaaactcatcactattggaacccatctctggatatcctaataacagaagtaattatctctaaacggtggaattaaattaattggcaaaacattacctagatgaagctacctttttgtggcccccttatcgcgccgtattcaccgttccaaaaccggttcttttagcgtatccgcgatcacctagattgaatataaaccgtacgtgtaagctacaaccctatgttctgggcgccgccctttggcgccctcactagaaaaaacctttttctcctatagaccacgtttccccttctgagtngccgcgcgggcgccccccagtcttagcggtatatacgacgccacactcgggggagcactataaggttgtgggtatgcccccctacttgaagcgatcccccgaggagccgacagagagataaaggggggcactgggcggatactcccctccacacacc

SEQ ID NO: 356134 - DNA, 1263 bp, Homo Sapiens
  misc_feature (356)..(368): n is a, c, g, or t
  misc_feature (726)..(740): n is a, c, g, or t
  misc_feature (1159)..(1159): n is a, c, g, or t
  misc_feature (1187)..(1187): n is a, c, g, or t
aaaaaaaattacattttttatcttatacctcagatattttgttctgtgtattttaatattgtgggtctttaatttctgaaggttccgtagtttggttgctggctgtaggagtttttgtggttgatctagacagatgctagataatgaataaaaactggtttagggccatatccagagtgctatattatgtaaatgaattatatatgctgaatattaagctactggggttatcagctgtttgggaagagtgtaagtgactacagtagtcatttttttctgcacctgcattattttattttgtgaaaggggaggttgggaggggcttaggggattggaactggggtttggctgaaagnnnnnnnnnnnnntgtaactgatgaatctaaacgacccactgcaccaacaatcatttatcaatggttctaagttactcattgccagttcaagccaaaggtcatgttgttaagggggtgcttctagtagcacttgtgcatctgagttgaatgaagctgtgcaaacccaccctttaaaccattccacccggcagtattcagcttcttaaccagtcgctatttaggaaaaaaaacccactagttaggccatcaacaagcattctttttatatttcttccagtataataaattattgatatcattgctgacttttatattatgggagggaaaaaataacattaataaaaaggtgataaaaaagcactgtttctannnnnnnnnnnnnnnccaaaaaaagaaagtaataaaaacttaaattctttgtaccagttaaaaaaaatgtataaaatttacatctgtgcagtggagttgttaagttctagaaacagtctatgaagctttagttttagcctagtagaacaactgttagagacagacgtataatttttatggaattacatgataatcatattcggatttatagaagcattttacaagtattgcaatcattgagtagagataatcatggtattttcatcagcttggtactttttgaaacgtgactgcgttgtgtgaacaatctgcaatttttcagtccgtgagatcctgcccttccacctctttcccatacccccaaggattatctcaaaatgatctctttagttctgtctccaaggcccaggacacttgtcagaaggatgcaaaanaagaaaaaagagatccaccctttttatnccaaaagaacaaagtctccccaactttctcggatgcagggccagagagcacagcccgaaaattgcagtttgtctgt

SEQ ID NO: 356135 - DNA, 1692 bp, Homo Sapiens
cagctattgctggacggccagtgggagagcgaggcctgagcctctgcgtctaggatcaaaatggtttcaatcccagaatactatgaaggcaagaacgtcctcctcacaggagctaccggttttctagggaaggtgcttctggaaaagttgctgaggtcttgtcctaaggtgaattcagtatatgttttggtgaggcagaaagctggacagacaccacaagagcgagtggaagaagtccttagtggcaagctttttgacagattgagagatgaaaatccagattttagagagaaaattatagcaatcaacagcgaactcacccaacctaaactggctctcagtgaagaagataaagaggtgatcatagattctaccaatattatattccactgtgcagctacagtaaggtttaatgaaaatttaagagatgctgttcagttaaatgtgattgcaacgcgacagcttattctccttgcacaacaaatgaagaatctggaagtgttcatgcatgtatcaacagcatatgcctactgtaatcgcaagcatattgatgaagtagtctatccaccacctgtggatcccaagaagctgattgattctttagagtggatggatgatggcctagtaaatgatatcacgccaaaattgataggagacagacctaatacatacatatacacaaaagcattggcagaatatgttgtacaacaagaaggagcaaaactaaatgtggcaattgtaaggccatcgattgttggtgccagttggaaagaaccttttccaggatggattgataactttaatggaccaagtggtctctttattgcggcagggaaaggaattcttcgaacaatacgtgcctccaacaatgcccttgcagatcttgttcctgtagatgtagttgtcaacatgagtcttgcggcagcctggtattccggagttaatagaccaagaaacatcatggtgtataattgtacaaccaggcagcactaatcctttccactggggtgaagttgagtaccatgtaatttccactttcaagaggaatcctctcgaacaggccttcagacggcccaatgtaaatctaacctccaatcatcttttatatcattactggattgctgtaagccataaggccccagcattcctgtatgatatctacctcaggatgactggaagaagcccaaggatgatgaaaacaataactcgtcttcacaaagctatggtgtttcttgaatatttcacaagtaattcttgggtttggaatactgagaatgtcaatatgttaatgaatcaactaaaccctgaagataaaaagaccttcaatattgatgtacggcagttacattgggcagaactgatatagagaactactgcttgggaactaagaagtacgtattgaatgaagaaatgtctggcctccctgcagccagaaaacatctgaacaagttgcggaatatacgttatggttttaatactatccttgtgatcctcatctggcgcatttttattgcaagatcacaaatggcaagaaatatctggtactttgtggttagtctgtgttacaagtttttgtcatacttccgagcatccagcactatgagatactgaagaccaaggattcagcattagaacatctatacatatggtgatctaaatgtacaaaatgtaaaatgtataagtcatctcact

SEQ ID NO: 356136 - DNA, 645 bp, Homo Sapiens
  misc_feature (48)..(48): n is a, c, g, or t
catttttaagtgaacttgtctatcctgtaagtaatacatgagcattancattaattcttcattactactgatgggagcacttgctattgtctgtgataataccaactcttggagttggcagtgatacagcctaaatattggtatggcaatatctggatagagggattaattaacattactcaaaagctatgtcttcccttttcagttactatatatttaataagcgacattgtcacctccatatacctattaactcccggaatacccaggctgccgcaagactcatgttgacaactacatctacaggaacaagatctgcaagggcattgttggaggcacgtattgttcgaagaattcctttccctgcctttgttgaaattaaaaacaacaccttaagatataagccatagtgtatatatatttaaagatatacaaaaaacagaaaaatgtatagaatattaaataaatcaaaaggtttacttaccgcaataaagagaccacttggtccattaaagttatcaatccatccctaataccaaaaattttaaaagggagagaagcttagaaacattatgaagctagagatttattatttgaactctacaaccccgaaatatatacttggtagctgtcttctaaaaacgt

SEQ ID NO: 356137 - DNA, 1555 bp, Homo Sapiens
  misc_feature (265)..(442): n is a, c, g, or t
  misc_feature (941)..(941): n is a, c, g, or t
  misc_feature (974)..(974): n is a, c, g, or t
  misc_feature (1022)..(1022): n is a, c, g, or t
  misc_feature (1024)..(1362): n is a, c, g, or t
  misc_feature (1364)..(1366): n is a, c, g, or t
  misc_feature (1371)..(1371): n is a, c, g, or t
  misc_feature (1380)..(1380): n is a, c, g, or t
  misc_feature (1398)..(1398): n is a, c, g, or t
  misc_feature (1400)..(1400): n is a, c, g, or t
  misc_feature (1405)..(1405): n is a, c, g, or t
  misc_feature (1423)..(1423): n is a, c, g, or t
  misc_feature (1428)..(1428): n is a, c, g, or t
  misc_feature (1430)..(1430): n is a, c, g, or t
  misc_feature (1456)..(1456): n is a, c, g, or t
  misc_feature (1491)..(1491): n is a, c, g, or t
  misc_feature (1493)..(1493): n is a, c, g, or t
  misc_feature (1511)..(1511): n is a, c, g, or t
  misc_feature (1513)..(1513): n is a, c, g, or t
  misc_feature (1534)..(1534): n is a, c, g, or t
  misc_feature (1543)..(1543): n is a, c, g, or t
  misc_feature (1551)..(1551): n is a, c, g, or t
gttctgagccctaaaattagcaactgggaatgggccattgctaaagcgccaggcttgtttcttgacctatactaaaaataacttccataaatggaaaaaatgaaaataaaagtgcttcttagctatcacgaggctagtgtccagaaatattcagatagggaccagtgctgaagatgcctgctgacccctatcctctccccaatgtcctcaccttctcccactttttcccatccttgcccccctacttcaattcagaactgttgannnnnnnnnnnnnnnnnnnnnnnnnnnnnnnnnnnnnnnnnnnnnnnnnnnnnnnnnnnnnnnnnnnnnnnnnnnnnnnnnnnnnnnnnnnnnnnnnnnnnnnnnnnnnnnnnnnnnnnnnnnnnnnnnnnnnnnnnnnnnnnnnnnnnnnnnnnnnnnnnnnnnnnnnnnnnnnnnnctggtaaaaggttgagactaactctgaacattggggggcagtagagattacaatctggtatgtacttggctataaaacagggataataactcagttcctattcagggtaaaataggaatctcaacgttgtactgaggagtaaatgaagtaatgcatgtatagtgctaatttgatagctattattattagatgctttcataaaatggagatgtaaaaaattaaagatagaaaatattccttgcgctaaagatctacaaaatgtacttcctgtggatcacttgtcggtttataacacctgtagagcaataatagaataacagaatatatattcctattccctaaagagcaagacctaggccattagtactccaagaattgcaatcattgctattagtcctccagaatagcaacatcagcatcacctggggaatttggtacaaatgcaaataattggcccacccctgacctactctatcagaaactctggaggtgggacccngcaatctgtgttttatcaagaactcccaggaantcttatgcatgctaaagtgtgagaaccataagatactgaagttggttngnnnnnnnnnnnnnnnnnnnnnnnnnnnnnnnnnnnnnnnnnnnnnnnnnnnnnnnnnnnnnnnnnnnnnnnnnnnnnnnnnnnnnnnnnnnnnnnnnnnnnnnnnnnnnnnnnnnnnnnnnnnnnnnnnnnnnnnnnnnnnnnnnnnnnnnnnnnnnnnnnnnnnnnnnnnnnnnnnnnnnnnnnnnnnnnnnnnnnnnnnnnnnnnnnnnnnnnnnnnnnnnnnnnnnnnnnnnnnnnnnnnnnnnnnnnnnnnnnnnnnnnnnnnnnnnnnnnnnnnnnnnnnnnnnnnnnnnnnnnnnnnnnnnnnnnnnnnnnnnnnnnnnnnnnnnnnnnnnnnannncaganactgaaganttaagcgactgtcaaaananaaaantctttgagaggcactttnttttnanaaaaaaagtgctattattcacataanccttttattttatcaaatgtgttcatgtatctctnanaaatgtgtattatacaantnacatgtttttattctgtgctntgtcatagnttatatanctat

SEQ ID NO: 356138 - DNA, 1771 bp, Homo Sapiens
  misc_feature (30)..(30): n is a, c, g, or t
  misc_feature (57)..(68): n is a, c, g, or t
  misc_feature (512)..(535): n is a, c, g, or t
  misc_feature (553)..(553): n is a, c, g, or t
  misc_feature (756)..(756): n is a, c, g, or t
  misc_feature (1620)..(1620): n is a, c, g, or t
  misc_feature (1622)..(1622): n is a, c, g, or t
  misc_feature (1654)..(1654): n is a, c, g, or t
  misc_feature (1689)..(1689): n is a, c, g, or t
  misc_feature (1699)..(1699): n is a, c, g, or t
  misc_feature (1715)..(1715): n is a, c, g, or t
  misc_feature (1720)..(1720): n is a, c, g, or t
  misc_feature (1728)..(1728): n is a, c, g, or t
  misc_feature (1731)..(1731): n is a, c, g, or t
  misc_feature (1733)..(1733): n is a, c, g, or t
  misc_feature (1739)..(1739): n is a, c, g, or t
  misc_feature (1744)..(1744): n is a, c, g, or t
  misc_feature (1751)..(1751): n is a, c, g, or t
  misc_feature (1754)..(1754): n is a, c, g, or t
aaaacaagcaggtgtcccaccgtgccaganacgctgcctaaactgcttccagcttcnnnnnnnnnnnnccccccttctgcaataagtctgtgatcagccacgggacagaggcgccagcagcctgcctgtgacaggcatcaggttagctggctcccactcgggtggcgcgcccaggatataaatccgggcgcgggcccctgctgtggctcctctccctgcacactcaggagagggagcttccttctaaagacctttcttttatctgaagccgcacagcccggcaggctgtgctgacttggtggaggcagcagcggcagagcagcctgagcagcagcctgagcaggaaacctgctggggtggggagggcaggtgtctgcagcccctgagaagaaggccctggtgggccccagaccctggcatcgtttcaggggaggtctctagccgccccagcctgcaccatgtgggccccaaggtgtcgccggttctggtctcgctgggagcaggtggcagcnnnnnnnnnnnnnnnnnnnnnnnncggggtgcccccgcgaanctggcgctgccgcccatccgctattcccacgccggcatctgccccaacgacatgaatcccaacctctgggtggacgcacagagcacctgcaggcgggagtgtgagacggaccaggagtgtgagacctatgagaagtgctgccccaacgtatgtgggaccaagagctgcgtggcggcccgctacatggacgtgaaagggaaganggcccagtgggcatgcccaaggaggccacatgtgaccacttcatgtgtctgcagcagggctctgagtgtgacatctgggatggccagcccgtgtgtaagtgcaaagaccgctgtgagaaggagcccagctttacctgcgcctcggacggcctcacctactataaccgctgctacatggatgccgaggcctgctccaaaggcatcacactggccgttgtaacctgccgctatcacttcacctggcccaacaccagccccccaccacctgagaccaccatgcaccccaccacagcctccccagagacccctgagctggacatggcggcccctgcgctgctcaacaaccctgtgcaccagtcggtcaccatgggtgagacagtgagcttcctctgtgatgtggtgggccggccccggcctgagatcacctgggagaagcagttggaggatcgggagaatgtggtcatgcggcccaaccatgtgcgtggcaacgtggtggtcaccaacattgcccagctggtcatctataacgcccagctgcaggatgctgggatctacacctgcacggccccggaacgtggctggggtcctgagggctgatttcccgctgtcggtggtcaggggtcatcaggctgcagccacctcagagagcagccccaatggcacggctttccccggcggccgagtgcctgaagcccccagacagtgaagactgtggcgaagaacaaaccccgctggcacttcgatgcccaggccaacaactgcctgaccttcaccttcggccactgccaccgtaacctcaaccactttgagacctatgaggcctgcatgctggcctgcatgagcgggccgctggccgcgttgcancntgcccgccctgcaggggccctgcaaaacctangcgcctcgctgggcttacaaaaccaaagggccatncaagtctttntctatggtggctcggnggcanggcaaaanttnanaaccgnagctntgaggancgngccctccccaggggaac

SEQ ID NO: 356139 - DNA, 1351 bp, Homo Sapiens
  misc_feature (129)..(255): n is a, c, g, or t
  misc_feature (1319)..(1319): n is a, c, g, or t
  misc_feature (1341)..(1341): n is a, c, g, or t
tcccgggatcacacacagccgcgcacgcacgcccggggccgctctccgcgccggcccttgctccccgcgcccatgcggacggaccgagcgacggaagatggctgacgactccacggggccccgaggatnnnnnnnnnnnnnnnnnnnnnnnnnnnnnnnnnnnnnnnnnnnnnnnnnnnnnnnnnnnnnnnnnnnnnnnnnnnnnnnnnnnnnnnnnnnnnnnnnnnnnnnnnnnnnnnnnnnnnnnnnnnnnnnatccccgagactctccgcactatccttacccgtgacagccactgacgtcctccgccgctaaaagagaccccgcttctcggcgcctgccctccccctcgcggctcggtccggccccgccagcacagctaactccgccagcctcgccaccatcagcaccacctccaccgccgccgccgccgccaacaccaacgccggcggcggcagcagccatattcatactcaacagaaaacagacacaaaaacatggcagaaatggagaaagaagggagacctcccgaaaataaacggagcaggaagccggctcacccagtgaaaagggagatcaatgaggagatgaagaactttgcagaaaacaccatgaatgaactccttggctggtatggctatgataaggttgaattaaaagatggtgaggatattgaattcaggagctaccctacagatggggagagccggcagcacatttctgttctcaaagaaaattctttgccaaaaccaaaattacccgaggacagtgttatttcaccatacaatataagcacaggctattcagggcttgcactggaaatggactcagtgactcacctgcagggtcaaaggatcatggcagtgtgcccattattgtacctttaattccaccacctttcataaagccaccagcagatgagaaaactgaggcccagaaaagttgagcaacttgcctgaggttgcacagatactgagtggcagagctgatatttgaacctatacattatgtctccttagcctatatccttaaccactggattatccaaaacactatggcagtatttcagtcagttaagtatttactgaatgttccttacattgtgctagacaatacagatgtatgtcatcatccttgactaccaagaacttaatagtactgttggcatatgatcaaaacatcattctagttttaccttggaatgtatgatataattttagttgcatatggaaggtgcatggtaggactacaagggcaattaaagtggagtagcaaaaagtctataggcagataatcaagaactgttatatttatacangttgagggggaatggcacctgnaaacttaata

SEQ ID NO: 356140 - DNA, 1839 bp, Homo Sapiens
ggggccactctgctggctgaggctgcggagagtgtgcggctccaggtgggctcacgcggtcgtgatgtctcgggagtcggatgttgaggctcagcagtctcatggcagcagtgcctgttcacagccccatggcagcgttacccagtcccaaggctcctcctcacagtcccagggcatatccagctcctctaccagcacgatgccaaactccagccagtcctctcactccagctctgggacactgagctccttagagacagtgtccactcaggaactctattctattcctgaggaccaagaacctgaggaccaagaacctgaggagcctacccctgccccctgggctcgattatgggcccttcaggatggatttgccaatcttgaatgtgtgaatgacaactactggtttgggagggacaaaagctgtgaatattgctttgatgaaccactgctgaaaagaacagataaataccgaacatacagcaagaaacactttcggattttcagggaagtgggtcctaaaaactcttacattgcatacatagaagatcacagtggcaatggaacctttgtaaatacagagcttgtagggaaaggaaaacgccgtcctttgaataacaattctgaaattgcactgtcactaagcagaaataaagtttttgtcttttttgatctgactgtagatgatcagtcagtttatcctaaggcattaagagatgaatacatcatgtcaaaaactcttggaagtggtgcctgtggagaggtaaagctggctttcgagaggaaaacatgtaagaaagtagccataaagatcatcagcaaaaggaagtttgctattggttcagcaagagaggcagacccagctctcaatgttgaaacagaaatagaaattttgaaaaagctaaatcatccttgcatcatcaagattaaaaacttttttgatgcagaagattattatattgttttggaattgatggaagggggagagctgtttgacaaagtggtggggaataaacgcctgaaagaagctacctgcaagctctatttttaccagatgctcttggctgtgcagtaccttcatgaaaacggtattatacaccgtgacttaaagccagagaatgttttactgtcatctcaagaagaggactgtcttataaagattactgattttgggcactccaagattttgggagagacctctctcatgagaaccttatgtggaacccccacctacttggcgcctgaagttcttgtttctgttgggactgctgggtataaccgtgctgtggactgctggagtttaggagttattctttttatctgccttagtgggtatccacctttctctgagcataggactcaagtgtcactgaaggatcagatcaccagtggaaaatacaacttcattcctgaagtctgggcagaagtctcagagaaagctctggaccttgtcaagaagttgttggtagtggatccaaaggcacgttttacgacagaagaagccttaagacacccgtggcttcaggatgaagacatgaagagaaagtttcaagatcttctgtctgaggaaaatgaatccacagctctaccccaggttctagcccagccttctactagtcgaaagcggccccgtgaaggggaagccgagggtgccgagaccacaaagcgcccagctgtgtgtgctgctgtgttgtgaactccgtggtttgaacacgaaagaaatgtaccttctttcactctgtcatctttcttttctttgagtctgtttttttatagtttgtattttaattatgggaataattgctttttcacagtcactgatgtacaattaaaacctga

SEQ ID NO: 356141 - DNA, 1073 bp, Homo Sapiens
  misc_feature (52)..(433): n is a, c, g, or t
gaaaccaatttctctttcacctgggtggagtgcagtgcgtgatttgctccannnnnnnnnnnnnnnnnnnnnnnnnnnnnnnnnnnnnnnnnnnnnnnnnnnnnnnnnnnnnnnnnnnnnnnnnnnnnnnnnnnnnnnnnnnnnnnnnnnnnnnnnnnnnnnnnnnnnnnnnnnnnnnnnnnnnnnnnnnnnnnnnnnnnnnnnnnnnnnnnnnnnnnnnnnnnnnnnnnnnnnnnnnnnnnnnnnnnnnnnnnnnnnnnnnnnnnnnnnnnnnnnnnnnnnnnnnnnnnnnnnnnnnnnnnnnnnnnnnnnnnnnnnnnnnnnnnnnnnnnnnnnnnnnnnnnnnnnnnnnnnnnnnnnnnnnnnnnnnnnnnnnnnnnnnnnnnnnnnnnnnnnnnnnnnnnnnnnnnnnnnnnnnnnnnnnnnnnnnnnngcagttgctcagatcaaaacccttggctgtcttccttgtctcctccccttatctctaccccacatctaatcctgacagttccatcttcgaaaacagatgcagaatcccccagccatctgcctcctggacccctgcaactgcatcttcactgggtgctcacaatctgccctctgtccctccagcacagctcactcaccgtgtttagttagtctcagtgcagcaaccagtatggtctgatcagcatctgattggcaagtaagtcaggttgcactactcctctccaaaccctaacacttcacagctgctcaggggaaaagcccaagtccctagcatggcccgtgtgtcctcaaatgctccagctccactgccatctatatacccaaagacataggacttaggcttcctcaggcaggactggctgtgatcacacaacaactgtgagcactctcagcttttgtaatcactggcttcttcccagggggttctggtctgtagagagagcacagcatcacttcctgcaatgtacacaatgtattcagacaggcaccttacacattttaagtgctcaataaatgttatcattgtattgatgctcttagtattacccagaaaaggttgggttcaacagtccatgtgtcaa

SEQ ID NO: 356142 - DNA, 2731 bp, Homo Sapiens
  misc_feature (58)..(58): n is a, c, g, or t
  misc_feature (88)..(88): n is a, c, g, or t
  misc_feature (100)..(100): n is a, c, g, or t
  misc_feature (115)..(115): n is a, c, g, or t
  misc_feature (148)..(148): n is a, c, g, or t
  misc_feature (165)..(165): n is a, c, g, or t
  misc_feature (294)..(294): n is a, c, g, or t
  misc_feature (387)..(387): n is a, c, g, or t
  misc_feature (1085)..(1122): n is a, c, g, or t
atgtgtagtcgcatcgacattatgcctggggtatagggagtatgagtacagagtcgangcatacatgtagagtagatggtatccatanttcgccaacacntattatctgatatanagatgagtcctgcgtgtcgtgactgctagtgcnctgcatatggcgatggngtgctgtgtgtggtcgagatagaggacgatgagcggggtgatgatgtgcagagggcagggatgagggtcgggctattcatggcgcgtgaggaaagtgagttgtgaggcgcggtaagagcgcggagacgngatgagggtgtggtgggataggagattggagagaaaggaagattggcgcagacagagagagaaggtgtgtaggcgatagagatagcgacgggnaggagcgtatatatcgcgtgaaaagataggagtcagcatatatagggatataaagcgcgtgtgcgaaagcggcataagacggcgaagcagagacgggaacgcgaggggagacgagggacgaggaggagtgaagagagcgctagtagcggagcggacgtgaatggccagcgtgttcgtgggtgtaagcgtgtccgggcaagggtgagcgttgcgcgggaggggcgttgggcggcaacggcgttcgccagtgatgttgtagtcggcaagggggcgggccgggggaggggtgggtgaacaatgtggaacatggtgggacagaagtgaggaagagggaaggcgcggggtgagggctagtcgctggtgtgatgtataatatgaggtgtgggatgccgcgagggtcggaagggagaagggacagagaggagagggcagaggaggagggagtgaatggtgtggtcgggcgcgttgtcgtcgtgatgtctccaggttgagagggcgtggtgctagagggggggtggcgggtgatcgggcgcgcgtggtgaggcccggcggcttgcgcgggggctcggggcggcggattcgcatacgtcgagcgcgggtgaagtcgataagagagagattgaggcgggcggccacgggctgtcggtcgtgggctggctggacggcagtggtggttgacctcgaagaatgaccgcaannnnnnnnnnnnnnnnnnnnnnnnnnnnnnnnnnnnnnaatcatggactaaaaagcgaaggaacgttatccaggcggcccgggtgggaacggcggagccggggcgcgcgggcaaaaggtgcggtgagagcggtaggggcaccgtgctgtggacagacagggccctcactcgagctcagctcatgcctacccaggctggacagagaccccacctcgtgtgcgccagtgcccccgggagccgtcttcacccagctggcccctctccagcgcccaggtcctggccgctacacgtcaggacaggcgcttcctctgtggctgacccctctgagcccagggccccgcccagccaggcggcaaggggtgatgctccctcacaagcactgcatggctgggactcacgtgtgaggtgtggaaaattcagtgggaacaaataagcttttatgtaacttgctggttaaccgctttttacaaaaacaaaacaaaaagctcgaagatgcctgctgacaaggactccctcctgtttctaccagctcttatggggctgttcctgggacgccctgccattaggaacagacaagtaaagccagcccagagtgggctggccctgggcccaggactaggcaatgggggcagccccaataccagatggctgggaggtgccccaggaaaggagggctggggctggggccgagacacagacaccgccaagggatgtcgggaggaagctgcaaggacaggccaggggtgcgtgtccagacaggtggagatggggggcccggcacccgatctcaggcccaccctgcgctgcagccggcgtgctgaccccacaggacgtgcctgccaggacacccagcggcctcgagagaatgccccaaggggacagggttggctgggctgggcagccactacccatatccacctccaggtcgccaaaccggccctgctgccctggccagcaccgtcagtgaaagccgcctggcgaaggggctccaggcacatccacactggcaggcccagcacttgcacacccgggccccacacacctggcctcctcatgctaggcttggtcctatctgctcttccccaaggggcctggggtcccgcagcccctgctccaagcaaccggcacagagcacctgagccagtcctccgacagaaggcacccatgtgtacaagctcagttgcccacggcccacacagacacccccgaccaccctccccactgtcccgcctggcaggcgcacggaaggattgcaggcacagcacgggcggccccacgagctgaggctggcagcatgcgggcagtcacagcgcgatggcagacagcgcaggcaggggcgccagggccacacgtgccaggacagtccactgacaggaggcggggccagggggccgagggccagatgcctgggctcggggggtcttcaccaagggaccagtgatgtcgggaggaatgtggggaactgggctgtggcctggctcacgtggactgccccaagcatgggccctgggccgcccgccgcggggacacagagcagcacagcacaggcatcacgggcggggccggcgcagcgcccgcccgcggctccaggccttacccctactgggcatcaagaggcgcttcttcatgttccgatccagggaatcc

SEQ ID NO: 356143 - DNA, 862 bp, Homo Sapiens
cgggatgtcggcggcagcagggcggctgaggtggccgctggagctcaggcggcgggcgcggctgggatggcgaagagcaacggagagaatgggccgcgcgcgcccgcggccggggaagcctgtcgggaacccgggagagcctggcccagggccccgacgccgcaaccaccgacgaactcagctctctcgggtctgactcggaggccaacggcttcgccgagcgccgcatcgacaagttcggcttcatcgtgggctcgcagggcgccgagggcgcattcgtctgcggtgccaaaagggcatcccgccttctctgcggggccgtgcttggcagtacctgtcaggaggcaaggtgaagttacagcagaaccctggaaagtttgacgagctggacatgtcccctggggaccccaagtggctggacgtgattgagcgtgacctgcaccggcagttcccattccatgagatgtttgtgtcccgggggggccacggccagcaggacctattccgtgtgctgaaggcctacacgctgtaccggcccgaggagggctactgccaggcccaggcgcccattgccgctgtcttgctcatgcatatgcctgctgagcaagccttctggtgcctggtacagatctgtgagaagtacctgcccggctactacagcgagaaactggaggcgatccagctggacggggagatccttttctcgctgttgcagaaggtgtcgccggtggcccacaagcacctcagccgtcagaagatcgacccgctcctctatatgacagaatgggttcatgtgcgccttctcccgaaccttgccctggagctctgtgctgcgtgtctgggacatgttcttctgtgaagg

SEQ ID NO: 356144 - DNA, 2459 bp, Homo Sapiens
  misc_feature (1993)..(2054): n is a, c, g, or t
ccggaattcccgggatagcagggcggctgaggtggccgctggagctcaggcggcgggcgcggctgggatggcgaagagcaacggagagaatgggccgcgcgcgcccgcggccggggaaagcctgtcgggaacccgggagagcctggcccagggccccgacgccgcaaccaccgacgaactcagctctctcgggtctgactcggaggccaacggcttcgccgagcgccgcatcgacaagttcggcttcatcgtgggctcgcagggcgccgagggcgcgctggaggaagtacccctggaggtgctgaggcagagggagtccaagtggctggacatgctcaacaactgggacaaatggatggccaagaagcacaaaaagattcgtctgcggtgccaaaagggcatcccgccttctctgcggggccgtgcttggcagtacctgtcaggaggcaaggtgaagttacagcagaaccctggaaagtttgacgagctggacatgtcccctggggaccccaagtggctggacgtgattgagcgtgacctgcaccggcagttcccattccatgagatgtttgtgtcccgggggggccacggccagcaggacctattccgtgtgctgaaggcctacacgctgtaccggcccgaggagggctactgccaggcccaggcgcccattgccgctgtcttgctcatgcatatgcctgctgagcaagccttctggtgcctggtacagatctgtgagaagtacctgcccggctactacagcgagaaactggaggcgatccagctggacggggagatccttttctcgctgttgcagaaggtgtcgccggtggcccacaagcacctcagccgtcagaagatcgacccgctcctctatatgacagaatggttcatgtgcgccttctcccgaaccttgccctggagctctgtgctgcgtgtctgggacatgttcttctgtgaaggggtcaagatcatcttccgggtggggctggtgctgctgaagcacgcgctgggctcccctgagaaggtcaaagcctgccagggccagtacgagaccatcgagcgactgcggagcctcagccccaagatcatgcaggaggcctttctggtccaggaggtggtggagttgcccgtgacagagcgccagattgagcgcgaacacctcattcagctgcggcgctggcaggagacccggggtgagctgcagtgccgctccccgcccaggctgcatggtgccaaggctatcttggatgcagaacctggtccccggcctgccctacaaccttcaccatccatccgcctgcccctagatgcccccctccctggctccaaagccaagcccaagccacccaagcaggcccagaaggagcagcggaaacagatgaaggggagagggcagctggagaagcccccagccccaaatcaagccatggtggtggccgctgcaggagatgcatgtcccccacagcatgtgcccccgaaggactcagcccccaaggactcagcccctcaggatttggctccccaggtctcagcccaccaccgctcccaggagagcttgacgtcccaagagagtgaggacacctacttgtaaccctggcagctaaggcctccagggcggggtctccatataactacacggttcatgaactgacattccacatcctgcccaccctctgagggccaagctgcctggccactgggctgggctggagtctggctggtccaacacagattctgcctggtccaacacagattctgcctgagcctccttatttattttctttacagtggcactcaggctggcccagccagggcaggcagaagctagggcctggggggtggggcctccttcagccccctcctcctgggggatgctccccagggttagggtgctggtgtgaggggaaagggtggggtgttctttgtgtaaaatagaaacatggttttgtacagaaataaacagccttgtatagaagaaaaaagacacatnnnnnnnnnnnnnnnnnnnnnnnnnnnnnnnnnnnnnnnnnnnnnnnnnnnnnnnnnnnnnncaggaaacaacaacccaaagcacaaaagaagacgacacaatcgtgcaaatgagtagaacaatgccaataataaggaaggacgggcgtggcaggacagaccactgcacgctgcaggagagcacgtatactccccttaccttggaagtccagcgaatgtcatacttggggaagagagcgttggcaggcacaccaaatagcgatagcagcacggaaaattgagacaaaaggcaaacaggagctaggtcacaggatcgacaaattacaagaacactaacataagctaactgtaagtatacgaaggaaaaccacatcacatgagtcctcccatttacggtggagaccaacacacaaatcgcaagcatggagggcggcaggactagacccaaatgcaggcagccttgccga

SEQ ID NO: 356145 - DNA, 1891 bp, Homo Sapiens
  misc_feature (1864)..(1864): n is a, c, g, or t
aggcgggcgtggaccgcgcgggagttaagaagcaggtcccggatcgccgtataccgccgggttttctcccaacgtcaggcccgatggctcggcttccccagttagaaggggaagataaaagactttgattcatgaagaatctgctcactgagaagtgtatatcaagctacaatttccatcaaaaagtgattaagcagagaatggagaagaaggttgattccaggtattttaaggatggtgcagttaagaaaccttattctgcaaagacactgtccaacaagaagtcttctgcatcctttgggatccggagggagttacctagtaccagtcatctagtgcagtatcgtggcacacatacttgtacccgacaggccggttaagagaactgcgcatcagattttactatgagcagcgattactacggaaggtcttcgaagaatggaaagaggagtggtgggttttccagcacgagtggaaactctgtgttcgagctgactgtcactacaggtattacctgtacaacctgatgttccagacgtggaagacctatgtgcgtcacagcaggagatgaggaacaagtacattagagccgaggttcatgatgcaaagcaaaagatgcgacaggcctggaagtcctggttgatctacgtggttgttcgtaggaccaaacttcagatgcagactacagctctggagtttaggcaacggattatcttacgggtgtggtggagcacgtggaggcagcgactaggacaggtccgtgtgagccgtgccctccatgcctctgctttgaagcacagggccctgagcctccaggtgcaggcttggtcacagtggcgggaacagctcctgtatgtccagaaggagaaacaaaaggttgtctctgcagtgaaacatcatcagcactggcaaaaacggagatttctaaaggcctggcttgaatacctgcaagtccgcagagtgaagagacagcagaatgagatggctgagcgattccatcatgtcactgtgctccagatacacttctgtgactggcagcaggcctgggagcggagggagagcttgtacgctcaccatgcccaggtggagaaactggccaggaagatggccctgcggcgcgcctttactcactggaaacactacatgctgctgtgtgcagaagaagctgcccagtttgagatggcagaagagcaccacaggcacagccagctgctgctgcacaggttctggaacctctggcggtctcagattgagcagaaaaaggaaagagagctgctccccttactgcatgctgcctgggaccactacagaatagcactgctgtgcaaatgtatcgaattgtggctacagtatactcagaagaggcggtacaagcagctgctacaggccagagcggatggtcatttccagcagagagccctgcctgctgccttccacacatggaacagactctggcgatggcgccaccaggaaaatgtcctcagtgcaagaagcaacacgtttccacagggagacattaggagaaagcaagtattttctctctggaggcagaagatgtttcagcatcgagaaaaccgcctggcagaaagaatggccatccttcacgcagagcaacagcttctggataggtcctggttcatgtgggcaccagcaggcagcagcacgtcaccaggagcaagagtggcaaacagtggcctgtgcccaccaccgccacgggcggctcaagaaagctttctgcctctggagggaaagtgcccaagggctcagaacagagaggacgggcagggtgcgggcagcagaattccacatggcccagctcctgcgttgggcctggagccaggggaaggaggcctgccccctgcgngagcggagcggcagaaactgatgcgag

SEQ ID NO: 356146 - DNA, 1122 bp, Homo Sapiens
  misc_feature (903)..(903): n is a, c, g, or t
  misc_feature (963)..(963): n is a, c, g, or t
  misc_feature (987)..(987): n is a, c, g, or t
  misc_feature (1002)..(1002): n is a, c, g, or t
  misc_feature (1004)..(1004): n is a, c, g, or t
  misc_feature (1008)..(1008): n is a, c, g, or t
  misc_feature (1025)..(1025): n is a, c, g, or t
  misc_feature (1046)..(1046): n is a, c, g, or t
  misc_feature (1048)..(1048): n is a, c, g, or t
  misc_feature (1050)..(1050): n is a, c, g, or t
  misc_feature (1060)..(1060): n is a, c, g, or t
  misc_feature (1071)..(1071): n is a, c, g, or t
  misc_feature (1073)..(1073): n is a, c, g, or t
  misc_feature (1086)..(1086): n is a, c, g, or t
  misc_feature (1093)..(1093): n is a, c, g, or t
  misc_feature (1096)..(1096): n is a, c, g, or t
  misc_feature (1098)..(1098): n is a, c, g, or t
  misc_feature (1100)..(1100): n is a, c, g, or t
  misc_feature (1102)..(1102): n is a, c, g, or t
  misc_feature (1107)..(1107): n is a, c, g, or t
  misc_feature (1116)..(1116): n is a, c, g, or t
  misc_feature (1118)..(1118): n is a, c, g, or t
ggatggcaggggttggggcggcggctgggctgacctggagcctggagccccggggccgagggagctggcctgccagcgcgggcggaggaaagctagtgccagccctaccaggttccgcccccgcgcctgcccccctcctttttaagcgcctcccgccaccctctgctgttggctcgcttcgccgcgctccctccttccccgccttccatacctccccggctccgctcggttcctggccaccccgcagcccctgcccaggtgccatggccgcattgtaccgccctggcctgcggtgagtgacccccggcccggggcccacccgcaccttccgctgcgctcgccccctcggggctgccagtggcgctctcctgctctcagcctccgccaggtttcccatcctaggcggaggcgggcaggggcgactgctgtgggtccagcctcccgcgccgcgcgtctcttgggagggcagccggccggtgctcctcgtttccgcctgcacctccccttctctgcctcgctcgcctcttaacgcgcgatctctatctgcaactctcagaacttcctctctctcctcgctcctctctgctgagccaggcttaaatggcatgggctgagcccttgggctggccatcatgccgtagcatccagaccctgcgagtgcttagtggagatctgggccagcttcccactggcattcgagattttgtagagcacagtgcccgcctgtgccaaccagagggcatccacatctgtgatggaactgaggctgagaatactgccacactgaccctgctggagcagcagggcctcatccgaaagctccccaagtacaataactgctggctggcccgcacagacccaaaggatgtggcacgagtagagagcaagacggtgattgtaacnccttctcagcgggacacggtaccactcccgcctggtggggcccgtgggcagctgggcaantggatgtccccagctgatttccancgagctgtggatganangttncaagctgcatgcagggncgcaccatgtatgtgcttcantnancatgggtccngtgggctcccncngcccgcatcgggngcactcnctnantnanctatntgggggaanangcgt

SEQ ID NO: 356147 - DNA, 2559 bp, Homo Sapiens
  misc_feature (1006)..(1006): n is a, c, g, or t
  misc_feature (1185)..(1185): n is a, c, g, or t
  misc_feature (2450)..(2487): n is a, c, g, or t
  misc_feature (2490)..(2498): n is a, c, g, or t
tgccccctcctttttaagcgcctcccgccagcctctgctgtggctcgcttcgccgcgctccctccttccccgccttccatacctccccggctccgctcggttcctggccaccccgcagcccctgcccaggtgccatggccgcattgtaccgccctggcctgcggcttaactggcatgggctgagccccttgggctggccatcatgccgtagcatccagaccctgcgagtgcttagtggagatctgggccagcttcccactggcattcgagattttgtagagcacagtgcccgcctgtgccaaccagagggcatccacatctgtgatggaactgaggctgagaatactgccacactgaccctgctggagcagcagggcctcatccgaaagctccccaagtacaataactgctggctggcccgcacagaccccaaggatgtggcacgagtagagagcaagacggtgattgtaactccttctcagcgggacacggtaccactcccgcctggtggggcccgtgggcagctgggcaactggatgtccccagctgatttccagcgagctgtggatgagaggtttccaggctgcatgcagggccgcaccatgtatgtgcttccattcagcatgggtcctgtgggctccccgctgtcccgcatcggggtgcagctcactgactcagcctatgtggtggcaagcatgcgtattatgacccgactggggacacctgtgcttcaggccctgggagatggtgactttgtcaagtgtctgcactccgtgggccagcccctgacaggacaaggggagccagtgagccagtggccgtgcaacccagagaaaaccctgattggccacgtgcccgaaccagcgggagatcatctccttcggcagcggctatggtggcaactccctgctgggcaagaagtgctttgccctacgcatcgccctctcggctggcccgggatgagggctggctggcaaagcacatgctgatcctgggcatcaccagnccctgcaaggaagaaccgctatgtggcagccgccttccctagtgcctgtggcaagaccaacctggctatgatgcggcctgcactgccaggctggaaagtggagtgtggtgggggatgatattgcttggatgaggtttgacagtgaaggtcgactccgggccatcaaccctgagaacggncttctttggggttgcccctggtacctctgccaccaccaatcccaaacgccatgggctacaatccagagtaacactatttttaccaatgtggctgagaccagtgatggtggcgtgtactgggagggcattgaccagcctcttccacctggtgttactgtgacctcctggctgggcaaaccctgggaaacctggtgacaaggaagcccttgtgcacatccccaactctcgattttgtgccccggctcgccagtgccccatcatggacccagcctgggaggccccagaggtgtccccattgacgccatcatctttggtggccgcagacccaaagggtacccctggtataagaggccttcaactggcgtcatggggagtattgtgggcagcgaccatgcgctctgagtccactgctgcagcagaacacaaagggaagatcatcatgcacgacccatttgccatgcggcccttttttggctacaacttcggggcactacctggaacactggctgagcatggaagggcgcaagggggcccagctgccccgtatcttccatgtcaactggttccggcgtgacgaggcagggcacttcctgtggccaggctttggggagaatgctcgggtgctagactggatctgccggcggttagagggggaggacagtgcccgagagacacccattgggctggtgccaaaggaaggagccttggatctcagcggcctcagagctatagacaccactcagctgttctccctccccaaggacttctgggaacaggaggttcgtgacattcggagctacctgacagagcaggtcaaccaggatctgcccaaagaggtgttggctgagcttgaggccctggagagacgtgtgcacaaaatgtgacctgaggccctagtctagcaagaggacatagcaccctcatctgggaatagggaaggcaccttgcagaaaatatgagcaatttgatattaactaacatcttcaatgtgccatagaccttcccacaaagactgtccaataataagagatgcttatctattttaaaacgacactgtgcatccttcggaaaagttcccttgtcgggccgccttcggcccctccaaaaaacttttttttaaaaccctttctcattttggggcgcgccggggcccccctttaggggaaaagcgggaaaccgtgggcccacaaaaacctgggttttcccctcaggggaaaaacccctggggggcccagggaacctaaggggcggtctggggaattttnnnnnnnnnnnnnnnnnnnnnnnnnnnnnnnnnnnnnngcnnnnnnnnnaacaacccctcggaaaggcgggttttcttttggaaaacacaaaaaatctccccacaataaa

SEQ ID NO: 356148 - DNA, 748 bp, Homo Sapiens
ccggggtcccagaacccagtgaaaagctgtccatgcctccatgtacacgccacatcactgtctcagccacattggtaaaaatagtgttactctggattgtagccatggcgttgggattggtggtgccagaggtaccaggggcaaccccaaagaagccgttctcagggttgatggcccggagtcgaccttcactgtcaaacctcatccaagcaatatcatcccccacacactccactttccagcctggcagtgcaggccgcatcatagccaggttggtcttgccacaggcactagggaaggcggctgccacatagcgcttcttccctgcagggctggtgatgcccaggatcagcatgtgctctgccagccagccctcatcccgggccagccgagaggcgatgcgtagggcaaagcacttcttgcccagcagggagttgccaccatagccgctgccgaaggagatgatctcccgctggtcgggcacgtggccaatcagggttttctctgggttgcacggccactggctcactggctccccttgtcctgtcaggggctggcccacggagtgcagacacttgacaaagtcaccatctcccagggcctgaagcacaggtgtccccagtcgggtcataatacgcatgcttgccaccacataggctgagtcagtgagctgcaccccgatgcgggacagcggggagcccacaggaccctcgtgccgaatacaacacccagcctcgtactagctagg

SEQ ID NO: 356149 - DNA, 1362 bp, Homo Sapiens
  misc_feature (162)..(170): n is a, c, g, or t
  misc_feature (177)..(477): n is a, c, g, or t
  misc_feature (921)..(1012): n is a, c, g, or t
  misc_feature (1278)..(1290): n is a, c, g, or t
agctgactctggctgctgcgtgttggtggatagcgggagtagagtcggataccagttaacagtgattgtgatttgttgtggggcatgtagacagttcttttgggaagcttttcttaaggaaagaaaagcagggctggtgaaagttttgtttatactgaaaannnnnnnnnaaaaaannnnnnnnnnnnnnnnnnnnnnnnnnnnnnnnnnnnnnnnnnnnnnnnnnnnnnnnnnnnnnnnnnnnnnnnnnnnnnnnnnnnnnnnnnnnnnnnnnnnnnnnnnnnnnnnnnnnnnnnnnnnnnnnnnnnnnnnnnnnnnnnnnnnnnnnnnnnnnnnnnnnnnnnnnnnnnnnnnnnnnnnnnnnnnnnnnnnnnnnnnnnnnnnnnnnnnnnnnnnnnnnnnnnnnnnnnnnnnnnnnnnnnnnnnnnnnnnnnnnnnnnnnnnnnnnnnnnnnnnnnnnnnnnnnnnnnnnnnnnngataattataacacaaaagcttgtggggaggtagaccttccacttagaattattaccttggtacagattcccagccaagatattgtctttgcagattatactacaactatcaataaacccttcttattttcaaacataaaactatcatactgaatatgctttttccaactacatgtgccacccttcactccctcttctcaaatctgaagaatcactgttttatccagtgacacaaaatcattgaaatatgtttcacaaacaaaagcacaaatctccaagcatccactatggagacaggtgaacagaacaatagtcatagatgaatgctggaggacagttgcaggccaagctaaccacggaggctgaaagagacatctttctctacaactcacttaatctcaagttaacaccaatgaatggtttaacagataattttcttaagcnnnnnnnnnnnnnnnnnnnnnnnnnnnnnnnnnnnnnnnnnnnnnnnnnnnnnnnnnnnnnnnnnnnnnnnnnnnnnnnnnnnnnnnnnnnntcacagcaaatcttgcttcttctatactctatttcatcccctcctgtattatattattttgatgcaaatcttaaacaccacattatttcatctgtaaatatttcaatgttatttctaaaaggcatctctaaaaacacacactaccattatagttaaaaaaactaacacaaaattttttacatcacctaatattcactttaaaacttttaggaaaaaataggacaaaatcttgggacttagagttgacatcaaaaacatgatccatnnnnnnnnnnnnnctgataaaatggacttcatcaaaacataaaacttttgctctgcaaaaagactctgtcaagaggataaaaaaa

SEQ ID NO: 356150 - DNA, 1611 bp, Homo Sapiens
  misc_feature (44)..(44): n is a, c, g, or t
  misc_feature (64)..(160): n is a, c, g, or t
  misc_feature (1149)..(1149): n is a, c, g, or t
  misc_feature (1195)..(1195): n is a, c, g, or t
  misc_feature (1197)..(1197): n is a, c, g, or t
  misc_feature (1203)..(1203): n is a, c, g, or t
  misc_feature (1207)..(1207): n is a, c, g, or t
  misc_feature (1210)..(1210): n is a, c, g, or t
  misc_feature (1217)..(1226): n is a, c, g, or t
  misc_feature (1228)..(1230): n is a, c, g, or t
  misc_feature (1238)..(1239): n is a, c, g, or t
  misc_feature (1243)..(1243): n is a, c, g, or t
  misc_feature (1246)..(1246): n is a, c, g, or t
  misc_feature (1254)..(1254): n is a, c, g, or t
  misc_feature (1259)..(1259): n is a, c, g, or t
  misc_feature (1275)..(1275): n is a, c, g, or t
  misc_feature (1277)..(1277): n is a, c, g, or t
  misc_feature (1288)..(1288): n is a, c, g, or t
  misc_feature (1294)..(1314): n is a, c, g, or t
  misc_feature (1447)..(1447): n is a, c, g, or t
  misc_feature (1486)..(1486): n is a, c, g, or t
  misc_feature (1498)..(1567): n is a, c, g, or t
atgtgtttaaatccgaagtcccaagagtctgaatctgttaaatncccggaaaaatactaatatnnnnnnnnnnnnnnnnnnnnnnnnnnnnnnnnnnnnnnnnnnnnnnnnnnnnnnnnnnnnnnnnnnnnnnnnnnnnnnnnnnnnnnnnnnnnnnnnngagggctagcgtatggctcatgccggtatcctaatcttcggagggccaacacgggtgaccgcttgagttcggagttcagaggaggctggcaacatggtcaaccctgtctctccataaatacaaaacattgccccaaatgtggtggcatgcacctgtggtctcagctatttgagaagctaagcaggtgaagcccagggagcaaaaagagggagttgccagattatttctacctccacgccctccctgcctgtcaaggactgagtcccaggaagatgccagctccagtgctttcccgctcttgccgtctcaggccactctggctggccgctgggtccctcaacatcccctgttggttcctttagcccagcctacaccgctggaaataggccctttatgagattctcttctaaatcctagaagagtgtaccctccatttcctgaagaatcctgacaagtatgtaaacattacttaataattgttaggtaaaaatactataaatattaaatttataagtaaataaaaatatttaattttacataagacaaagctaaaaatttcagtttataatttttaaacatagacaataaatttcccagaaagaaattgctgactaccaaccaaattttcatttttattttttaaatgttggaaaaattttctcagaaagattcttatcaaccaatcaaattgtgttagcagatgtgttagtagtcacaaggaacaataatcagtcatattagttttcttactattgttcatatttcgtctttcaaaaataggtgtaatgtacaacatacttcttaattagatatgcttaaataaaacatttcatatggtattgatgtgggtatatcgtagaaaataaaaagttcctcttcaaagcttcccttcttgttaaagaataaatcataagtgttagaattaacagtttcttttaaagactaactttatgctagacatgctcacagacacgtagtacattctatgncctcgtactttaaccaagatatctgtgctagacgtgcacacaggcntncccccncccnccncccaccnnnnnnnnnnannngggaatgnntatnccntatttggnaatgntattacttttctaagncntttcgtaagcnacttcnnnnnnnnnnnnnnnnnnnnntattgcctttacctgtttaaaaaagttttaaactgttagccaatcgggttttagtttagattgtgaggtctggctccagccaatggagacaggacacagtagcagggacaaactgggtaagggataaaaattnttcgctccattgttccggggtgctctcgccattgttccnactgccataaannnnnnnnnnnnnnnnnnnnnnnnnnnnnnnnnnnnnnnnnnnnnnnnnnnnnnnnnnnnnnnnnnnnnngtggccctggggaacaagcattctatttctaaataaacattttt

SEQ ID NO: 356151 - DNA, 1030 bp, Homo Sapiens
  misc_feature (50)..(50): n is a, c, g, or t
  misc_feature (67)..(67): n is a, c, g, or t
  misc_feature (75)..(75): n is a, c, g, or t
  misc_feature (84)..(84): n is a, c, g, or t
  misc_feature (546)..(546): n is a, c, g, or t
  misc_feature (548)..(549): n is a, c, g, or t
  misc_feature (551)..(551): n is a, c, g, or t
  misc_feature (553)..(563): n is a, c, g, or t
  misc_feature (568)..(569): n is a, c, g, or t
  misc_feature (575)..(575): n is a, c, g, or t
  misc_feature (603)..(603): n is a, c, g, or t
  misc_feature (605)..(605): n is a, c, g, or t
  misc_feature (667)..(667): n is a, c, g, or t
  misc_feature (702)..(702): n is a, c, g, or t
  misc_feature (743)..(743): n is a, c, g, or t
  misc_feature (747)..(748): n is a, c, g, or t
  misc_feature (793)..(793): n is a, c, g, or t
  misc_feature (804)..(805): n is a, c, g, or t
  misc_feature (810)..(810): n is a, c, g, or t
  misc_feature (821)..(821): n is a, c, g, or t
  misc_feature (829)..(829): n is a, c, g, or t
  misc_feature (831)..(831): n is a, c, g, or t
  misc_feature (836)..(837): n is a, c, g, or t
  misc_feature (840)..(840): n is a, c, g, or t
  misc_feature (842)..(842): n is a, c, g, or t
  misc_feature (856)..(856): n is a, c, g, or t
  misc_feature (889)..(889): n is a, c, g, or t
  misc_feature (892)..(892): n is a, c, g, or t
  misc_feature (894)..(894): n is a, c, g, or t
  misc_feature (896)..(896): n is a, c, g, or t
  misc_feature (898)..(898): n is a, c, g, or t
  misc_feature (900)..(900): n is a, c, g, or t
  misc_feature (905)..(905): n is a, c, g, or t
  misc_feature (908)..(908): n is a, c, g, or t
  misc_feature (917)..(917): n is a, c, g, or t
  misc_feature (924)..(924): n is a, c, g, or t
  misc_feature (935)..(935): n is a, c, g, or t
  misc_feature (950)..(950): n is a, c, g, or t
  misc_feature (968)..(968): n is a, c, g, or t
  misc_feature (981)..(981): n is a, c, g, or t
  misc_feature (994)..(996): n is a, c, g, or t
  misc_feature (1005)..(1005): n is a, c, g, or t
  misc_feature (1011)..(1011): n is a, c, g, or t
  misc_feature (1015)..(1015): n is a, c, g, or t
aacccaaaacgcaggggtcaactgcaacgcttgcagggctcttgctgccnatggtcctcaaaacctnaaaagagnccgccccanaagctggccccatgaagtttagcaaatgcctgtggcttcagtcaattgtcttgagactgtgaagaggctgaaagacaccttcccgggtggaagaaggagttcactgaaaacttatcttaaactgacccttccctttgagtgagtcttcattcctctcccatgtgggaacccagcctccgatgccccggggactaggggaaacagttggaggttcgtgccgtccccagcctgccacgggtgcgaggacagccaagtcctgagtgactcaagatgcttcacttacatggaagaaacttctaaaactctaccgagtggtttttgtatatactaaagttctatttagagcttttctgttttgggcaagttcgctgctccttctatttgggcactttggtttttgtactgtcttttgtgacggcattgattgaacattttttactagtagtcttatagacttttgtntnntntnnnnnnnnnnngtaanntatacnaacaacacattatatcacattttttttngntgggcttctgcaaaatacaagctcattttataaaccaaaatgaacagaccatgagctggctncaggggaagtgctattcacaggaccatatccaccnccctcttaaattcctaaacaatatcatctaggacttctatntaanntatttaaaataaatcttccttgagagccttgggaggtgatgtcanggttataaatnncacantgcatatgctntagcaatntnctttnncantnctttatacaaacantattttttatacatttaatgcttattcttcatnccntntntnanatatnagnattgcaaanaagaatnttcgcaaaatnatttaatttatatgntgcgctcatgagccggcnaaaattcaaatgnctttatagctaannngtaaaaatnagcttnaganaaaaaaataagcaat

SEQ ID NO: 356152 - DNA, 2215 bp, Homo Sapiens
  misc_feature (1680)..(1688): n is a, c, g, or t
  misc_feature (1718)..(1737): n is a, c, g, or t
  misc_feature (1976)..(1976): n is a, c, g, or t
  misc_feature (2193)..(2193): n is a, c, g, or t
cctggctggctttttcttcgtcttcagcccaggccagtggtcagtgttctcatgtcatggactctccttgcctgacacttgcctcttgggctccctgttgccctcaggccaccccccacttctagttcttcacactaagccctaacttaggccttgttcttggttttctcatttttgttgccccaaatcttgaacctgtcagcaacttgcaggctgtacctctgcccttccttttctcatcaatcactgatgctgaagctgcaggcctgagccctttgtctccctggatgctgggtggcgcctcatctgcatctctgcctcaccccatccactgccacaggctgcctgatgaccactagaggtatgtctgcccctcgtcaccctgctgcacaccaatctgtggcccttcatcatgctaagaacaagaactgcgccatggctggctccttctcttctccagcccatccctctgcagcctgtcatccctgtctgtgaccattggtcgggcccctgggctctagagtgacttttgacgccctccatccctcccgccaggcactgtcctccgcaaggcctggtgcagccctggcagtaactggcttgtaagaggctcagacaccaagctgggcctgcagaggaggggcacagtaggacacagtgactgcccaggtgtccacacacctgtaggcctctgagccagcgtccagggtacaggtgcgggtggtggggatgaaggcctgaccagggagggagaagcaggtttggagaggaccctgtgcccaccctgacagacaccctggctggccctgactgactgtattctctggccacattcaagtcccccattggtgggggcagagaagtaggaccaggccatccttggctccagagctcgaagaccccaagacagccctctgctctcagcggcgccacagagagcctgggctcagccttctgcatcaggacatggcctcgtccactgagggcacgatttaaacatttgacatcagaagctttatttgtaaacctcacacagataaggaccaagggctggcggtgtggccagaggacaggggaagctgaaggccccgtgcttgagctcggcagtcctgctccttgcagtgaagccaccatgggtgaccgtccagcctcacccggtggcctgcacagtgagggaagggcttcagggccatctgctcccagggcaggggacaggccaccaaggacctttggcaaatgaaggtttacatttctgtagtttgtttgttttagagcttaatttgtagttttttagctattaaaaccatttgaatttttaacgacctgatgagggcatcaggtaaattaaaggattttgggaagattcttattttcaattctaatatctgacagatgccatcaagaataagcattaaggtataaaaaatactgtgtgtataaaacaatgccaaaccacattcctacagcaaatgcactgtgccatttataaccctgacatcacctcccaaggctctcaaggaagatttattttaaataacttaaatagaagtcctagatgatattgtttaggaatttaagagggtggtggatatggtcctgtgaatagcacttcccctgaagccagctcatggtctgttcatttggtttaaaaatgagcttgtattttgcagaagcccaacnnnnnnnnngtgataaaagtgttgttggtataaattacnnnnnnnnnnnnnnnnnnnntacaaaagtcataagactactagtaaaaaatgttcaatcaatgccgtcacaaaagacagtacaaaaaccaaagtgcccaaatagaaggagcagcgaacttgcccaaaacagaaaagctctaaatagaactttagtatatacaaaaaccactcggtagagttttagaagtttcttccatgtaagtgaagcatcttgagtcactcagggacttgggctgtcctcggcacccgtgggcaggnctgggggacgggcacggaacctccaactgtttcccctagtccccgggggcatcggagggctggggttcccacatggggagagggaatggaaggacttcacttcaaaggggaaggggtccagttttaggataagtttttcaggtggaacttcctttctttccacccggggagggtgttcttttcaggcctctttcacagtttttcaggacatttgganttgaggccacggggttttgtta

SEQ ID NO: 356153 - DNA, 2195 bp, Homo Sapiens
  misc_feature (2151)..(2151): n is a, c, g, or t
  misc_feature (2155)..(2155): n is a, c, g, or t
  misc_feature (2159)..(2159): n is a, c, g, or t
agcggatctctgaagcgccacttctcagaaacacagagctttagctccgccaaaatgaaacactcattaaacgcacttctcattttcctcatcataacatctgcgtggggtgggagcaaaggcccgctggatcagctagagaaaggaggggaaactgctcagtctgcagatccccagtgggagcagttaaataacaaaaacctgagcatgcctcttctccctgccgacttccacaaggaaaacaccgtcaccaacgactggattccagagggggaggaggacgacgactatctggacctggagaagatattcagtgaagacgacgactacatcgacatcgtcgacagtctgtcagtttccccgacagactctgatgtgagtgctgggaacatcctccagctttttcatggcaagagccggatccagcgtcttaacatcctcaacgccaagttcgctttcaacctctaccgagtgctgaaagaccaggtcaacactttcgataacatcttcatagcacccgttggcatttctactgcgatgggtatgatttccttaggtctgaagggagagacccatgaacaagtgcactcgattttgcattttaaagactttgttaatgccagcagcaagtatgaaatcacgaccattcataatctcttccgtaagctgactcatcgcctcttcaggaggaattttgggtacacactgcggtcagtcaatgacctttatatccagaagcagtttccaatcctgcttgacttcaaaactaaagtaagagagtattactttgctgaggcccagatagctgacttctcagaccctgccttcatatcaaaaaccaacaaccacatcatgaagctcaccaagggcctcataaaagatgctctggagaatatagaccctgctacccagatgatgattctcaactgcatctacttcaaaggatcctgggtgaataaattcccagtggaaatgacacacaaccacaacttccggctgaatgagagagaggtagttaaggtttccatgatgcagaccaaggggaacttcctcgcagcaaatgaccaggagctggactgcgacatcctccagctggaatacgtggggggcatcagcatgctaattgtggtcccacacaagatgtctgggatgaagaccctcgaagcgcaactgacaccccgggtggtggagagatggcaaaaaagcatgacaaacagaactcgagaagtgcttctgccgaaattcaagctggagaagaactacaatctagtggagtccctgaagttgatggggatcaggatgctgtttgacaaaaatggcaacatggcaggcatctcagaccaaaggatcgccatcgacctgttcaagcaccaaggcacgatcacagtgaacgaggaaggcacccaagccaccactgtgaccacggtggggttcatgccgctgtccacccaagtccgcttcactgtcgaccgcccctttcttttcctcatctacgagcatcgcaccagctgcctgctcttcatgggaagagtggccaaccccagcaggtcctagaggtggaggtctaggtgtctgaagtgccttgggggcaccctcattttgtttccattccaacaacgagaacagagatgttctggcatgcatttacgtagtttacgctaccaatctgaattcgaggcccatatgagaggagcttagaaacgaccaagaagagaggcttgttggaatcaattctgcacaatagcccatgctgtaagctcatagaagtcactgtaactgtagtgtgtctgctgttacctagagggtctcacctccccactcttcacagcaaacctgagcagcccctcctaagcacctcccgctccggtcaccccacccttgcacacctgactctgtcactcaagcctttctccaccagccccctcatctgaataccaagcacagaaatgagtggtgtgactaattccttacctctcccaaggagggtacacaactagcaccattcttgatgtccagggaagaagccacctcaagacatatgaggggtgccctgggctaatgttagggcttaattttctcaaagcctgacctttcaaatccatgatgaatgccatcagtccctcctgctgttgcctccctttgccctggccnccantttntgccatttctcccatactaaaatactaaattacgcc

SEQ ID NO: 356154 - DNA, 1898 bp, Homo Sapiens
agcggggggaccgcggcggtaactgtggctagggaaacctggagcggtcagagcagaatgctgtctgtatgcctggctggtccccgcctgacacatgtgcctgagatgcctccacacttggtcttcctgcccttgtggccctaacaccctcacaaagctgaaaactgcttccagtgaaaggttctgtgtaaaagcgacagaggacctaagatgaactcttgatgtcaacagttgtggtttctgcagccacactaaccacacagatgtcagcacagctgcactcacacctacttcttcattttgcaggatggccagagacaataaaagcacgagacccaagtagtctaccgaagtctccatctctgtggacctacagaggcacagagggctgctcacaagatggctttagacattctcgccatggcccctttgtatcaggcccctgccatcaacagaatagggccaaagacagacccatctaaaaggccagctgatccactaaaacccttggttctctctaggaccaaactcaccaccattgaggccaaaaggatcatgtccatcctggatgaggcgatctacaaggtggagctggtgaccttgctgtcgtatgtggcatccaacagagaggatatggaggggatgctgggggaggacgtcatgagggcagtgagagagcatgaggatctctgccaggtcctccttgaaaacgtcaggtgcctgaaagagaaagaaaggcaattgcaggagcagaaagaggctgaggaggaagggtggctcagagaccgcctcctttccatagagctgcagaaatccagcctctcaccacttatgcagcagatcaaagactccaccaagaacgtccttagactcttgctcagcaacccccaggctgctaggctcctgcagatgcagacacagggtagaagtgcagaagcccagaattttattgacagcctgatagagctccggggtttcctgtttgaaaaactactcactagtcccatggaagcgagggataaggcccagttcttaccaggatatcagtagacagaatagtaataaccaacaaatcattggatactcttgaaaaggaattggcggagagaatgaagaacaagaatgcagaggtggaaaaggagaaccttgtgatccaaaaactgaaaaaccacctgcaccaggtgctcaagtgctcagagaacagcctcgttcgcactaagcaggaggctgagaagcagcagaagcccgatttccgggcatcacaggccagggtggccaagatccagcaggagatcctgcagctgcagtcacagttttacaacctggtcatggagaaccgggaggcagagcaggcgctgaggaaggtgccccgggaagcagcgaggatgggccgagggggcccctggtgggggggatgggtgggactgttccatcactcctggaggtccagcagtgttgggcagggcaggactgcaccagctactcaggaagtggcttggtggaggggaagggcacaggagcagggaaggcccaaatccaagccagtgtctcctgggaggcaggaaggggcagcacacaggcctggggacaggggacaaactgggatcctgtcccagcattgctgcatgccagctttgtgaccttgggcaagttcctcaactcctgagaccccacagggataatacccacatcgtcagaggctgggtgccctgcaaaggaatgaagaagtagcatgtaaagctcaggctaattactcaactcctgcccagctgccgatttcacacctcagaaatgaaaatgctaacattggtcttaatggttgttacatgagaattacatgagatggtagtgagagagctggtgcactagtaagtgttcaataaatagctttcgaccgg

SEQ ID NO: 356155 - DNA, 1674 bp, Homo Sapiens
  misc_feature (418)..(690): n is a, c, g, or t
  misc_feature (1210)..(1246): n is a, c, g, or t
  misc_feature (1248)..(1495): n is a, c, g, or t
gagacaaaatggcttggtttaataagcagatcccgggaaggaaccgaatcataaaccataacaattttaccctaattaaatgaatccaaaccagaaagtttagatttgcttttagcattttcaaggtgtttagttttgttaatcatctaaataaaatgatttgttttgttgcaaaaaatgctctttccttctgaaaatatgtacaaactcatactcacaaaaacactcgcttcataattttcatacacctaaggtttatcttcagagtaatatgagtatatttaaccctatgtaaattaaaactaaaagtctatatgcttgcaggcagagagaccacatgttcaaagacagctatgtaacaaatatttattaataaactttcaggactcagaaatgtatggactttatttctatttcnnnnnnnnnnnnnnnnnnnnnnnnnnnnnnnnnnnnnnnnnnnnnnnnnnnnnnnnnnnnnnnnnnnnnnnnnnnnnnnnnnnnnnnnnnnnnnnnnnnnnnnnnnnnnnnnnnnnnnnnnnnnnnnnnnnnnnnnnnnnnnnnnnnnnnnnnnnnnnnnnnnnnnnnnnnnnnnnnnnnnnnnnnnnnnnnnnnnnnnnnnnnnnnnnnnnnnnnnnnnnnnnnnnnnnnnnnnnnnnnnnnnnnnnnnnnnnnnnnnnnnnnnnnnnnnnnacatattttatttgtatttttgtataattattataaccataaaaaatcctgtagtcaataacaatttaattgtacattttaaaatgaacaaaagcatataattacacttttggtaatacaaaaggataaatgctagaggtgacggacaccttatttaccctaatgtaattactgcatattgtaggcctgagttcaaaagatgccatataaggcataaatacatacacatactatatacgcacaaatacaaataacaaattccaagaagaaaatagagtacaaatttaatctgtgggaacaatattctttaactcatttgcagtttaaagccacgggcaaagtgattactagaaatgttattccactatatgccaaattgtgtattgttaccatcttgtagcttcacccttgagtaaggtaggatcgtttaaagttagtggcataataatgcttcattaaatgcacagtagtcttaacatggttaaaaaataataaaattaagttcacacataatctaacnnnnnnnnnnnnnnnnnnnnnnnnnnnnnnnnnnnnntnnnnnnnnnnnnnnnnnnnnnnnnnnnnnnnnnnnnnnnnnnnnnnnnnnnnnnnnnnnnnnnnnnnnnnnnnnnnnnnnnnnnnnnnnnnnnnnnnnnnnnnnnnnnnnnnnnnnnnnnnnnnnnnnnnnnnnnnnnnnnnnnnnnnnnnnnnnnnnnnnnnnnnnnnnnnnnnnnnnnnnnnnnnnnnnnnnnnnnnnnnnnnnnnnnnnnnnnnnnnnnnnnnnnnnnnnnnnnnnnnnnnnnnngtactgtatttcattacataaaagtacaattagtaaaataatatactattttattttaatatacttttaactataattatttccttgtgacactataatgtagaaaagtattgctctgaacatttaccttatacttaatagaggtttactacaaagaacctctccacttatattttcat

SEQ ID NO: 356156 - DNA, 1451 bp, Homo Sapiens
  misc_feature (102)..(102): n is a, c, g, or t
  misc_feature (110)..(110): n is a, c, g, or t
  misc_feature (287)..(287): n is a, c, g, or t
  misc_feature (301)..(301): n is a, c, g, or t
  misc_feature (454)..(463): n is a, c, g, or t
  misc_feature (679)..(679): n is a, c, g, or t
  misc_feature (829)..(845): n is a, c, g, or t
  misc_feature (1023)..(1023): n is a, c, g, or t
  misc_feature (1028)..(1038): n is a, c, g, or t
tattaatcatgtaactttgtatatgatgtatagcaaagatactgggaggttttgtttcatccttaaatcagaaatgaatgctagtttcatagctgggcaganccctcatncccaccccaaagttttccttttctttcccgttcccccaacccaaagatcagactactgttaagtttcaccacacaattggaattgcaaagacgggaggcaaatggagtgattttcatcaatggaattgcactgacagtgagtgtttcttataggattactaaattttttaatataanatgatttgtttaanaatcaggagttgatattaagtaccaggacattagttcggatgatttcatttttatttctacagtgttaaaagtgcacttatatgctggtttatttacgtcttgggaaaagagactgcaaattgaagggatgattgttactttttctttttttnnnnnnnnnnggttaaggagactttaagacttataaatgtttaagaaattataaacaaggttagaccctttgaaaaaaagtttagaagatattcttaaagtaaatttttatagtgttaattttgtaataatttatgttttactatattacagagctaactgaccagaatagtttcagaaacaatatgaaacttaggaaagtttaagcaatgtttatatttttaaanatgttctttgaattatgtttttattgtacatttcttcagactgaaaagtatgtacatatctttgttatttttgcacaattttgtcttgttcggtttcagaggtctgttgttttttataatttattttgagttgtaaaacttgcaggagtnnnnnnnnnnnnnnnnntctccacaacaaaataaccctctgatttataaactcttatagtcaaagagggaaaacaaaggttgagagattaagtggctgcttctgagaaataatgtctcaaggactaaaggagcaattcaataggtttagacattgtagctctctacatcttgaattggaagctggaataaagagncccannnnnnnnnnnaccctcatcgaatgctgcttactttgtcaaaagactggctatgaccaaggtgaggatatttctggaaaactgggcaaaaagggaaagcccacagtattcttccttggcagtcaaccacaggtttactttacaatgatgtattaaaaacttgcagcttgaaaaatggaatgcaaataaaaggttctctttgggtttgtcttaatggagttaaactggagcagcctataaaacatttttagggtgatgtcctctgggtccttctgttctgcacacccactcagtcttctctcccagccccttgactgcacacacccctctttgcctgaagatctcctgacttgtcgccagccatagaggctcgaaagctctggttgtgaagcataacgcaatgcatagacctgtcagccctttta

SEQ ID NO: 356157 - DNA, 1695 bp, Homo Sapiens
  misc_feature (9)..(9): n is a, c, g, or t
aagcgacanacagtgcctgtgctagtactagtcatatagctgagactcctgaaagtgcaccaccaatagcattgccacctgataaaaaaagtaaaatagaagtttctacagaagaagcaccagaggaagaaaatgacttttttaattcttttacaactgtattacacaagcagagaaataaacctcagcagaatcttcaggaagaccttccaacagcagttgaacctttaatggaagtcaccaaacaggagccaccaaaacctttaagatttcttcctggcgtgttgattggctgggagaatcaacctactactctggaattagcaaataaacctcttcctgtggatgatatacttcaaagccttttgggcaccactggtcaagtatatgaccaggcccagtcagtgatggaacaaaacactgttaaagaaattccatttttaaatgagcagaccaactcaaaaatagagaaaacagataatgtggaagtaactgatggtgaaaacaaggagataaaagttaaagtagataatatttcagaatctacagataagtcagcagaaatagaaacatcagtagtagggtcctcttccatttctgcagggtctttgacgagtcttagtctcagaggtaagccaccagatgtttctacagaagcatttttaacaaatttatcaattcagtcaaaacaagaggaaactgtggagagtaaagagaaaacattaaaaagacagcttcaggaagatcaagagaataatttgcaagataaccagacttcaaatagttctccatgcagatctaatgtaggaaaaggaaacatagatggtaatgtgagctgtagtgaaaaccttgttgctaatacagcgaggtctccacagtttatcaacctgaaaagggatcctaggcaagcagcaggacgaagtcagcctgtaactacttcagaaagcaaagatggagatagttgccggaatggagaaaaacacatgctgcctggcctgtcacacaacaaggagcacttaacagaacaaatcaatgtagaggaaaagttgtgttctgcagagaaaaactcgtgtgttcagcagagtgacaatttaaaagttgcacaaaactcaccatcagtagaaaacatacagacttctcaagcagaacaagcaaaacccttacaggaggatattttaatgcaaaatattgaaactgtgcacccatttcgaagaggatcagcagtagcgacatctcattttgaagttggaaacacatgtccatcagaatttccttctaaaagcatcacctttacttccagaagcaccagccccagaacaagtacaaacttttcacccatgaggccacagcagcccaaccttcagcatctcaagtctagcccacctggatttccatttccagggcctcctaattttcccccacaaagcatgtttggatttccaccacatttgccacctccattacttccccctccaggctttggctttgctcaaaatcccatgggtccctgggccacctgttgttcattctcccaggtcagccacagcgtatgatgggtcctctctcacaagcataaaggtatatatggcccgcagaatttttaccaagttaaaagacattccgaggccagaaaggccccatagtgacccttggggtaggcaagaccaacagcaactggataggccatttaatagg

SEQ ID NO: 356158 - DNA, 2124 bp, Homo Sapiens
  misc_feature (18)..(18): n is a, c, g, or t
  misc_feature (199)..(226): n is a, c, g, or t
  misc_feature (1707)..(1707): n is a, c, g, or t
  misc_feature (1714)..(1714): n is a, c, g, or t
actcggaaaagccgctangtccagatcgactagggagaggcttagatactttagtgtatttaaagagcatttcagttaactttttcagctatttttaaagtttgtgaatggagtgttattttggacattcttaaatatgaattctccaaaggcatttagccttgacttaatattaaatcctaaggattttatgtaaggnnnnnnnnnnnnnnnnnnnnnnnnnnnnaaatgcctaacttctgaggtgcataagcccgtggtttgtgtactggaactaaagcggaactcactgattcatattggatccccaggtataccttctgctggtagcatatggctggaaaaggccgtttgcctcacacattgtaacctgccttggctagaaaatgcttttaatgtctcaactctctcttttctgtgtcatgttttggtaggaaatctttaagattggcggacggaacaggtattttagtgagacacttctgagtacttgctttttcctttgacttctaaccaactaaaagagaaggaggtcttcatgttgatattttgcttggttttattttactgattttaaaaggtatatagaaaaatgtaggcctttaaaaagaaacagcatgtagttttttattttaatatgttccatagagtggataggcagacaggtactattgtaatgtattctgtatttaataatttaatatactctagaaagtagacctcatgcattcttttagcatgattttcttttaaactgcttttcattttaagggcacccgtggcggaagctggttttgcaaggactgtgtaagctgtatgcgttctagctgtatgcgttctgtagtcttttcttaggtgggtaacattttcaataacgcgcgcacagcacacaggggtgccctgagccgaaggagcaaaaaaagccaccgctcgtttctataatccagctttgcttttcacaggcgtgggatccaggatggtgtcctctgtgaggacttgaactctggggctttaattccactgtttaattttcaggtaccacagcagcaaagcacagagtgtgacctttttcatgtctgagctgattctgtttgctccacgtgcctgcttcttgctactgttcatttagtaatgggatcacctcaccatgccatgctctgggctctccctctctgtccatttctgttttgctttcctggctaaacccatctaccattcttaacactggtagctcctgtcccattccaagactcactctctcagaccttcccatctccctggctttccatgctcctctccctccacctcctggcttcaactgggtgagggccgtattcctgccactctgctccgcctcagccttgagaactccacgtgggctgggtgggaaggtgctgacgattttcacactgtgtttaccactccatcacctctcaaccttttgcttcgacaggtcttcactcacgatttattcctccaggtctttgattggagagagtaactttttaattctgttgttttgcagtttggctctgtaggagtgagtggcgattcaaagatgccggcgtcccgcagtgtgcggttcgtgcccttaaccacccgcttctttgtttcccgcccctctgctttcgcaggagctcttgtgcttgagttcagtgttagtggtagcgtggctcactccacttggaggtggcggccgtctgaccngtgtgtnactggctttgccgacggcctcccggccctgaatgcgtgtacactctgcgggctgcaccgggtggctctggttgggggcgaagctgtgttgactgggagagcgttggaaattgagacatggagagatgacgggagtgcgtttctctgggtttgatctccatcctgttttctcccagacacaccacacctaccttgggggaatgccgttgcctgttccacccctttgttcacttcgcgttaactgctgtggtaactttttcaggatctgtgtgaagaatggtaatgacgtagttgaaaggaaaatgtactgttgtgtgtttcatttgtgtgatttcgtaccaaaaaaatgtgtttgaactatattgtatgtaatttggaagtcgtgttaataaaaccctgcagtttccactc

SEQ ID NO: 356159 - DNA, 1107 bp, Homo Sapiens
  misc_feature (101)..(170): n is a, c, g, or t
  misc_feature (569)..(582): n is a, c, g, or t
  misc_feature (616)..(616): n is a, c, g, or t
  misc_feature (620)..(620): n is a, c, g, or t
  misc_feature (628)..(628): n is a, c, g, or t
  misc_feature (917)..(957): n is a, c, g, or t
gtggtgatcagctgggacagttcaggtagggcaggtgagggacccccgaggccctggagccttgtcctgggatgggtttgaagaactcatcactcatcacnnnnnnnnnnnnnnnnnnnnnnnnnnnnnnnnnnnnnnnnnnnnnnnnnnnnnnnnnnnnnnnnnnnnnnattgggaaggtaagcggaatgtgctcatagaccatcagacgcttgtcgaaggcaggtcctagtcatgtaattgcacaggacaaggaggtcagcgtgtgtgatggcagcatgctgtgccggcacatcgtggagtcctagaaactctctagtccctgcggctgttcccctcctctgctctctccctggagaggactgccagctcttaagaaacattcctggtgcggtgtctgcagtgccctttgtgggtgacttcaggcttcccgctttcgtggtgctcttcctgggattcgtttttttattaccctccctccctacttgtaggcctcagctatggcttgacgtaatcgcttttagacccaggttggcttcccttcattaagctatgatcctccaccccannnnnnnnnnnnnnaatttggagtgggagggaggggggtgggcgaganaaanctcgaaangtattattggtttttcaaaaaattagaggtgacgattctaccagggagttgactgataggagtgtgtgcagggcaggaaaggttcggaggcacccgactaccaccactcggaaagccgctagtccagatcgactagggagaggcttagatactttagtgtatttaaagagcatttcagttaactttttcagctatttttaaagtttgtgaatggagtgttattttggacattcttaaatatgaattctccaaaggcatttagccttgacttaatattaaatcctaaggnnnnnnnnnnnnnnnnnnnnnnnnnnnnnnnnnnnnnnnnnaaatgcctaacttctgaggtgcataagcccgtggtttgtgtactggaactaaagcggaactcactgattcatattggatccccaggtataccttctgctggtagcatatggctggaaaaggcgtttgcctcacacattgtaactgccttg

SEQ ID NO: 356160 - DNA, 1181 bp, Homo Sapiens
tatcttcacagtaggcagagtctccctggacagagatgtaaccactcttgcactcacaagtagcttttgtattccagtttttgcactctgagttttcaccacatttaggtccttctgcacaaaagttatgacctctacagacacggcagcactgattctcaggaagaatgtgatccttttctgagcagttcaaaggaggacacatttctgtaatttttactaaaactccacctcggcattcccgacagctcttggttaaaatccgctggccttctgcaagaacttttcctccatagatacattttggtcggcagaccttacagcactggccagcaatgtgcactgggagggagtctggggagcaattgagagggggacaggacattcttcggcattccacggcaccacttttgcaagtgcagttcctgcaatggtcaccatctacccaagagtcttgatctcgatagagcagtccactcacttgacaagtcttctcacaatgacagttttccaattgactaagtcttgtctctgcataatttagttttgcagtcatcttggccaaaagctcttgtaaatccattattccttgcaccaggcttaagaaatcactgcaggttgggcaagtgtgatttagatttggacactgtgttatatatccattcggcataaagatgatcttcccatcttggatgatccctttgaataagccatgcttttggttgcgctggccaagccataaattgattcctgggggaaggttggtatctggagggtctatcacacgctcataaatcctgttacagtcgacatggagcaggagatgagaggcgctaactgacagtgcaaccttgtgccattgtccatctgccatgcggtaaggaagtgcctctgtccttggcttcccattgtgtatgtagtgataccgaatctcatccctcaggccactgctctccagttcaaaatagctgtgctccagttctcgaatggacagtatcactcctgaagtagatggcttctgctgtacagtggccaaaatggtgaattcactcttgttccggaacagctgaattaatttctcactcacatgaggagctgcatggatctctctttctatgtcttgaaataaaaatgctttgctggcattgtgcattccagacacctgagcaactccaagggtg

SEQ ID NO: 356161 - DNA, 1612 bp, Homo Sapiens
tttatttgaaaagttttttgagctctccagctggaataccaaactggtgatttcgcagatgtttttatttaggacaaaaaaaagtgaatttcgtgaaaacactcaagtaattaacagtagagaaatacggcaaacatcacagaggtggtaacagatatctggacccctcagctgggatcaagacacaaatgagcatggagcttatgactcctttcacacgaaggagctagagttgatgttccctgttgtctttgttgtcttcacctacagatggccatgactacgcctcgagcagcctaccagcaagtgatccagccggctctgcctggacagcccctgcctggagccagtgtgagaggcctgcaccctgtgcagaaggttatcctgaattatcccagcccctgggaccaagaagagaggcccgcacagagagactgctcctttccggggcttccaaggcaccaggaccagccacatcaccagccacctaatagagctggtgctcctggggagtccttggagtgccctgcagagctgagaccacaggttccccagcctccgtccccagctgctgtgcctagaccccctagcaaccctccagccagaggaactctaaaaacaagcaatttgccagaagaattgcggaaagtctttatcacttattcgatggacacagctatggaggtggtgaaattcgtgaactttttgttggtaaatggcttccaaactgcaattgacatatttgaggatagaatccgaggcattgatatcattaaatggatggagcgctaccttagggataagaccgtgatgataatcgtagcaatcagccccaaatacaaacaggacgtggaaggcgctgagtcgcagctggacgaggatgagcatggcttacatactaagtacattcatcgaatgatgcagattgagttcataaaacaaggaagcatgaatttcagattcatccctgtgctcttcccaaatgctaagaaggagcatgtgcccacctggcttcagaacactcatgtctacagctggcccaagaataaaaaaaacatcctgctgcggcggcggagagatggaagagtatgtggctcctccacgggggcctctgcccacccttcaggtggttcccttgtgacaccgttcatccccagatcactgaggccaggccatgtttggggccttgttctgacagcattctggctgaggctggtcggtagcactcctggctggtttttttctgttcctccccgagaggccctctggcccccaggaaacctgttgtgcagagctcttccccggagacctccacacaccctggctttgaagtggagtctgtgactgctctgcattctctgcttttaaaaaaaccattgcaggtgccagtgtcccatatgttcctcctgacagtttgatgtgtccattctgggcctctcagtgcttagcaagtagataatgtaagggatgtggcagcaaatggaaatgactacaaacactctcctatcaatcacttcaggctacttttatgagttagccagatgcttgtgtatcctcagaccaaactgattcatgtacaaataataaaatgtttactcttttgtaaaaaaaa

SEQ ID NO: 356162 - DNA, 1657 bp, Homo Sapiens
  misc_feature (443)..(443): n is a, c, g, or t
gatgttagtaccttgtaggtttacttcataatacataacctctaatccatgtccatcttcttgtttctgcttttaattctgccatttcctcttaaaatttagggtttaacaaagacaacagggctgtttgccaaatcgcagctattaattcacagcatagaaaagtcaaagctatagcaaaaaattgctaatctgcacaactttaaaaaatagttcagtacatttttgttataaaattcatttacaggaggttattcacatgtacttgtcaaatttactcctgataattcacaaaaacatacaactcaacaaactgtgcacaataaatccaaggcaaattatatacaaagaaacaaaacaagcttttaagtagcacatattcatttgaaataactaatattgaaagaagacagggaactttcttttaatgccatggcaaagancgaagcgaagagcccacacttcacaccttgtaaaaagaatagccctgttcaacaacgctgcgctgacagccacatcaggaggggccacggtgaacataggaaatggctttggcaaatacctggtaccaactggaacgagtgaagtttcaaaagtaatgtgaggtacaactgcattccgctgtgaaaggccgtcacaggacacaggctcgtctgttagaaaggatgatctagttctaccattaattcttgcagaatcagatctgctgagtggtgaaccaacaggtgaacacaacgtaagaacaggcatcaaacttcactggaaataatattgttcagtgtgtggcggcaaaatatgcattttagagaaaacttatttctcaaatcatgtgttaatagtattaacatgagcagcgtgagagacatcctgaccccaacgtttttgccatgcctccctttagaagcttaggagtttgtacattccctaagtggtcagcactacaagtgtctgctaaaatgggcacttcatcaagataacaggaaagcaaacttaaagtaacgagatttcttcccaaaggcacatggaagaagctgatagagcccttgacccagacagaatgggacccatccctacccgtcctgaactgtcgcacactgcatggccaaagacaaactctccacccccacagaggaagcagtggctgactctggggacaaagcactccaggaagtcacctgctccctgggtttcaggagtattcagttgaccgtctggacaccagtgagggagacacaggtaatgaaatcaaatgctcaaacttttggcaaccgaaagttgttttttaaagctctttataatctgctcaagtagaatttctaacacaaaacccttttttgcttaaaaagcagatgacaaaggaaatgtcaaataatgcacatgaatcttcagctattttcctacccccaaatgagatatggggctgcacagcattcactacagatccctagtttttacaactgtcaactgtacattctcatgtttaggatactccagtttctgcgtggatatttggaaaactggacaaaatcaggcagcccacccctcccttgtcccgagcttcctcgatctccattcaccatgaccaattttttcccccacaaaagcactatcacctctaatagtaggtggaaacacctattcagatattctaaacagc

SEQ ID NO: 356163 - DNA, 457 bp, Homo Sapiens
  misc_feature (21)..(21): n is a, c, g, or t
  misc_feature (80)..(80): n is a, c, g, or t
  misc_feature (98)..(98): n is a, c, g, or t
ctttgcccaggccattaaagnaaggtcccccgtcctccttccaaaattagttatctccaaatgaaatatgtgcctacctnaaaagccttgttttgtcnccttgtatataaattgcccttggatttattgtgccacagtttgttgagttgtatgtttttgtgaattatcaggagtaaatttgacaagtacatgtgaataacctcctgtaaatgaattttataacaaaaatgtactgaactattttttaaagttgtgcagattagcaattttttgctatagctttgacttttctatgctgtgaattaatagctgcgatttggcaaacagccctgttgtctttgttaaaccctaaattttaagaggaaatggcagaattaaaagcagaaacaagaagatggacatggattagaggttatgtattatgaagtaaactacaaggtactaacatcaaaaaaaa

SEQ ID NO: 356164 - DNA, 1521 bp, Homo Sapiens
  misc_feature (990)..(990): n is a, c, g, or t
  misc_feature (1336)..(1336): n is a, c, g, or t
  misc_feature (1466)..(1466): n is a, c, g, or t
cttactgtacatcagagaattcatactggagaaaagccatataaatgtagtgagtgtgggaaagcttttagcaaaggctcgaatcttactgcccatcaaagagtacataatggaaagaaacccaatagtgtggtaagtgtggaaaagcctttagatcatatgaatccctatacatgtgagaaatcttacagaagagaagcagtgtttatcacggtaaacttcattcatagatcctcccttatttaacatcagaaaaatgtatactggggaaaagttgtatgaaggtggtgaacatgggagacttttagcaatgatgcagatttttttattagagtttatactgtagagaaatcatatgaagtcaataaatgtgggaaagcctttgtcagtattaatcccttaattgacctaagtatactcacactaggaaaaatctgtgtacatgtagcaaatgtgggaaagactataggcaataggaatctcctgcaaactcctacaggagaaaagttgtatgaatgtggaaactttagaaattgaaggaatttttcagttccaagtgcatcccttattctataggaaataaactggagacaaatctcatttaagagatgcagcaaagtgttcactaagagtgtttatcttgccagacataagaagatgaatggtagagcaacctgaaggatttagaaattacatataaatctttgcagttatgctatttgtaaacaggattatataggagagcaaataaacataagtatgcatttcttagagcagtagcttgcagtttcagttgagttctacttagaaattctttttagctagtgggcatgtgaagatatttagtcacccagaggagccagtaaatgttataatgttaaaaattaaagctgcaaaagaaataaaatggtgttaataaaaatttggcatctaataaaatcattttgtatatcatgaactctttctctgtaactgttaccgacaaaaaanaatttcactaagattagccttagtatagcctttacccggagactagcaaacgtcgagaagaatggcctgctctttatactaagaatagcaggattttggtgaggattattgagtccatacccactaggcttaattaaatacatttcaagaacatttactgagcattactcatgtgtattacacagggatgggataaaggaatctagtagttctgagctctagtgctgtgtcgaaatcactggaaggacgtgttaaagcacagattgctaagcctcagtcctagagtttctgtatgagttgatttgaatttgcatttttcacacgttcttaggggacactaacactngttgtccagaatataataataatggtatggtgtcactgacaacatattgtttcctcaatcttacctataaccatttcttgagcatcttctgtggacttaagaacactcatactccttagagctcgagatngtgtgtgtgaagagcattagctttggggtcttgtccctgggttaaatcccagtca

SEQ ID NO: 356165 - DNA, 1175 bp, Homo Sapiens
  misc_feature (897)..(897): n is a, c, g, or t
  misc_feature (900)..(900): n is a, c, g, or t
  misc_feature (902)..(902): n is a, c, g, or t
  misc_feature (1007)..(1007): n is a, c, g, or t
  misc_feature (1018)..(1018): n is a, c, g, or t
  misc_feature (1022)..(1022): n is a, c, g, or t
  misc_feature (1055)..(1055): n is a, c, g, or t
  misc_feature (1080)..(1080): n is a, c, g, or t
  misc_feature (1099)..(1099): n is a, c, g, or t
cggggtttcgctgaagagcttatccaagggccgggaattgtttctttaagccgggaaaataaggttcggggtgtggccctccaaacggtacaggccgggcccttaaagcccgccggtaaatagcacaaaacggggtcggtccggtttgttaagtggtcggttcttggagttgcggtcttttgctagcctgatcgcaagttttagcttccgcggcttcttaagccctgggggccgccgcttgacccgcagcccgccgcgggccgcagagcccatgagggcgcgggcaccgccgccgcctccgcggcgtcgccgtcgtcccggagcgccccgagctggcgcgggcatggccgcggcatgagcgtggagccgccgccggagctggaggagaaggcggcgtcggagcccgaggcgggagccatgccggagaagcgcgcgggcgcgcaggccgcggggagcacctgggttctacatgaaacattttctcaacacacattcctcatgaatggtctcattcaaggtgtaaagggcctgctctcttttttgagtgccccactcattggtgccctgtctgatgtgtgggggaggaagccctttctcctcggcactgtattctttacctgcttcccaatcccactgatgaggatcagcccatggtgagtgacttggcccttcacctcctgactgcttgttttgagtcacatgtaaattatatttgcagagcacttcttaactattacaaagcagttgtgcttgtgttttcatttgatctctctggtaatactgaaaaccagtgtggacagttgtcattatatccataaaataaatcgtctaatgaacacacctagaattaagtcacagataagtcacctagataaagaaaatttaatatctcacatnacnanaaaaaacatactacatactaaaaacatgctagaagaaaactaggatgaaataatcttataacctcctataggcagagtccccctaatcctaaatccacagccagnaaagaataaanaaanaatctctacaaataccaaaaaacattagcatgnacaaaatataccctaacaacaaaanacaaataactacaaaaaancttcaacaacatataaatcaccatacttcactgacaaagcgcccaatcctcagcccggccatggtcctcacgcctc

SEQ ID NO: 356166 - DNA, 1065 bp, Homo Sapiens
  misc_feature (87)..(87): n is a, c, g, or t
  misc_feature (142)..(142): n is a, c, g, or t
  misc_feature (168)..(168): n is a, c, g, or t
  misc_feature (186)..(186): n is a, c, g, or t
  misc_feature (189)..(189): n is a, c, g, or t
  misc_feature (223)..(223): n is a, c, g, or t
  misc_feature (246)..(246): n is a, c, g, or t
  misc_feature (257)..(257): n is a, c, g, or t
  misc_feature (288)..(288): n is a, c, g, or t
  misc_feature (296)..(296): n is a, c, g, or t
  misc_feature (308)..(308): n is a, c, g, or t
  misc_feature (315)..(315): n is a, c, g, or t
  misc_feature (334)..(334): n is a, c, g, or t
  misc_feature (358)..(358): n is a, c, g, or t
  misc_feature (364)..(364): n is a, c, g, or t
  misc_feature (706)..(934): n is a, c, g, or t
  misc_feature (936)..(936): n is a, c, g, or t
  misc_feature (938)..(938): n is a, c, g, or t
  misc_feature (944)..(944): n is a, c, g, or t
  misc_feature (947)..(947): n is a, c, g, or t
  misc_feature (966)..(966): n is a, c, g, or t
  misc_feature (971)..(984): n is a, c, g, or t
  misc_feature (987)..(987): n is a, c, g, or t
  misc_feature (989)..(989): n is a, c, g, or t
  misc_feature (1003)..(1003): n is a, c, g, or t
  misc_feature (1012)..(1013): n is a, c, g, or t
  misc_feature (1016)..(1016): n is a, c, g, or t
  misc_feature (1022)..(1023): n is a, c, g, or t
  misc_feature (1026)..(1026): n is a, c, g, or t
  misc_feature (1030)..(1030): n is a, c, g, or t
  misc_feature (1039)..(1039): n is a, c, g, or t
  misc_feature (1043)..(1043): n is a, c, g, or t
  misc_feature (1050)..(1050): n is a, c, g, or t
  misc_feature (1052)..(1052): n is a, c, g, or t
cgggatgttctcgaggcgggagctgaggtgcggggtggggcctccaaccgtgcagcccgcccctaacgccgccggtaactgcaacantcggggtcggtgcggtttgctaagtggtcggttcctggagctgcggtcttctgcnagcctgaaccgcagcttcagcctccnccgcctcctcaaccctcngcnccgccgcctgacccgcagccgccgcgggccgcanagcccatgaaggcgcgggcaccncgccgcctccncagcgtcgccgtcgttccggagcgccccganctggcgcnggcatggccgcngcatgancgtggagccgccgccgganctggaggagaaggcggcgtcggancccgangcgggagccatgccggaaaagcgcgcgggcgccaggccgcggggagcacctggctacaaggctttggaccaccaagtgcgtaccatgctgctattgtcatcttctcttgaattctttgcgtggggccttttgacaactccaatgttgactgttctacatgaaacattttctcaacacacattcctcatgaatggtctcattcaaggtgtaaagggcctgctctcttttttgagtgccccactcattggtgccctgtctgatgtgtgggggaggaagccctttctcctcggcactgtattctttacctgcttcccaatcccactgatgaggatcagcccatgnnnnnnnnnnnnnnnnnnnnnnnnnnnnnnnnnnnnnnnnnnnnnnnnnnnnnnnnnnnnnnnnnnnnnnnnnnnnnnnnnnnnnnnnnnnnnnnnnnnnnnnnnnnnnnnnnnnnnnnnnnnnnnnnnnnnnnnnnnnnnnnnnnnnnnnnnnnnnnnnnnnnnnnnnnnnnnnnnnnnnnnnnnnnnnnnnnnnnnnnnnnnnnnnnnnnnnnnnnnnnnnnnnnnngncngttcgnggntatgtaggcctagggtgtngatcnnnnnnnnnnnnnntgntnctaaggacaggggnttttttctnntcntttttnngangggnccccccgtncccnggcgggngncgggacaatcttg

SEQ ID NO: 356167 - DNA, 700 bp, Homo Sapiens
gctacaaggctttggcccaccaagtgtgtaccatgctagctattgtcatcttccttgaattctttgcgtggggccttttgacaactcacaatgttgaatgttctacatagaaacatttatcatcaacacacattcctcatgaatggtctcattcaaggtgtaaagggcctgctctcttttttgagtgccccactcattggtgccctgtctgatgtgtgggggaggaagccctttctcctcggcactgtattctttacctgcttcccaatcccactgatgaggatcagcccatgtttaatgcaaataacgtatacgatagataaacgtccctacaacatgatctttggaatgaactaagacaaaggaaactctgaggaaggaccatggcctgagaggtggaattcatccttccgaggactgagatgaggacggaaaatgaaccatcggggggattgacggtgaagatgctaatacctgcccagcatcgaccctagtgcgggtcccaagaccatccccctgtgcaggctccaccaccgctgtgctaactggactgcggcagaagagtgggtgtgtgccaggtttctgctgggccctgcagctcctccccccagccccatgtgatgtgcccctggccattgacactcagttcgagggaaggcactggggtgtacactcaaagacctaaaccagggtgggtgcg

SEQ ID NO: 356168 - DNA, 460 bp, Homo Sapiens
aaagcttagacgaccaagtgtgtaccatgctgctattgtcatctatccttgaatactttgcgtggggccttttgacaactccaatgttgactgttctacatgaaacattttctcaacacacattcctcatgaatggtctcattcaaggtgtaaagggcctgctctcttttttgagtgccccactcattggtgccctgtctgatgtgtgggggaggaagccctttctcctcggcactgtattctttacctgcttcccaatcccactgatgaggatcagcccatggtggtattttgcgatgatttctgtgtctggagtcttctcggtcacgttttctgttatatttgcctatgtagctgatgtcactcaggagcacgagcgaagtacagcttatggatcggtctcagccacctttgcggctagtcttgtcagcagcccggccatggagtcaatcgcagggga

SEQ ID NO: 356169 - DNA, 2075 bp, Homo Sapiens
  misc_feature (152)..(152): n is a, c, g, or t
  misc_feature (154)..(154): n is a, c, g, or t
  misc_feature (165)..(165): n is a, c, g, or t
  misc_feature (175)..(175): n is a, c, g, or t
  misc_feature (179)..(179): n is a, c, g, or t
  misc_feature (183)..(183): n is a, c, g, or t
  misc_feature (200)..(200): n is a, c, g, or t
  misc_feature (204)..(204): n is a, c, g, or t
  misc_feature (207)..(207): n is a, c, g, or t
  misc_feature (212)..(212): n is a, c, g, or t
  misc_feature (219)..(219): n is a, c, g, or t
  misc_feature (222)..(238): n is a, c, g, or t
  misc_feature (261)..(261): n is a, c, g, or t
  misc_feature (267)..(267): n is a, c, g, or t
  misc_feature (271)..(271): n is a, c, g, or t
  misc_feature (273)..(273): n is a, c, g, or t
  misc_feature (276)..(276): n is a, c, g, or t
  misc_feature (278)..(278): n is a, c, g, or t
  misc_feature (282)..(283): n is a, c, g, or t
  misc_feature (287)..(287): n is a, c, g, or t
  misc_feature (298)..(298): n is a, c, g, or t
  misc_feature (302)..(302): n is a, c, g, or t
  misc_feature (304)..(306): n is a, c, g, or t
  misc_feature (325)..(404): n is a, c, g, or t
  misc_feature (416)..(446): n is a, c, g, or t
  misc_feature (449)..(449): n is a, c, g, or t
  misc_feature (520)..(520): n is a, c, g, or t
gccgagaactgggcgccacagcccgcgcgtcccgctgcgccccgcgcgccccggggtctatggagctgcccctccgcgccgcccggccggccccacgccgcgcccggagcctgctctgcggccaagtaatcggactggcggtcctgcggganantcggggctcgnagcccgcctnaacnaacnccccggaaatggcggcncccnatnccggnagtgganagnnnnnnnnnnnnnnnnnacgtggaaggccgcggcgccacntaaaanaaananttnanaaannggangaagaaaaaanagcngnnngaaaaatgcataaaggagnnnnnnnnnnnnnnnnnnnnnnnnnnnnnnnnnnnnnnnnnnnnnnnnnnnnnnnnnnnnnnnnnnnnnnnnnnnnnnnncttataccaatnnnnnnnnnnnnnnnnnnnnnnnnnnnnnnngantacataaaaaacctcagcgtcacctacctccgcctgcgccggttcgccgcgctgggtggcgccgccctggngggctgagagccgcggggccgccagctggcctcgccccaggccgccgcggccccgcagcgctggtctccgaagtcttcgagcagcacctgggaggtcacatcttgcagtccctggatggctttgtgttcgccttaaaccagaaaggaaaatccctctacatctcaaagacagtccccatctatctgggtctctcacaggtggagatgacgggcagcagcgtcttcgactacattcaccctggggaccactcagaggtgctggagcaactggggctgcggacgccgacgcccggccccccaaccccgccctccgtctcctcttcctcctcctcttcctcttcgcttgcagatacccccgagatcgaggccagcctcaccaaggtgcccccctcctccctggtccaggagcgctccttctttgtccgcatgaaatccacgctcaccaagagggggctgcacgtcaaggcctcagggtacaagcaggtcatccacgtgactgggcgccttcgggcccacgccctgggccttgtggccctcgggcacacgttgcccccggcccccctggctgagctgccactccatggacacatgatcgtcttccgtctcagcctgggtctcaccatccttgcttgtgagagcagagtcagcgaccacatggacctggggccctcagagctggtgggccgcagctgctaccagtttgtccacggacaggacgccacgaggatccgccagagccacgtggacttgctggacaagggtcaggtgatgactggttactaccgttggctgcagcgtgccgggggcttcgtgtggctgcagtctgtggccacagtggctgggagcgggaagagccccggggagcaccatgtgctttgggtcagccacgtgctcagccaagccgagggtggccaaactcctttggatgccttccagcttgcagccagcgtggcctctgaggaggcatccagcccggggccagagcccacagagccggagcctccgacggaagggaagcaggctgccccagcggagaacgaggccccccagacccagggcaaacgcatcaaagtggagccccgcccgagggaaaccaaaggctccgaggacagtggcgacgaggatccctgccagccacccggccacaccgaggcccgagttcacctctgttcatccgggcaggggtcctaaagcaggatccggtgcggccatggggcctggcgcctcccggggaccccccgcccaccctcctgcacgcgggcttcctgccgccggtggtgcggggcctgtgcacacccggcaccatccgctacggccccgcggagctgggcctggtgtacccgcacctgcagaggctgggtccgggccccgcgctcccggaggccttttacccgcccctgggcctgccctacccggggcccgcgggcaccaggctgccgcggaagggggactgaggactggcagagctgccggcgccggaccctgcgacaaccggggtcccccaggacagtaggcccggctctgcccgtagccctgagaattaaacgccggctct

SEQ ID NO: 356170 - DNA, 822 bp, Homo Sapiens
atcaggccaaatcggccgagctcgaattcgtcgagaggcggaggccgaggtgggcgccgagagctgggcgccacagcccgcgcgtcccgctgcgccccgcgcgccccggggtctatggagctgcccctccgcgccgcccggccggccccacgccgcgcccggagcctgctctgcggccaagtaatcggactggcggtcctgcgggagactcggggctcggagcccgcctgagcgagccccccggagatggcggccccctatcccggcagtggcggcggaagcgaggtcaaatgcgtgggaggccgcggcgccagcgtcccctgggactttctacccgggctgatggtcaaggcgccgtccggaccgtgcctgcaggcgcagcgcaaggagaagtcccggaacgcggcgcgctcgcggcgcgggaaggagaacctggagttcttcgagctggccaagcttctcccgctgcccggcgccatctccagccagctggacaaggcttccatcgtgcgcctcagcgtcacctacctccgcctgcgccggttcgccgcgctgggggcgccgccctgggggctgagagccgcggggccgccagctggcctcgacaccaggccgccgccggccccgcagcagatggtctccgaagtcttcgagcagcacctgggaggtcacatcttgcagtccctggatggctttgtgttcgccttgaaccagggaagggaaaattcctctacatctcagagacagtctccatctatctgggtctctcacaggtggagatgaccggcagcaggcgtcttcgactacattcaccctggggac

SEQ ID NO: 356171 - DNA, 2233 bp, Homo Sapiens
  misc_feature (1079)..(1079): n is a, c, g, or t
  misc_feature (1141)..(1141): n is a, c, g, or t
  misc_feature (1162)..(1162): n is a, c, g, or t
  misc_feature (1170)..(1170): n is a, c, g, or t
ggctagtggccgcttgggcacgagagccatggtgtattacatgtccacgaccatcattgctgcagtactgggggtcattctggtcttggctatccatccaggcaatcccaagctcaagaagcagctggggcctgggaagaagaatgatgaagtgtccagcctggatgccttcctggaccttattcgaaatctcttccctgaaaaccttgtccaagcctgctttcaacagattcaaacagtgacgaaaaaagtcctggttgcaccaccgccggacgagaaggccaacgcaaccagcgctgttgtctctctgttgaacgagactgtgactgaggtgccggaggagactaagatggttatcaagaagggcctggagttcaaggatgggatgaacgtcttaggtctgatagggtttttcattgcttttggcatcgctatggggaagatgggagatcaggccaagctgatggtggatttcttcaacattttgaatgagattgtaatgaagttagtgatcatgatcatgtggtactctcccctgggtatcgcctgcctgatctgtggaaagatcattgcaatcaaggacttagaagtggttgctaggcaactggggatgtacatggtaacagtgatcataggcctcatcatccacgggggcatctttctccccttgatttactttgtagtgaccaggaaaaaccccttctccttttttgctggcattttccaagcttggatcactgccctgggcaccgcttccagtgctggaactttgcctgtcacctttcgttgcctggaagaaaatctggggattgataagcgtgtgactagattcgtccttcctgttggagcaaccattaacatggatggtacagccctttatgaagcggtagccgccatctttatagcccaaatgaatggtgttgtcctggatggaggacagattgtgactgtaagcctcacagccaccctggcaagcgtcggcgcggccagtatccccagtgccgggctggtcaccatgctcctcattctgacagccgtgggcctgccaacagaggacatcagcctgctggtggctgtgnactggctgctggacaggatgagaacctcagtcaatgttgtgggtgactcttttggggctggnatagtctatcacctctccaantctgagcnggataccattgactaccagcatcgaagtgcataaagatattgaaatgaacaagactcaatccatttatgatgacataaagaaccacagggaaagcaactctaatcaatgtgtctatgctgcacacaactctgtcatagtagatgaatgcaaggtaactctggcagccaatggaaagtcagccgactgcagtgttgaggaagaaccttggaaacgtgagaaataaggatatgagtctcagcaaattcttgaataaactccccagcgtatcctatggtaactgatgatataaacaagctttctttaaaaaggaaaaaaatgcgtatatttctgtgtttacttaatctgttagccgaggcttagaggagctcttgtgagtcagtgatgacaggcacggtgctgtgtctttgccaaataatgctttataaccgtctaattttctcacttgtattattatttgaatggatgctgctggaggaatcagttggaattgaagacacgttcttgccagcttcccttttctcccaagatgcagaaatgtggatgctcttttcccaggggacatgagtagagcagtgtggtacactccagggacttgggaaaatgagcaaacacacagcgtgtcattccttaaagtgttctccatgtctcgccttgttatgcacaagagattctattaaaagcctctagaagtaactccccttaaaatgtctagtaaagcttgcacatggattgattaaaagcaaatacctgtcttagggaattctgacaatttatcttccatatgctctttaagtaaaatgtttcaaagacagttttaaagggagccatgctcttaaaggcagttgattaaagaacctgttacatctctgccttaccctgtgtaatctgtgagaacaatggttgaaatttcaaagtatgtttcattattctttctaaatttgataattgattaggaagtattttatatataaccactgtagatattgacaaaagtaagagagcacagtcaacataaagtttaaccagagttaaatattcaaattatttatgttcgtgcagttg

SEQ ID NO: 356172 - DNA, 649 bp, Homo Sapiens
  misc_feature (618)..(618): n is a, c, g, or t
cttgttaaggccctgacccctgactcccagtttcagatctctgctctctgacaggtggaagggggagaatgtggccacaaccgaggtggcagaggtcttcgaggccctagattttcttcaggaggtgaacgtctatggagtcactgtgccagggcatgaaggcagggctggaatggcagccctagttctgcgtcccccccacgctttggaccttatgcagctctacacccacgtgtctgagaacttgccaccttatgcccggccccgattcctcaggctccaggagtctttggccaccacagagaccttcaaacagcagaaagttcggatggcaaatgagggcttcgaccccagcaccctgtctgacccactgtacgttctggaccaggctgtaggtgcctacctgcccctcacaactgcccggtacagcgccctcctggcaggaaaccttcgaatctgagaacttccacacctgaggcacctgagagaggaactctgtggggtgggggccgttgcaggtgtactgggctgtcagggatcttttctataccagaactgcggtcactattttgtaataaatgtggctggagctgatccagctgtctctgacagtaaaanaccccgaaaacccaacattcccccccctggt

SEQ ID NO: 356173 - DNA, 906 bp, Homo Sapiens
  misc_feature (511)..(651): n is a, c, g, or t
aatatccacccgtgttgggaataaagggaagaaaccgcgtaaaaaaattgcgtacgataatacggcgaaaaggaataatttaaggggaaacgaaagcaacgttgttaaaacgagagcgtgttaagcggagaactttacagagaacattgtaggaagtactgtaaaaaaagcgggaggggaaacttaatcgtctaggcaaagttaacatggacggaagtggtgtaaaaacaagtgatttcggagggctttctcgatgtaaagtcagtaatcgttacaacgtgggtagcgtgtttgcaaagctaaccacgtttaatgttggttaagctgaactataggcaactaaacatggataaacgggaatgaaggctgaatcggtgcctgcttccccctgttttcccagcattacagcaaataatttattgtataatcagcttaatggttttaaaatgcttaaaggcatggttttattccttattactttaaacctgtagttttcggcactgacagcacnnnnnnnnnnnnnnnnnnnnnnnnnnnnnnnnnnnnnnnnnnnnnnnnnnnnnnnnnnnnnnnnnnnnnnnnnnnnnnnnnnnnnnnnnnnnnnnnnnnnnnnnnnnnnnnnnnnnnnnnnnnnnnnnnnnnnnnnnnnnngtagactaatggtcgtttttcctgtttaaaggagataactaatttgagctgaagcaatgcttcttaattagctttgtttttgttttgctctgttggtggctttgttacaactgaattattgtgttattactatttcattgttaaagaaataaagtaagcaacttgtgatgtgagtatcagtgattaagttaactaactcttgtactgattccagaatgttggtttgcaattgagtaaactggtcttgcttgcatt

SEQ ID NO: 356174 - DNA, 870 bp, Homo Sapiens
cccacccctgtttgtaaggccttcccaccttccacaattccaggtgtaaatccagtgtttgggtcctcaaaggggtccatttatcttttatataggaatacatttctagggcttccttcaagcccactctcttcaccctatttttttcttatcttaaattgagagaaagagaattaatcttatactttgtcaaaacattttctaccatatttccagatgacatctgcgcttgaagagtcaaaggaatctgtgtctaatatcctgtttttaactgctgtaggggcaggatggaaaggatgatgggggctgccacaccactgattggccttttctttcacgtgattcatccttcctcattgtggcaaggagtttctttctctttttcttcctcctttgggatcattgtgtatgaaaagaaaaactttaaatgacaaacccagactccaggtgccttgcaaaggttgaaggccagccaggattgctgctgctgctgctactcctgccaacacccctttcattggcatgacggaatgaaaggatgcatgtctccacttcctgaccctccgcccacttccttctccctccaccacccccagtcgtcagctccttccctcatttatttttgttaagttgtgtgaattatttttaacccatttatcctgtttgtgcatagggtttttaagaagaaacagcacagtgcaacgagcaaatctttttggggtgtgtgggaagcaagggagggaggacatggagaaaagttctttaaacaaatagcaaactattgaacatgtgtaaaatcctgtatcatttatgaaatatgtataaaaagcaatgtaccttctggaacaataaatacttattcaatttttg

SEQ ID NO: 356175 - DNA, 928 bp, Homo Sapiens
  misc_feature (270)..(278): n is a, c, g, or t
ccactttggagaggtgtgaaactggaaagaatttgtttagggtccaaaaggtgcaagacacagaattgggcaaatgtagtgaaaatccttttgtgtacaacaaaagtgtttgaaaaattaagccaggcaatggtggaagtaatgcctgaaggtcccaaatgctattgtagaacttaggcagggggaatcacttgaacccaggagttaaagggtggcagtaagcttccacaacacttcagcacgggtgatagagcaagaccctgtgtcttnnnnnnnnntttagtcagttattaggcttatcagttagaatgttttaattaaatccttctaacaatttaggcaattatacattaattttcatcaaaatttatccagtcaaaaaaatttcatgaatactccagatgtaagagagtcacaattttctacgataaatcagacatcttatttctagggtgattgagggaggtggaaagcgcaggaggaagccagtgaagaggacaatggaatgctgagtcaatgacattgacttgtgttcctatctgccatcttgggtgtgggtctttatatgtggttacagatcctttagtttgagggaggtgaggtagagaaataggatgccagcaggtaggaggccgatgtcagtcctcccagcaaagctgtgtcatttatctgaatggaaatgagaaaataaatatgtactcaataagtcacatttcccagaaatgtgattgagattctcaaaaaatagactcagattcttggctgtctgtttaaccaatcacgatatgggatttgagaaataaaatttagggaattttaagagacatgaaagctactaggtcagggaaaataaaaagcttaaataactatttttattgtccagatcctctactgtaatagattaactatgttcaataaatttctagac

SEQ ID NO: 356176 - DNA, 1283 bp, Homo Sapiens
tcctttgaggcttctttagctctagttctctgacacttcagcctatatcacagctaacttcctcagtctcatctattccttatgctccagcccctggcaatttgcctcaagatgggggtttgaaaataactttacctgactcaaggagtgtctggagcacctcctagtctaagtctgcaagctccagttcttgcctaaaaccatgccagtggccacccttgggctcagacagctctgggccttttgaccacaagccagcccctcgccctctctgtggcatagtcttctctgccccaggactgcagggcggcttcctccaaggcttccaaggctcaaaagaaatttggctccatccaagaaggctccagctcccctactggcccctggctcaggcccacacccctggccaggcccagagagtgtgtctcaggagaattcaatggctctagagagacacacagaaagtttggcatttggaaatttcaaggatgtatgtatgctcacgtatggagcaggttgtcctggtccctgggtgcagggaagtgggctgcagggaagtggattggaggggagcttgaggaatataaggagcgggggtggagactcaggctatggacaaggacagccccaaggttgggaagacctggccttagtcgtcctcagcctaggggcagggcagtgaagaaagctctccccgctcctgctgtaatgacccagagtagcctccccaggccggcatcttatgtgtgtcttccaccatcctcatggtggcacttttctaggcctgtctcccagcattgtgcaaggctcggaagagaaccaggaagtgaaactgggtgaaaacagaaagctcaatggatgggctaggttcccagatcattagggcagagtttgcacgtcctctggtcactggaatccacccagcccacgaatcatctccctcttgaaggattttatttctactgggttttggaacaaactcctgctgagaccccacagccagaaactgaaagcagcagctccccaaagcctggaaaatccctaagagaaggcctggggcaggaagtggagtgacaggggacaggtagagagaagggggcccaatggccagggagtgaaggaggtggcgttgctgagagcagtctgcacatgcttctgtctgagtgcaggaaggtgttccagggtcgaaattacacttctcgtacctggagacgctgtttgtgggagcactgggctcatgcctggcacacaataggtctgcaataaaccatggttaaatcctg

SEQ ID NO: 356177 - DNA, 532 bp, Homo Sapiens
  misc_feature (53)..(67): n is a, c, g, or t
  misc_feature (148)..(198): n is a, c, g, or t
tcgaggccaagaattcggcacgaggggagtttcagactggcctgggcaacgtnnnnnnnnnnnnnnntagccaggcatggacatgatagtgcatacctgtggtcccagccactcaagaggctgagacaggatgattgcttgagcccannnnnnnnnnnnnnnnnnnnnnnnnnnnnnnnnnnnnnnnnnnnnnnnnnnatgacagggcaagaccctgtctcaatattttaagtcaagggtttgtagtaatgtattcagtgccacttcttgccatcactttgcaattattgaaatgggaatactgagctcagaaagcaaatatgatgctttcatgggagatggagccacatttgtgttctgggtgggatcactagtgcaggagaacattacattttcttctgaaggcaaaatgcttgtaggttttgcctctactttgtatttacttttaaaattgcacttgttcacctaccagtgtttacgaaatcctgtatttgggatgctttttctataataaaatattataatttgaaaa

SEQ ID NO: 356178 - DNA, 1430 bp, Homo Sapiens
  misc_feature (865)..(865): n is a, c, g, or t
ccactactggccaaatcaagtagctgatgtgcagttgagaaaactagaggactgaaaaaacaaattttaactagcaaatgctgtgaattactcttcctccccttctctgaaatgggtaaaggacaaattgtgtaaaaaaacctatgcactatagaagggaatagtaaccatttcttttgtctctctgtttctgttctgactgagaacctgcagccatttcttgttacatgaaaacaaaatgctacttgttacctctattttttgttactatacaattatgaaatgtaatgtaagacaccaacagaaatgatatacctgtaactgtacctatcaggactatacctcatttacagtcagaaagcttactgggatgtcaggaaatgatacagggttggttctcatttcgtgccgaaatgagacagaaattcagtgacgaaggtggcgttgtaggggtattgatgtgccccgggtagtgccagcagagtaggggaaaactgcatttgcataaaaactactcttgacatgattgttcattttacaaaaaaattccattaattaccaagccctcacccagcccatgtgtgataggatttatgtaggaaggaacttgattttcaaataattttttaaatgtatctcttgcctaaaggactatatacatctaataaagtaacactgtgtcatcttctggagttatcaaaaattgtatacaatcaagacaacacaagaattattttatttttgagtgcaaatacaggtactgttggagttgatgggcaccatgctttctcatgaagtagcatttccctaccatcaagccattggttttgtgccattcagggagaggaaaaaaagggaatttatngctgtacatttcagttcagtgtatgaccaaaagcaatatgtttataagaagatgtttgacatactaattattttatatcatttaaaccatactgtagcaacataatatatggagctaatttgtagaattatttttacgatttcccaaacaaatgtactgtactgttatataatttattgtgaggacccttcctcatggaagcccattaggaaaacaaactagaggtaaatatccacattaatcctgtattatccaatttcctcatagacactgtgcctaatgtgaattttaaatgacctgcatcaagtcttctgatctcagataactcagtacagatagcaattagtcagctgatttgattacaatggagtaaccgacaatatatttatttataaagcacatattcataataacgagaagaattcagaaaaccacttaagcaagacccttctgaaataaaaaatgttgctttttaaatagtttgtcctaaggtgtttaaaacatgtcaaccttatgtaaggaaaaatttcctggtccaaataaagttgaagtttaagaaaaattg

SEQ ID NO: 356179 - DNA, 841 bp, Homo Sapiens
  misc_feature (204)..(389): n is a, c, g, or t
cctgagattttgggccaaaagaaaaaaaccttttaagaagccttgggcccttgtcgtgggtcaaaacaggatatattgggtcggtcttgattttttgaagaacagggttgcctcattgtatgcccagggctggaagtgccagtggcccatatatatggcttcactggaaaccttccacctcaagggtcaaagcaaatgtcgggnnnnnnnnnnnnnnnnnnnnnnnnnnnnnnnnnnnnnnnnnnnnnnnnnnnnnnnnnnnnnnnnnnnnnnnnnnnnnnnnnnnnnnnnnnnnnnnnnnnnnnnnnnnnnnnnnnnnnnnnnnnnnnnnnnnnnnnnnnnnnnnnnnnnnnnnnnnnnnnnnnnnnnnnnnnnnnnnnnnnnnnnnnaggtcaactgtttttgcaagcatttagacagagtcatgctgtgctgttaatcaggtgtcctggagaatgggttgcttggaaatcttggcgccccctcagtagtaacagccttggtttaagggcgcagagtggagagtaaatgcaagggctataacaagggcattcatgctgtgggttaagatccacaaatcgctaggaatgtgtatactctgggtagtaagtttgtagtattagaaggtttaatgacaagtatttgaagagctgaagttaagtgttggaagcccatcccttatgaaggaccaatgaatggcaagtaaaagaccaagttctgtcacctgggtccattaatttagttaaaaaggcaaagttctttcagcacacatatctgcatgcagtcacgtgctgcctaaggatgcttcattcaacaatgagcctcacagccgtgctacaca

SEQ ID NO: 356180 - DNA, 934 bp, Homo Sapiens
cttaaaaagaggctctgtataccgggtctcagttaaaaaacagggatccgcaaggcgcaagggaggaatgcgcacaacccccctcaggcgacgaagggtcccattgggggaaagtgcttcccccacacagtggttatcccagccttgagaggggcaagaaggacctggaccttggccaggaccacagcccggcctgccataaccgcttggggaacagagcggggcctcttcccctcagtttttcggtgggacagccccaggggccctaacgggggtgcggcaggagcaggaacagagactctggaagccccccacctttctcgctggaatcaatttcccagaagggagttgctcactcaggactttgatgcatttccacactgtcagagctgttggcctcgcctgggcccaggctctggaaaggggtgccctctggatcctgctgtggcctcacttccctgggaactcatcctgtgtggggaggcagctccaacagcttgaccagacctagacctgggccaaaagggcagccaggggctgctcatcacccagtcctggccattttcttgcctgaggctcaagaggcccagggagcaatgggagggggctccatggaggaggtgtcccaagctttgaatacccccagagaccttttctctcccataccatcactgagtggcttgtgattctgggatggaccctcgcagcaggtgcaagagacagagcccccaagcctctgccccaaggggcccacaaaggggagaagggccagccctacatcttcagctcccatagcgctggctcaggaagaaaccccaagcagcattcagcacaccccaagggacaaccccatcatatgacatgccaccctctccatgcccaacctaagattgtgtgggttttttaattaaaaatgttaaaagttttaaacatg

SEQ ID NO: 356181 - DNA, 736 bp, Homo Sapiens
ctgctattacttggacaataaaagatttcctgtaacaattaagtttaagtggtaatcaaaactgggaaaaaagccagtacatcagagggccaagaatgtcacaaatatataattaccatttacagtttaattgtcaatcttttttacaacaaaaaattaaatggttccaaaagtcagtagtactgtggttaaaaaaccctgttttaccacctgtaggttacatagagcttgacatggtagtggaaaatgaataaagtttaaaatacagtacttaggtttggtttttaacttataggcatcataattgactaactatgaggtataaagatagcacctcctttatcaagattggcttcaataaatgtctgcctacccttttggtgggtcatgtgtccattcgcagtgttagaaatgaaaagaaggtcactaaaacacttgcaatggatgtaataactgaatgcaagaactctggatctgaagggaatgttcatgactatttcatccctcctactgccttgaagaaccaaacgcaggagccacccaaggtgaaaaccatccatttcttggagaagtgccacggtggggttgcaagtcccaggatcaagatttcgatgtgtctctttttacccgtaaagtggctgaaatctgaagctgaatctgcaagtgtcatggagtcattgaatctcacagtactcaactgaaaaaagttattaaaggtcgtctggttcagccttct

SEQ ID NO: 356182 - DNA, 1118 bp, Homo Sapiens
tttaaggaaatcctataaccaaaacttcctagatcctttcccctccccgaccattccaagttgtatttataaagactggtccaatcctgtggaattccactctttcttcaaaagggctttgacctccctcaaatcaaacaagcaaagggacattatgggaagagggctaaatccaggggtatcgggggtgcaaaggaggaatacattcgaggctccagaactttcccacgcttagtggaatcaattttatcggggtttggacactggatgtcaaggctggtcaaaaggaagccagaggttctgtggggaagggactgacaaaggctgctgctgaggcttcactcatgggacaagcttcctggaaggggctggttacctcaagtccagatcattcagagggacatgaggatcacactccgcacaatgcagatgttgagggaccttccctctaagatgtgaaaaagaccccaagcaaagttcccaatgtgccctctctgcacctttagaaaaccacataggaaatatggattggttccagaaaaaggcagatgccacaggcactgggccctgccttcatgattgcatcaaaactgttcacgcagctgccttctctcaattatccaagagctgttagtcttcatgagtcttgtccaaatcttttgccttttctcttcctttggctgttccctgggatcgtgatgattactgctctcatccaaggtgaacagaaggtgaaattcaaaccggtcaggctgcttcctccccttttcctgcctcttgccagggttctccactgagtgaactcaaccagaagccaaaggacatggaaacccattgatgtccctcccaggacaaggtggatgaacagaaattgatcttgaggaatgtcctggaggaatcgcttggcaatcttcagacgagaaatgctcatggtaaattgtggatttcttctttagctcctttgggggatgttacggataccatgcctccatggccagacttatgaagagttccatttcctataagaaatgtcgggcttcttccgaagacacgagagacacaagattttaagaaattctcccggaaggacattgatttggatcttgtgatagtgtcct

SEQ ID NO: 356183 - DNA, 493 bp, Homo Sapiens
  misc_feature (25)..(25): n is a, c, g, or t
  misc_feature (37)..(37): n is a, c, g, or t
  misc_feature (51)..(51): n is a, c, g, or t
  misc_feature (61)..(61): n is a, c, g, or t
  misc_feature (97)..(97): n is a, c, g, or t
aaaccatcccattgatacacttggngacattattggngaaaaaacccattntggtctgccnatggaggcatggtatccgtaacatccccccaagggngcttaaggaggaatcccccaatttaccatgagcatttctcgtctgaagattgccaagcgattcctccaggacattcctcaagatcaatttctgttcatcccaccttgtcctgggagggacatcaatgggtttccatgtcctttggcttctggttgagttcactcagtggagaaccctggcaagaggcaggaaaaggggaggaaggtgaaaaccatccatttcttggagaagtgccacggtggggttgcaagtcccaggatcaagttttcgatgtgtctctttttcccgtaaagtggctgaaatctgaagctgaatctgcaagtgtcatggagtcattgaatctcacagtctcaactgataaaagttattaaaggtcccccggttcagccttcaaaa

SEQ ID NO: 356184 - DNA, 634 bp, Homo Sapiens
tagcccaacaagaaaaagctggcacgtaaaaccgtaaaaccatcacactcccccctccttaaagaccaaacttcttttaacctgggtgctaaacattacatttcctggtctctcctgcagcttggcatgaccatgtggctaagctaggctcaatacaatgtaaataaaaatgctgagtgggacttttccaggaagttttattgaaaggcatagattgtcagcaagagtttgttttgcatttctgcttttcttctctttcctaccttaatgtgacagctggacctccagcagctattttggaccttgaggtggccttggaaacaaaagccatccatgcactgaaaatgtcagagtggaaagatcagagcatgaatttgtaaggaccaccttgctagccagtattacagttacatgacagagaagtgaacctctaccttgcctaagcaactgactgctttgtggttttctgttatgtgtgaccaaatctaattttaactaacccagaaatctgctctctgttgtcctctaactgaatgtcaatggcttcccatctatagttacttacatgaagtatgatgacagattttatattatgaaaagagcaagaacaatgtcgttttaaacttccttgatt

SEQ ID NO: 356185 - DNA, 1196 bp, Homo Sapiens
  misc_feature (13)..(13): n is a, c, g, or t
  misc_feature (22)..(22): n is a, c, g, or t
  misc_feature (33)..(33): n is a, c, g, or t
  misc_feature (35)..(37): n is a, c, g, or t
  misc_feature (55)..(57): n is a, c, g, or t
  misc_feature (63)..(64): n is a, c, g, or t
  misc_feature (66)..(66): n is a, c, g, or t
  misc_feature (77)..(77): n is a, c, g, or t
  misc_feature (79)..(79): n is a, c, g, or t
  misc_feature (95)..(95): n is a, c, g, or t
  misc_feature (109)..(109): n is a, c, g, or t
  misc_feature (111)..(111): n is a, c, g, or t
  misc_feature (116)..(116): n is a, c, g, or t
  misc_feature (121)..(121): n is a, c, g, or t
  misc_feature (128)..(128): n is a, c, g, or t
  misc_feature (131)..(131): n is a, c, g, or t
  misc_feature (141)..(141): n is a, c, g, or t
  misc_feature (147)..(148): n is a, c, g, or t
  misc_feature (156)..(156): n is a, c, g, or t
  misc_feature (158)..(158): n is a, c, g, or t
  misc_feature (161)..(161): n is a, c, g, or t
  misc_feature (182)..(182): n is a, c, g, or t
  misc_feature (193)..(193): n is a, c, g, or t
  misc_feature (268)..(268): n is a, c, g, or t
  misc_feature (271)..(271): n is a, c, g, or t
  misc_feature (533)..(533): n is a, c, g, or t
  misc_feature (542)..(629): n is a, c, g, or t
gagtcccccgggntagattggnaacaaaggganannncgggggagccaaacaggnnnagagtnngnaagggtttggnanagtctgcccgcattangcaccagcgtggcncntgtcnctacnccctttnggnataggggatngtaggnnaggccccntnatncaggaggcagcaacaggactngaatgacgcgntccagggagggtggaggcccaggagaccaaagggaggggctctgccgcttagcagagaagaaagggcctgggagntgntgggagggagaaggaagggaagaaaggggaggaagaatagatagaaatagggattggagacagtaaccttgaagctcaggaaactgtcctggctgggctgagtcaggaccttgccaggacgggctgtacccctggcttctagaagactgcctagcacacagtaggcattcaatacttgttgaataaataaactggctttcacctaaggactcaaccctaaattcctgctgcctcatctgttaagaactgacactttcccctngctgggcannnnnnnnnnnnnnnnnnnnnnnnnnnnnnnnnnnnnnnnnnnnnnnnnnnnnnnnnnnnnnnnnnnnnnnnnnnnnnnnnnnnnnnnttgcaccactgatgcctcccaaccttgctctgggagaccaatgcctgaaccagggtttgtttaccttctgagctgcagagatggggcttctggaatttaaggtaacaggatgaggcaggggtatcttgatcatccggatggggcaaatactgctgtgtggcatggtggtacccacccctatggaggggcactcttggacagagcccagacctttgtgccctggagggagccaacccaccctgacacggagacactggcagaatagaccagagacagaaggtgctctcatggtatccagcctggatgccaagcccaagtcctggtggatagcagaggccagctgtttgggaaaagggcaggatgctctgaggcctggcagccacatttccatgtgtctttttaccaataaacggcttctcttctgaggcttggacagtgtgtgtgtacacacaggcatgaaaaaggtggagaggggtctctgcgcgcaaaactcagactgtaaattttgtgtggttcccttgctctctgagcccattaaataaagaggttgtcttggtgtaaaaaaaa

SEQ ID NO: 356186 - DNA, 476 bp, Homo Sapiens
  misc_feature (444)..(444): n is a, c, g, or t
ttttttttggacaagcttaaaacacgatgtggctcgtttttattttatctcagaaaaaaacattccctttagaaggaaaggcagttagacaaggcctctcactgggtagctctgcgctactcagcacatgccagtggcctgccagccccaacctctcccctgggacctgggcccatgctctggcactgctctgttacaactccctgtccttgatcccagctttgtcactccaagagatggccctgggactgagaagtggatggcagctgtgacagcaggagaggactgcctgaggctccccgggcagaggctctggtgccaggttagcagcaggaccgacggcagacccagcagccagagagtgaaaggtaataaaataaaaagggtttcctcacacttaaatttttccccggaaaaaaagtcaatgtcacctctggggccagnagcttctgaacctaggagagtttaggaaaatg

SEQ ID NO: 356187 - DNA, 1652 bp, Homo Sapiens
  misc_feature (988)..(988): n is a, c, g, or t
  misc_feature (1014)..(1014): n is a, c, g, or t
  misc_feature (1022)..(1026): n is a, c, g, or t
  misc_feature (1080)..(1080): n is a, c, g, or t
  misc_feature (1082)..(1082): n is a, c, g, or t
  misc_feature (1194)..(1194): n is a, c, g, or t
  misc_feature (1235)..(1235): n is a, c, g, or t
  misc_feature (1259)..(1259): n is a, c, g, or t
tcccgggatccacgcctcccggcgcaccgacgcgcctctccggttactaagcggccttggatacctggccgcgggatgctgggcggcgtcaggtaaccatggagaaagagctgcggagcaccattcttttcaatgcctacaaaaaggagatatttaccaccaacaatggctacaaatccatgcagaaaaaacttcggagtaattggaagattcagagcttaaaagatgaaatcacatctgagaagttaaatggagtaaaactgtggattacagctgggccaagggaaaaatttactgcagctgagtttgaaatcctgaagaaatatcttgacactggtggagatgtctttgtgatgctaggagaaggtggagaatccagatttgacaccaatattaactttttactagaagaatatggaatcatggttaataatgatgctgtggttagaaatgtatatcacaaatatttccatcctaaagaagctctagtttccagtggagtcttgaacagggaaattagccgagctgcaggaaaggctgtgcctgggatcattgatgaggaaagcagtggaaacaatgcccaggctctcacctttgtgtatccttttggtgccacattgagtgtcatgaaaccagcagtggcggttctgtctacaggttctgtctgcttcccacttaacagacccattttggctttctatcactcaaagaaccaaggtgggaagctggcagtgcttggttcatgtcacatgttcagtgatcaatatttggacaaagaagaaaacagcaaaatcatggatgttgttttccagtggctcacgacaggagacatccacctaaaccagattgatgctgaggacccagagatttctgactacatgatgctgccctacacagccaccctatcaaagcggaatcgagagtgtctccaggaaagtgatgagatcccaagggactttaccaccctcttcgacctgtccatcttccngctggataccacctccttccacagcntcatcaannnnnacgggcagctaaatgtgaaacattaaccactccagctcatccagcctcagtttnanacgccgctgccaacccttcagctgcggtttttcctcccagtttccgggagttaccacctcctcctctggagctatttgatttagatgaaacgttctcctctgagaaggcacngcttgctcagattaccaataagtgaactgaagaaaacctgnaattttatttcaggaaatgtggtnatattcttggagtaaccagtaaactaccaaaggaccaacaggatgccaaacatatccttgagcacgtcttcttccaagtggtggagttcaagaaattgaaccaggaacatgacatcgatacaagtgaaacagcattccagaacaatttctgaagaccatgcctcttgaagctttttctgcctcctgattctctctttgtaaactattttcaaattgtttttcaactccttatcaaaattgtttatacactctttcctccatgagctctggaaggtatatgcatcttctgtaatactcagataggtataagatttttcacaaaatccttatgtaagatacattccatttttaaaaattaaatgtatggttgcatctgtctttttataccctaaa

SEQ ID NO: 356188 - DNA, 799 bp, Homo Sapiens
cgcctcccggcgcaccgacgcgcctctccggttactaagcggccttggatacctggccgcgggatgctgggcggcgtcaggtgagcggtggtcgctgggcctcaggtaaccatggagaaagagctgcggagcaccattcttttcaatgcctacaaaaaggagatatttaccaccaacaatggctacaaatccatgcagaaaaaacttcggagtaattggaagattcagagcttaaaagatgaaatcacatctgagaagttaaatggagtaaaactgtggattacagctgggccaagggaaaaatttactgcagctgagtttgaaatcctgaagaaatatcttgacactggtggagatgtctttgtgatgctaggagaaggtggagaatccagatttgacaccaatattaactttttactagaagaatatggaatcatggttaataatgatgctgtggttagaaatgtatatcacaaatatttccatcctaaagaagctctagtttccagtggagtcttgaacagggaaattagccgagctgcaggaaaggctgtgcctgggatcattgatgaggaaagcagtggaaacaatgcccaggctctcacctttgtgtatccttttggtgccacattgagtgtcatgaaaccagcagtggcggttctgtctacaggttctgtctgcttcccacttaacagacccattttaggctttctatcactcaaagaaccaaggtgggaagctggcagtgcttggttcatgtcacatgttcagttgatcatatttggacaagaggaaaccg

SEQ ID NO: 356189 - DNA, 1153 bp, Homo Sapiens
  misc_feature (787)..(787): n is a, c, g, or t
  misc_feature (791)..(791): n is a, c, g, or t
  misc_feature (804)..(804): n is a, c, g, or t
  misc_feature (806)..(806): n is a, c, g, or t
  misc_feature (812)..(812): n is a, c, g, or t
  misc_feature (822)..(822): n is a, c, g, or t
  misc_feature (834)..(834): n is a, c, g, or t
  misc_feature (843)..(845): n is a, c, g, or t
  misc_feature (857)..(857): n is a, c, g, or t
  misc_feature (872)..(872): n is a, c, g, or t
  misc_feature (874)..(874): n is a, c, g, or t
  misc_feature (877)..(877): n is a, c, g, or t
  misc_feature (900)..(900): n is a, c, g, or t
  misc_feature (902)..(902): n is a, c, g, or t
  misc_feature (910)..(910): n is a, c, g, or t
  misc_feature (915)..(915): n is a, c, g, or t
  misc_feature (924)..(924): n is a, c, g, or t
  misc_feature (935)..(935): n is a, c, g, or t
  misc_feature (947)..(947): n is a, c, g, or t
  misc_feature (994)..(994): n is a, c, g, or t
  misc_feature (1007)..(1007): n is a, c, g, or t
  misc_feature (1013)..(1013): n is a, c, g, or t
  misc_feature (1015)..(1016): n is a, c, g, or t
  misc_feature (1018)..(1018): n is a, c, g, or t
  misc_feature (1024)..(1024): n is a, c, g, or t
  misc_feature (1033)..(1033): n is a, c, g, or t
  misc_feature (1041)..(1041): n is a, c, g, or t
  misc_feature (1044)..(1044): n is a, c, g, or t
  misc_feature (1050)..(1050): n is a, c, g, or t
  misc_feature (1071)..(1071): n is a, c, g, or t
  misc_feature (1074)..(1074): n is a, c, g, or t
  misc_feature (1079)..(1079): n is a, c, g, or t
  misc_feature (1092)..(1092): n is a, c, g, or t
  misc_feature (1094)..(1095): n is a, c, g, or t
  misc_feature (1108)..(1108): n is a, c, g, or t
  misc_feature (1137)..(1138): n is a, c, g, or t
  misc_feature (1141)..(1141): n is a, c, g, or t
ggttacttgtaaaagtatatttcctagagaaaatatcagcagtggtagagaccagaaaaagtaagtgtgtgtgttctaaacagtgattccaactcaatgtgttcagagaaaacactttgaccctgtctgtgtttacagtccctgctgacagtgtactgtcgtatcctcagccttgttctatttctttattttagctttacagagattaggtctcaagttatgagaatctccatggctatcaggggctaaacttttctgccagtcctttgctcttaccgggctcagaaggacatgtcaggtgggatacgtgtttctctttcagagctgaagaaagggtctgagctgcggaatcagtagagaaagccttggtctcagtgactccttggctttcaacccacctagcctcagacagccaggaggcctttttaccactggatactgatgagatgttttaggtccttgcactttgcaaaactcctttctcccagtgggatattattaggacatagccaggctagaaaggccgtgggaagctttggaggtaggaggataggatccagacagggttacaataaggagaagggcattctctttggtgcactccatagtccaatggcagtcctgagccgattccagttaggaaccaagggtggactttcttctttggttctttggcccttttgatttccccagcgggggcagggtaaggagcatgaaagaaaccagcctcaggtgtgtctcctcacttctgtctcatctaaacttcagcatccaggcatcgcacggnagtnttagcttggactntnggactntactgggttnttataagtatantttgaatannnaaaagggttgcnataattggccttctncnccnttactactttggtttcgatcatntncttctgcngattnttgtttgtnaaagggaaggncttaatcacatnttttcgacaaagcaaaaaccaagatcagctgctgccccaaagaagangagagctttctcnagcagntnngngggganacaactaanccagcagntcnattttngattgcagcttttttttcaanaanggttnattttctgttgananngggccagtttccntaaaacttctgttaaaaaattattttttnntcntggaatagaagt

SEQ ID NO: 356190 - DNA, 1009 bp, Homo Sapiens
  misc_feature (874)..(874): n is a, c, g, or t
  misc_feature (890)..(890): n is a, c, g, or t
  misc_feature (892)..(893): n is a, c, g, or t
  misc_feature (962)..(963): n is a, c, g, or t
  misc_feature (970)..(970): n is a, c, g, or t
  misc_feature (972)..(972): n is a, c, g, or t
  misc_feature (984)..(984): n is a, c, g, or t
  misc_feature (992)..(992): n is a, c, g, or t
  misc_feature (996)..(996): n is a, c, g, or t
  misc_feature (1000)..(1000): n is a, c, g, or t
  misc_feature (1004)..(1004): n is a, c, g, or t
cgggatcggaccagggccaggcttgtgttcgcagccttgccgtggctggggttccgatgtggtccccggagcgggaggccgaggccccagccgggggagacccggcgggccttctgccccccgagtgggaggaggacgaggagcgcatgtccttcctgttctccgctttcaagaggagtcgcgaggtgaacagcaccgactgggacagcaagatgggcttctgggcgccgttggtgctgagccacagccgccgccagggggtggtgcgcctgcgtctgcgggacttgcaggaggcctttcagcgcaaggggagcgtcccgctggggctggccacggtgctgcaggacctgctgcgtcgaggggagctgcagcgggagtcagacttcatggccagtgtagacagcagctggatctcctggggggttggggtcttcctgctgaagcctctcaagtggactctttctaacatgctgggagataataaggttccagctgaggaggtccttgtcgctgtggagctgttgaaggaaaaggctgaggaggtgtatcgtctgtatcagaactcgcccctctcctcccaccccgtggtggccctgtcagagctcagcaccctctgtgctaactcctgcccagatgagaggaccttctacttggtgttgctgcagctgcagaaggagaagagggtcacagtcctcgagcagaacggggagaagattgtgaagtttgcccgagggccacgtgccaaggtctctccagtcaatgacgtagatgttgggggtgtacccacctgatgcaaagtgaacacctttctctcacccaaagtggaagtccttatcccaggaagcagagaggtgtaaagaagaagcccgccggnatgccgagcaggaaanannagctggcactgaggtctctcaaggcaagcacggacagagaacgcatcgaggcttgcatgcaagctgganntgttcangnatcctggaccgntctatgcnccanacanatanatggt

SEQ ID NO: 356191 - DNA, 904 bp, Homo Sapiens
  misc_feature (4)..(4): n is a, c, g, or t
  misc_feature (24)..(24): n is a, c, g, or t
  misc_feature (49)..(49): n is a, c, g, or t
  misc_feature (79)..(79): n is a, c, g, or t
  misc_feature (102)..(102): n is a, c, g, or t
  misc_feature (119)..(119): n is a, c, g, or t
  misc_feature (144)..(144): n is a, c, g, or t
  misc_feature (150)..(150): n is a, c, g, or t
  misc_feature (174)..(174): n is a, c, g, or t
  misc_feature (188)..(188): n is a, c, g, or t
  misc_feature (200)..(200): n is a, c, g, or t
  misc_feature (204)..(204): n is a, c, g, or t
  misc_feature (215)..(215): n is a, c, g, or t
  misc_feature (830)..(830): n is a, c, g, or t
  misc_feature (833)..(833): n is a, c, g, or t
  misc_feature (837)..(837): n is a, c, g, or t
  misc_feature (841)..(841): n is a, c, g, or t
  misc_feature (846)..(846): n is a, c, g, or t
  misc_feature (870)..(871): n is a, c, g, or t
  misc_feature (881)..(881): n is a, c, g, or t
gccnagcggatatctacaagccgnttccaggctgagagcagccccgganagctgccgagaagaaggacccctgcagganagctgagcagctgcagagggagnacagcaaactgaaggcnagctgtcaggagtcggccgaggatngagganatgaggaagcggcatgtggaggtntcccaggccccttngccccccgcccntgcntacttctcttntcccttggccctgcctagcaagaggaggagcccccccgaggagccacctaacttctgctgtcccaagtgccagtatcaggcccctgatatggacaccctgcagatacatgtcatggagtgcattgagtagggccggccagtgcaaggccactgcctgccgaggacgtgcccgggaccgtgcagtctgcgctttcctctcccgcctgcctagcccaggatgaagggctgggtggccacaactgggatgccacctggagccccacccaggagctggccgcggcaccttacgcttcagctgttgatccgctggtcccctcttttggggtagatgcggccccgatcaggcctgactcgctgctctttttgttcccttctgtctgctcgaaccacttgcctcgggctaatccctccctcttcctccacccggcactggggaagtcaagaatggggcctggggctctcagggagaactgcttcccctggcagagctgggtggcagctcttcctcccaccggacaccgacccgcccgctgctgtgccctgggagtgctgccctcttaccatgcacacaacgggtgctctccttttgggctgcaatgctaattccaattatancanccanaccnatgtntatataacacaaatcaacatattnnatggacaatntgggttgttccccatctttttgt

SEQ ID NO: 356192 - DNA, 1023 bp, Homo Sapiens
  misc_feature (161)..(223): n is a, c, g, or t
cgctgcggcgcttctggctccagaccgccctccggatcggaccctgcgaatggtttggctatatcttcatgtaggacctactccctatcccgtcggccgcggtgaatcccacctgcggtgctttaacttgtgtaacagagatgctgcctctgggagaggcnnnnnnnnnnnnnnnnnnnnnnnnnnnnnnnnnnnnnnnnnnnnnnnnnnnnnnnnnnnnnnnctgggttcctttgccccttgcccaccagggaggggtgggagacgagagagggtgaactttcccctgcgagattctggcgaaaggggaaatatgcttcgagtcagtaaagctgcgcaagtgcacagtcaaggagagagtcttgggaaaaccaaggatagttcccggagatgacttttggactgcggaaacgtttgtcagaggaaagaggcttcagtttaatgtgagatcattggaagttgaactattcaggcggcgagcagagcccctttctccatcttcccactgtatggtcttgtcccttagcctataatttcttataaagagcgttttgaagactaggtttttactggcagggccctgattcaggctcacagtataaagagagaagtcagagaatcctagaaatttattgcttgaagaaggggttggtgtcctcatatctcaccttcctcaggctgggcttcatcaccaggcctcctcacagattcctgtcccttctgtgtccgggactcccgatacctcaactctcagtactttgtgctcaagccccaggccccagagccatggctatctcctcttcctcctgcgaactggccctgggtggctgtgtgccaggttaaccatcgacgccagacaagcaacagaactttaacaacatgtgctgagcctgggttccgaggagggtgccagactcgggtgcctgcctgggttcctgcctgaaggcattgacttcattgcccggacctgaaagacgctaacctgtgtttgaacccggggggggaacttttggaaaaataacc

SEQ ID NO: 356193 - DNA, 1153 bp, Homo Sapiens
  misc_feature (67)..(67): n is a, c, g, or t
  misc_feature (105)..(105): n is a, c, g, or t
  misc_feature (201)..(201): n is a, c, g, or t
catggagccactagctacatagttgccagggtgggggtggggaggggccagttctaaaactcacagnaaagtccagtctaaagacagtgggtgacccagattgcnaatagaggtcaggcctgcggtgctgggacacaggcaggtgtcggcgcaactgtcgcagatagttgaggtctattcgggcaaggcagaggcctggcncctcagagcaagcgggccaccactgttccccaggggtctaccaccatgctgtgcccataacttgctctcttctcatggtggcgttccacactgtgctgccgccactaacatagcactgggtttcgatagcacgggcccgcagcaacacctcccagtgggctgggcctgtaatgggatccaaaagctgaaggataggtaagtatctctgctccagcttgagccaatgccagagagagttcagggaaccgcatgtcatagcagacagctagaccaatcttgcctgctggtgtgctgacaggtgactcaagactgggcccaggcatggtagagttgctttcacacataggcccctgccctggaatctctacgtcacacagatgtgtcttcctgtaagtggccactactgcccctttgctgttcagcagcacgtgacaattgtagattttctgagtctgctcccagtcttggccacgctcatggaaaccacccaaggacagccagagtccacattccctggcaagctgggtgtattcttccaaaagtttcccacccagtggttcagacaggtgtagcgtctctgcagggtcccgtgcaatgaagtcaaatgcctcaggcaggaaagccaggcaggcacccagtctggcagcctctcgaaccagctcagcacatgttttaaagttctgttgcttgtctggcgtcgatgttacctggcacacagccaccaggggcagttcgcaggaggaagaggagatagccatggctctgggcctgggctgagcacaaagtactgagagttgaggtatccggagtccaggacacagaagggacaggaatctgtgaggaggcctggtgatgaagcccagcatgaagatatagccaaaaccattcgcagggtccgatccggagggcggtctggagccagaagcgccgcagcgagtgggcggtaactcgc

SEQ ID NO: 356194 - DNA, 2196 bp, Homo Sapiens
agcgggcttctggctccagaccgccctccggatcggaccctgcgaatggttttggctatatcttcatgtaggacctactccctatcccgtcggccgcggtgaatcccacctgcggtgctttaacttgtgtaacagagatgctgcctctgggagaggcggggagggacgggccaactggagcgggcggcgggagggtggagggcggggcgcggcttggggcctgggttcctttgccccttgcccaccagggaggggtgggagacgagagagggtgaactttcccctgcgagattctggtgaaaggggaaatatgcttcgagtcagtaaagctgcgcaagtgcacagtcaaggagagagtcttgggaaaaccaaggatagttcccggagatgacttttggactgcggaaacgtttgtcagaggaaagaggcttcagtttaatgtgagatcattggaagttgaactattcaggcggcgagcagagcccctttctccatcttcccactgtatggtcttgtcccttagcctataatttcttataaagagcgttttgaagactaggtttttactggcagggccctgattcaggctcacagtataaagagagaagtcagagaatcctagaaatttattgcttgaagaaggggttggtgtcctcatatctcaccttcctcaggctgggcttcatcaccaggcctcctcacagattcctgtcccttctgtgtcctggactccggatacctcaactctcagtactttgtgctcagcccaggcccagagccatggctatctcctcttcctcctgcgaactgcccctggtggctgtgtgccaggtaacatcgacgccagacaagcaacaaaaactttaaaacatgtgctgagctggttcgagaggctgccagactgggtgcctgcctggctttcctgcctgaggcatttgacttcattgcacgggaccctgcagagacgctacacctgtctgaaccactggggtgggcaaactctttggaagaatacacccagcttgccagggaatgtggactctggctgtccttgggtggtttccatgagcgtggccaagactgggagcagactcagaaaatctacaattgtcacgtgctgctgaacagcaaaggggcagtagtggccacttacaggaagacacatctgtgtgacgtagagattccagggcaggggcctatgtgtgaaagcaactctaccatgcctgggcccagtcttgagtcacctgtcagcacaccagcaggcaagattggtctagctgtctgctatgacatgcggttcccctgaactctctctggcattggctcaagctgggagcagagatacttacctatccttcagacttttggatccattacaagcccagcccactgggaggtgttgctgcgggcccgtgctatcgaaacccagtgctatgtagtggcagcagcacagtgtggacgccaccatgagaagagagcaagttatggccacagcatggtggtagacccctggggaacagtggtggcccgctgctctgaggggccaggcctctgccttgcccgaatagacctcaactatctgcgacagttgcgccgacacctgcctgtgttccagcaccgcaggcctgacctctatggcaatctgggtcacccactgtcttaagacttgacttctgtgagtttagacctgcccctcccacccccaccctgccactatgagctagtgctcatgtgacttggaggcaggatccaggcacagctcccctcacttggagaaccttgactctcttgatggaacacagatgggctgcttgggaaagaaactttcacctgagcttcacctgaggtcagactgcagtttcagaaaggtggaattttatatagtcattgtttatttcatggaaactgaagttctgctgagggctgagcagcactggcattgaaaaatataataatcataaagtctgtgtctggacatcgcctttgggaactagaaggggagttggtattgtaccagctggactaagctccagttctagacctcctggctcattcaacatgcctccctacctaaataaaagtgcaacactcagtgcatgtcccagccccattctcccaagcatgggagtgggctgtaggagtggaggagggggaaggaaaaaggaattacttcacttacacctatgatgcccttgc

SEQ ID NO: 356195 - DNA, 1009 bp, Homo Sapiens
  misc_feature (7)..(7): n is a, c, g, or t
  misc_feature (13)..(13): n is a, c, g, or t
  misc_feature (15)..(15): n is a, c, g, or t
  misc_feature (21)..(21): n is a, c, g, or t
  misc_feature (25)..(25): n is a, c, g, or t
  misc_feature (33)..(33): n is a, c, g, or t
  misc_feature (36)..(36): n is a, c, g, or t
  misc_feature (52)..(52): n is a, c, g, or t
  misc_feature (58)..(59): n is a, c, g, or t
  misc_feature (88)..(88): n is a, c, g, or t
  misc_feature (97)..(97): n is a, c, g, or t
gtcttgnaggaananttccangcanagaaacantantgcaaacattgtgagncagagnngagtaagcacagagagagcagtgagaganccagagagnatcagggacatggaccacatggtcctttggaatgaatgtggctgacagagtgagacgggagggaaaagatgggatctgacttactttttgaaaggattactctggaagctgtgtgcagaagagtctgaaggcagggttggaacttactgggaaatgacgagaacagggagagccagctaggagactcaccggactccagccaagagccaaaggtgggttggacaaggggagggcaatagtggtgacgagaagtgtctgatttggaaacgatgcctcagtcgaagggagataggaacctgccaagcaggatgtcttagaggcagtggattctcagcatacacaactctgagagtcagcagagaagtctaatttaaagatgagtgatggagagttccaaggattgagccttgatgttctttgtcattccttcgcaggaatctcaaaggccaggctcccatccatcatgatggggagaggtgggaaagggctggctggtcctgtcaactccgataaacaggtgaaacactggccaggtgttcctggaactgggatctccccttttctctcccatgctgagctgcttcttggaaacattcgcaagagggtgacagtcttccctccagatcccttcttcgtccccagggcaccagaatagcagctgacagccccagcacaagtccttggattctttgtcatgtttaagaggaggctgctgtgtgacttcagacaatttcagcctcctgcgcatcagttctctctcatctgtgaaatggagacaatccttctatcttagggctgcaacacaaggatccagtaatataaccaggcacagagcaggacgctgcagcgatactgcctcctcccttgtcttctgggtggaattttgcaagcaacggtgtctgagcagaaaat

SEQ ID NO: 356196 - DNA, 749 bp, Homo Sapiens
  misc_feature (194)..(249): n is a, c, g, or t
gagacacagtacaacaggtctttaatgtatatataaatatgcctacataacagagtttgataagagaagttttggctatatacaactctgcatgtaatcaaactctagaacatcaaatgcaactccactgcatagctgttttgacagagcaacagttaagcataaaatagctttgcaccttattattttggagnnnnnnnnnnnnnnnnnnnnnnnnnnnnnnnnnnnnnnnnnnnnnnnnnnnnnnnngttgttgaggatagggtaaacaacaaaaaagaaaataatttgatccatatgtgatatttggctgaagattaacagtgttaagtctaaccaacagcgagataattttaatttccaaagcatcttctaccgtttattagcaatatttggatattaagggaagacatttgccttaacaaaaactatactgaaaaagacaaatgaattgaaaaagacaaaaatactatccaagaattacaataaaaaatttggttaagttggaaagcctatcaaattaccttccaaattgcttttttaaagcaatttggtaagtttgaaaacctagcccaaaacaaattaatgacaagtgggtttctccagacgattaatgaagaaaaacatacttatgtgaatcaataaatatgttatttctctcaacctctttttatgctttgaaaacttgttctaaaaaagaaccattgatacatcattttgacatttctatttagtctgaaaatctcttt

SEQ ID NO: 356197 - DNA, 1888 bp, Homo Sapiens
  misc_feature (284)..(318): n is a, c, g, or t
ccgcggctgcttcctgggaaggtcgtgagtcccgctgagctgtccccggtgccgccgacccgggccgtgtgcccgtggctccagccgctgccgcctcgatctcctcgtctcccgctccgccctcccttttccctggatgaacttgcgtcctttctcttctccgccatggaattctgctccgtgcttttagccctcctgagccaaagaaaccccagacaacagatgcccatacgcagcgtatagcagtaactccccagctcggtttctgtgccgtagtttacagnnnnnnnnnnnnnnnnnnnnnnnnnnnnnnnnnnngcatttttgatacctcatattctgtttacacatcttgaaaggcgctcagtagttctcttactaaacaaccactactccagagaatggcaacgctgattaccagtactacagctgctaccgccgcttctggtcctttggtggactacctatggatgctcatcctgggcttcattattgcatttgtcttggcattctccgtgggagccaatgatgtagcaaattcttttggtacagctgtgggctcaggtgtagtgaccctgaagcaagcctgcatcctagctagcatctttgaaacagtgggctctgtcttactgggggccaaagtgagcagaaaccatccgtgaaggggcttgattgacgtggagatgtacaactcgactcaagggctactgatggccggctcagtcaggggctatgtttgggtctgctgtgtggcaactcgtgggcttcgtttttgaaagctccctatttctggaacccatggaattgtttggggcaactattgggttctccctcgtggcaaaggggcaggagggtgtcaagtggtctgaactgataaaaattgtgatgtcttggttcgtgtccccactgctttctggaattatgtctggaattttattcttcctggttcgtgcattcatcctccataaggcagatccagttcctaatggtttgcgagctttgccagttttctatgcctgcacagttggaataaacctcttttccatcatgtatactggagcaccgttgctgggctttgacaaacttcctctgtggggtaccatcctcatctcggtgggatgtgcagttttctgtgcccttatcgtctggttctatgtatgtcccaggatgaagagaaaaattgaacgagaaataaagtgtagtccttctgaaagccccttaatggaaaaacaagaatagcttgaaagaagaccatgaagaaacaaagtggtctgtcggtgatattgaaaacaagcatcctgtttctgaggtagggcctgccactgtgcccctccaggctgtggtggaggagagaacagtctcattcaaacttggagatctggaggaagctccagagagagagaggcttcccagcgtggacttgaaagaggacaccagcatagatagcaccgtgaatggtgcagtgcagttgcctaatgggaaccttgtacagttcagtcaagccgtcagcaacaaataaacctccagtggacactaccagtatcacagcgtgcataaggattccggccctgtaccaaaagagctactcccataaaattacatctctgccaaggtggggcagatcgcatgcggagaactccggtcgacacacacccttaacggtcgcaacacactcagcctactcacctatccataactacacataggccactcactgcgggcattgcacctccggagaattaccattcccggggcccacactgacaccgggtgcacacacgcacgcggcgcacaaacaacagcgggcgagaactgccgacacattggcccataccagccggaatccccaacgaacgcgaaacttcgacagcgacaagaaaccacccag

SEQ ID NO: 356198 - DNA, 2224 bp, Homo Sapiens
  misc_feature (40)..(40): n is a, c, g, or t
  misc_feature (1751)..(1768): n is a, c, g, or t
tccacaaaggctttaaaaacctccccccttcccggggtanggtagcgaggctgggtggccgaattcggcacgagggttcatctcggtgggatggtgcagttttctgtgcccttatcgtctggttctttgtatgtcccaggatgaagagaaaaattgaacgagaaataaagtgtagtccttctgaaagccccttaatggaaaaaaagaatagcttgaaagaagaccatgaagaaacaaagttgtctgttggtgatattgaaaacaagcatcctgtttctgaggtagggcctgccactgtgcccctccaggctgtggtggaggagagaacagtctcattcaaacttggagatttggaggaagctccagagagagagaggcttcccagcgtggacttgaaagaggaaaccagcatagatagcaccgtgaatggtgcagtgcagttgcctaatgggaaccttgtccagttcagtcaagccgtcagcaaccaaataaactccagtggccactaccagtatcacaccgtgcataaggattccggcctgtacaaagagctactccataaattacatcttgccaaggtgggagattgcatgggagactccggtgacaaacccttaaggcgcaataatagctatacttcctataccatggcaatatgtggcatgcctctggattcattccgtgccaaagaaggtgaacagaagggcgaagaaatggagaagctgacatggcctaatgcagactccaagaagcgaattcgaatggacagttacaccagttactgcaatgctgtgtctgaccttcactcagcatctgagatagacatgagtgtcaaggcagagatgggtctaggtgacagaaaaggaagtaatggctctctagaagaatggtatgaccaggataagcctgaagtctctctcctcttccagttcctgcagatccttacagcctgctttgggtcattcgcccatggtggcaatgacgtaagcaatgccattgggcctctggttgctttatatttggtttatgacacaggagatgtttcttcaaaagtggcaacaccaatatggcttctactctatggtggtgttggtatctgtgttggtctgtgggtttggggaagaagagttatccagaccatggggaaggatctgacaccgatcacaccctctagtggcttcagtattgaactggcatctgccctcactgtggtgattgcatcaaatattggccttcccatcagtacaacacattgtaaagtgggctctgttgtgtctgttggctggctccggtccaagaaggctgttgactggcgtctctttcgtaacatttttatggcctggtttgtcacagtccccatttctggagttatcagtgctgccatcatggcaatcttcagatatgtcatcctcagaatgtgaagctgtttgagattaaaatttgtgtcaatgtttgggaccatcttaggtattcctgctcccctgaagaatgattacagtgttaacagaagactgacaagagtctttttatttgggagccagaggagggaagtgttacttgtgctataactgcttttgtgctaaatatgaattgtctcaaaattagctgtgtaaaatagcccgggttccactggctcctgctgaggtcccctttccttctgggctgtgaattcctgtacatatttctctactttttgtatcaggcttcaattccattatgttttaatgttgtctctgaagatgacttgtgannnnnnnnnnnnnnnnnnaaaccatgaagagccgtttgacagagcatgctctgcgttgttggtttcaccagcttctgccctcacatgcacagggatttaacaacaaaaatataactacaacttcccttgtagtctcttatataagtagagtccttggtactctgccctcctgtcagtagtggcaggatctattggcatattcgggagcttcttagagggatgaggttctttgaacacagtgaaaatttaaattagtaacttttttgcaagcagtttattgactgttattgctaagaagaagtaagaaagaaaaagcctgttggcaatcttggttatttctttaagatttctggcagtgtgggatggatgaatgaagtggaatgtgaactttgggcaagttaaatgggacagccttccatgttcatttgtctacctcttaactgaataaaaaagcctacagtttttagaaaaaaa

SEQ ID NO: 356199 - DNA, 1095 bp, Homo Sapiens
  misc_feature (690)..(724): n is a, c, g, or t
aggtgtgcctttggggtggcaggtagtgtcgagaccgcgggaggaatatataatgcccgtgcttatttcccgagaaggccgtggggagctcgggacccaagggccttcccctatttttttccgttccaggcccccttgaccacccctcctgccccctttgcccacgaggggagaaaacccaataggtcccccccacccataccaaggggttcccagaaatagggagccttcaaaaaacgaagcccaggagttgccaccccagcaggaaccaaaccatagccacggactgaggccggccatcagtagcccttgagtcgagttgtacatctccacgtcaatcaagcccttccggatggtttcgctcactttggcccccagtaagacagagcccactgtttcaaagatgctagctaggatgcaggcttgcttcagggtcactacacctgagcccacagctgtaccaaaagaatttgctacatcattggctcccacggagaatgccaagacaaatgcaataatgaagcccaggatgagcatccataggtagtccaccaaaggaccagaagcggcggtagcagctgtagtactggtaatcagcgttgccattctctggagtagtggttgtttagtaagagaactactgagcgcctttcaagatgtgtaaacagaatatgaggtatcaaaaatgcnnnnnnnnnnnnnnnnnnnnnnnnnnnnnnnnnnnctgtaaactacggcacagaaaccgagctggggagttactgctatacgctgcgtatgggcatctgttgtctggggtttctttggctcaggagggctaaaagcacggagcagaattccatggcggagaagagaaaggacgcaagttcatccagggaaaagggagggcggagcgggagacgaggagatcgaggcggcagcggctggagccacgggcacacggcccgggtcggcggcaccggggacagctcagcgggactcacgaccttcccaggaagcagccgcgggggtttcagcggccgagaagaagaaccacgcagagagcgccggcagccatcactccagcggagcaccccgccggcccctacttccgct

SEQ ID NO: 356200 - DNA, 981 bp, Homo Sapiens
  misc_feature (54)..(90): n is a, c, g, or t
aggaactgatagatcactatagggcgaaccgcgagctcatcgcggtggcggcgnnnnnnnnnnnnnnnnnnnnnnnnnnnnnnnnnnnnnatcaggccaaatcggccgagctcgaattcgtcgagagcgggggtgttacggggacactggcccgactactttcgttccgtcttccatcgttttctctcgtgcaatggcgtccgggctggtaagattgctgcagcagggacatcgctgcctcctggctccagtcgcccccaagctggtccctccggttcggggagtgaagaagggattccgcgccgccttccgcttccagaaggagttagagcggcagcgccttctgcggtgcccgccgccgcccgtgcgccgttcagagaagccgaactgggattaccatgcagaaatacaagcttttggacatcggttacaggaaaacttttccttagatcttctcaaaactgcatttgttaatagctgctatattaaaagtgaggaggccaaacgccaacaacttgggatagagaaagaagctgttcttctgaatcttaaaagtaatcaagaactatccgaacaagggacatctttttcacagacttgccttacacagtttcttgaagacgagtacccagacatgcccactgaaggcataaaaaatcttgttgactttctcactggtgaggaagtcgtgtgtcacgtggctagaaacttggctgtggagcagttaacactgagtgaagaattcccagtgcccccagctgtgttacagcagactttctttgcagttattggagccctgttacagagcagtggacctgagaggactgcacttttcatcagggacttcttaattactcaaatgactggaaaagagctctttgagatgtgggaagataattaaatcccatggggtattgggagaagaactggggaaagggcatgtttagttccggaatcaagaattaataaggaagctggtgg

SEQ ID NO: 356201 - DNA, 1355 bp, Homo Sapiens
  misc_feature (35)..(35): n is a, c, g, or t
  misc_feature (48)..(48): n is a, c, g, or t
  misc_feature (62)..(98): n is a, c, g, or t
tctagacgtcactaactagggcgacccccgcgagntgttaatcctggncgggatggcggcgnnnnnnnnnnnnnnnnnnnnnnnnnnnnnnnnnnnnnatcaggccaaatcggccgagctcgaattcgtcgagagcggatcgttttctctcgtgcaatggcgtccgggctggtaagattgctgcagcagggacatcgctgcctcctggctccagtcgcccccaagctggtccctccggttcggggagtgaagaagggattccgcgccgccttccgcttccagaaggagttagagcggcagcgccttctgcggtgcccgccgccgcccgtgcgccgttcagagaagccgaactgggattaccatgcagaaatacaagcttttggacatcggttacaggaaaacttttccttagatcttctcaaaactgcatttgttaatagctgctatattaaaagtgaggaggccaaacgccaacaacttgggatagagaaagaagctgttcttctgaatcttaaaagtaatcaagaactatccgaacaagggacatctttttcacagacttgccttacacagtttcttgaagacgagtacccagacatgcccactgaaggcataaaaaatcttgttgactttctcactggtgaggaagtcgtgtgtcacgtggctagaaacttggctgtggagcagttaacactgagtgaagaattcccagtgcccccagctgtgttacagcagactttctttgcagttattggagccctgttacagagcagtggacctgagaggactgcacttttcatcagggacttcttaattactcaaatgactggaaaagagctctttgagatgtggaagataataaatcccatggggctattggtagaagaactgaagaaaaggaatgtttcagctcctgaatcaagacttactaggcagtctggtggcaccacagctttgcctttgtattttgttggcttatactgtgataaaaagttgattgcagaaggacctggggaaacagtattggttgcagaagaagaggctgctcgagtggcccttagaaaactttatggattcacagaaaatagacggccgtggaactattccaagcccaaagaaaccttgagagcagaaaagagcatcactgccagctagccgccatggatgcagcagcctgaaacttgagagcgaaagtgagataaatgtcaaaggtgtttcaagccagacattttcacaattgtgaagaaatagatgttttgtttctgttttttactgtgttcccaaaattaaataaatgttaaccaagtcacagtgtttttggtttagtttttctgaaatcttggtttgatcaaatc

SEQ ID NO: 356202 - DNA, 1372 bp, Homo Sapiens
tggggcgcttgcaggtccctccccgcgcaagtgctcgccccgcccccggggccgcacccacagccccggctaccccggagaagcctgacttgagaaccctttctgcagagtcccggcagtgcgggactccggtagccgcccctccggtagccgcccctcctgcccccgcgccgccgccctatatgttgcccgccgcggcctctggggcatggagcacgctgcccagccctggcgatggcaacggcgacgggggtggcggaggagcgcctgctggccgcgctcgcctacctgcagtgcgccgtgggctgcgcggtcttcgcgcggaatcgtcagacgaactcagtgtacggccgccacgcgctgcccagccacaggctccgagtgccggcgcgggccgcctgggtggtgcaggagctgccctcgctggccctgccgctctaccagtacgccagcgagtccgccccgcgtctccgcagcgcgcccaactgcatcctcctggccatgttcctcgtccactacgggcatcggtgcttaatttacccatttctgatgcgaggaggaaagcctatgccactgttggcgtgtacaatggcgattatgttctgtacctgtaacggctatttgcaaagcagatacttgagccattgtgcagtgtatgctgatgactgggtaacagatccccgttttctaataggttttggcttgtggttaacgggcatgttgataaacatccattcagatcatatcctaaggaatctcagaaaaccaggagatactggatacaaaataccaaggggaggcttatttgaatacgtaactgcagccaactattttggagaaatcatggagtggtgtggctatgccctggccagctggtctgtccaaggcgcggcttttgctttcttcacgttttgttttttatctggtagagcaaaagagcatcatgagtggtacctccggaaatttgaagagtatccaaagttcagaaaacttataattccatttggattaagtgcgttttcatgaaattatcttcaacttgaagctttccaattggcgcttctctatggactttgtaaataacgttatatctttgtaatttcctgctactttatcattttcacgatgtcctctaaggaattttatactagtaattttgcatctacctaataagttacctaaattcggctgcacatgcagggttgcatattcctactgtggtaccgggtcagaagattcaagctctgggtaacacctgctgatatttttctcaatttccaatttactccttgggcaatgtctgccagagtgttgaaaccagaacttaaacggactggtgctttcgacacaaacagtcaaaccctttagccta

SEQ ID NO: 356203 - DNA, 1448 bp, Homo Sapiens
  misc_feature (15)..(15): n is a, c, g, or t
  misc_feature (22)..(22): n is a, c, g, or t
  misc_feature (29)..(29): n is a, c, g, or t
  misc_feature (50)..(51): n is a, c, g, or t
  misc_feature (55)..(121): n is a, c, g, or t
  misc_feature (128)..(128): n is a, c, g, or t
  misc_feature (142)..(142): n is a, c, g, or t
  misc_feature (165)..(165): n is a, c, g, or t
  misc_feature (169)..(181): n is a, c, g, or t
  misc_feature (185)..(186): n is a, c, g, or t
  misc_feature (195)..(195): n is a, c, g, or t
  misc_feature (219)..(219): n is a, c, g, or t
  misc_feature (224)..(224): n is a, c, g, or t
  misc_feature (229)..(230): n is a, c, g, or t
  misc_feature (236)..(236): n is a, c, g, or t
  misc_feature (243)..(243): n is a, c, g, or t
  misc_feature (259)..(260): n is a, c, g, or t
  misc_feature (269)..(269): n is a, c, g, or t
  misc_feature (287)..(287): n is a, c, g, or t
  misc_feature (293)..(294): n is a, c, g, or t
  misc_feature (302)..(396): n is a, c, g, or t
  misc_feature (404)..(404): n is a, c, g, or t
  misc_feature (423)..(423): n is a, c, g, or t
  misc_feature (425)..(425): n is a, c, g, or t
  misc_feature (427)..(427): n is a, c, g, or t
  misc_feature (431)..(431): n is a, c, g, or t
  misc_feature (445)..(445): n is a, c, g, or t
  misc_feature (459)..(459): n is a, c, g, or t
  misc_feature (493)..(493): n is a, c, g, or t
tatttccagagaagngcctcangggaggngcggggtctcctaggcaactnnggannnnnnnnnnnnnnnnnnnnnnnnnnnnnnnnnnnnnnnnnnnnnnnnnnnnnnnnnnnnnnnnnnnacagggngtggggggtgcagngggagaggcacaaccaacaaganccannnnnnnnnnnnntttnntcctataangggtgtgtggagccctctactganaaagnttatnncctttnaaaaaanagcgaactgaaaaagnngaatttggnacataaagtgaataaatngataannagcaatannnnnnnnnnnnnnnnnnnnnnnnnnnnnnnnnnnnnnnnnnnnnnnnnnnnnnnnnnnnnnnnnnnnnnnnnnnnnnnnnnnnnnnnnnnnnnnaaccatcnttgtgaagtgtgagtggtngngnctgngtgagtgagggtcnctgcaagagatggnagtgcactcacataaggacagtttgagaagagtntcctgacaaggtgagtgtgggtctgtgggggtactaacagggtgagcctttacctccccaggcctgaacaggggcatggaaagggctgcctgacagggtgacaggagctgtgaccttaagccaagggcagccaggaatataatactgggaactcacgctctctcctgtgattggccagcaccactcccccaccctgacgttgagtgaagacaaatggaagccagaagtgtggtgagctaccagacattccatgcagcccgctgagaagccacgtgagtggggacagggctaaaggctaggcagggacagggctggctgtgtcccgaggctgctcctccggccctgacttcaggccctcagcccagtcgactcccacaacctcgcaattgggcagcatctcctccaccaatatctgagtgaggccagggttggacacggcagggaggtccgagatgtccagcctgcggaggttctggaggttggatgcaggcaggcccttcgtagttgatgtcacagtcaccggcatccacagtcttcgacaggcacttcacagaaattccagaactcctgagagaaatggccatacttagtctggcctgatccacgccctcgtagtcgaagtcacagtcaccgcgcatccacagcttcgacaggcacttcacagaaattccagaacacctgagacaaatggacatacttatctggcctcatccactccaggtctagaaaccgatttttctcatgcaccttgtacatctccctttggagcaagtaatccctcagagcctccacatcgtagaaatagttggtcaggaactggagtattgtccttttcttcttctgattgccctctggggccactgccgcacccaggcgatggatgccctgatacgcccattccacatgggggcgaccaggcgcaggacgcccagggagccgccatcttgctaagttt

SEQ ID NO: 356204 - DNA, 982 bp, Homo Sapiens
  misc_feature (13)..(13): n is a, c, g, or t
  misc_feature (16)..(16): n is a, c, g, or t
  misc_feature (52)..(52): n is a, c, g, or t
aagggcagccagnatnaatactggaactcacgctctctcctgtgattggccncaccactcccccaccctgacgttgagtgagacaaatggaagccagaagtgtggtgagctaccagacattccatgcagcccgctgagaagccacgtgagtggggacagggctaaaggctaggcagggacagggctgctgtgtcccgaggctgctcctccggccctgacttcaggccctcagcccagtcgactcccacaacctcgcaattgggcagcatctcctccaccaatatctgagtgaggccagggttggacacggcagggaggtccgagatgtccagcctgcggaggttctggaggtggtggaggcaggcgaggccccgttcggagatgcgggggcaaccggccagcgagagctcctgcaacgagtcggccagtgggtagaggcggctgagacaccagtcgtccacgtgggagcagcgctgcagcgacaaggactggagctccttcaggcggaggaggttatccaggccctcgtagttgatgtcacagtcaccggcatccacagcttcgacaggcacttcacagaaattccagaactcctgagagaaatggccatacttatctggcctgatccactccttgtctcgaaacttgactgcgcctccctgcttcaggatgaaaaaggcacctgcgccgtatggaccatgttgcttctccagccaggtgtaagatcgatttttctcatgcaccttgtacatctccctttggagcaagtaatccctcagagcctccacatcgtagaaatagttggtcaggaactggagtattgtccttttcttcttctgactgccctctggggccactgccgcacccaggcgatggatgcccctgatacgcccattccacatgggggcgaccaggcgcagggacgcccagggagccgccatcttgctaaggttatccatacattccgggcgtaccagcctgt

SEQ ID NO: 356205 - DNA, 519 bp, Homo Sapiens
tttaacttgaacagggaaagtttaatatagagaattactggctttaacagtgaactggaataatgagggcttcactggtaaaatgcttctgaattgactggaaatccatttggggtgctggggaacgttattcccagagaggtgcctcagtggaggcgctgtgtctcctacgcaacttctgagggctggagggtgccaagggcagctgctgaccgcctggtgcttcaggagctgggtgctggggaagccacatgcactgcggcgtccagaggcagaagcacaaccaacaagaaccacgaaggaggcgcctttcctcctataatgcctgtttggtgccctctactgacaaagcttatcccctttcaaaaaacagccaactgaaaaagctgaatttggaacataaagtcaataaatccataaccagcaatactatggggcctggggtgccctggccttttatgagtggagtggggcgaaagatgctgcatgtcctgcagtgggcacagcggacctgcacgg

SEQ ID NO: 356206 - DNA, 1078 bp, Homo Sapiens
tggaccggtccggaattcccgggatctccctgggcgtccctgcgcctggtcgcccccatgtggaatgggcgtatcaggggcatccatcgcctgggtgcggcagtggccccagagggcagtcagaagaagaaaaggacaatactccagttcctgaccaactatttctacgatgtggaggctctgagggattacttgctccaaagggagatgtacaaggtgcatgagaaaaatcgatcttacacctggctggagaagcaacatggtccatacggcgcaggtgcctttttcatcctgaagcagggaggcgcagtcaagtttcgagacaaggagtggatcaggccagataagtatggccatttctctcaggagttctggaatttctgtgaagtgcctgtcgaagctgtggatgccggtgactgtgacatcaactacgagggcctggataacctcctccgcctgaaggagctccagtccttgtcgctgcagcgctgctcccacgtggacgactggtgtctcagccgcctctacccactggccgactcgttgcaggagctctcgctggccggttgcccccgcatctccgaacggggcctcgcctgcctccaccacctccagaacctccgcaggctggacatctcggacctccctgccgtgtccaaccctggcctcactcagatattggtggaggagatgctgcccaattgcgaggttgtgggagtcgactgggctgagggcctgaagtcaagggccggaagagcagcctcgggacacagccagcccctgtcccctgcctagccttttacccctgtccccactcacgtgggcttctcagcgggccggcatggaatggcctgggaagctcaccccaccttccggggcttccatttgccctcactccaccttaagggtggggggaaccacgcccctcgccaacccgagcggaaaaagcggagcgctgcccagcatttcgatcccgcggcttgccctcggagctaagggcaacaggttccctgaccccctgatctgcacgacctcattttacacaccctgacacccgcgcagtgagatggacccacgc

SEQ ID NO: 356207 - DNA, 606 bp, Homo Sapiens
taccagacatttccatgcagcccgctgagaagcaacgtgagtggggacagggctaaaggctaggcagggacagggctggctgtgtcccgaggcgtgctcctccggccctgacttcaggccctcagcccagtcgactcccacaacctcgcaattgggcagcatctcctccaccaaaatctgagtgaggccagggttggacacggcagggaggtccgagatgtccagcctgcggaggttcggaggttatccaggccctcgtagttgatgtcacagtcaccggcatccacagcttcgacaggcacttcacagaaattccagaactcctgagagaaatggccatacttatctggcctgatccactccttgtctcgaaaccgatttttctcatgcaccttgtacatctccctttggagcaagtaatccctcagagcctccacatcgtagaaatagttggtcaggaactggagtattgtcctttccttcttctgattgccctctggggccactgccgcacccaggcgatggatgcccctgatacgcccattccacatgggggcgaccaggcgcagggacgcccagggagccgccatcttgctaaggtttcgt

SEQ ID NO: 356208 - DNA, 1143 bp, Homo Sapiens
  misc_feature (13)..(13): n is a, c, g, or t
  misc_feature (20)..(20): n is a, c, g, or t
  misc_feature (35)..(35): n is a, c, g, or t
  misc_feature (43)..(44): n is a, c, g, or t
  misc_feature (47)..(48): n is a, c, g, or t
  misc_feature (51)..(51): n is a, c, g, or t
  misc_feature (55)..(55): n is a, c, g, or t
  misc_feature (57)..(57): n is a, c, g, or t
  misc_feature (68)..(68): n is a, c, g, or t
  misc_feature (87)..(87): n is a, c, g, or t
  misc_feature (122)..(122): n is a, c, g, or t
  misc_feature (131)..(131): n is a, c, g, or t
  misc_feature (141)..(141): n is a, c, g, or t
gcgcggtggacgnaggggcncgggaaaggcgcccnttgctccnngcnncancttntnagggtcttctnggggcagcacatccgcatnggtccttcagccaagagcttgggagctctaccagnaggtgcctngcatcccggngggcacgcccgaggtcctgggggaggcatgtgggccctcccataccatgaggcctgctgtaatttggaggtgcagggccgggacccgggccgggcccagggccagggccagggccgggtcctgttgcggacaccgagggtggaggtagcgttggcatctgctgctgcatcccgggcatcggccgcttgccctgcaccgccatctgcaggtggtcggggaggggctgccccctggccagcatcttgtaggccatgatctgagctctgagctggtgcagctggttctggttaaatggggttgggccccggttctgctgccccaaggcctgggggtcagcaccatccagcggggcacctcctggcccggaagacatctggggccccgaagacgggccactggctggaactggactagaggcatgctcagagccacccaggggcgaggggtaaccttgggagtgctggtccatggggctgggcgggggccccatcccagcatggccccctgaccgcatccccattcctttcatctggttgtagcgcgggtcgtccgacatgcccttctcatgcatggactccatgggcttgtgcatctggtgcatgttgtcctgagggtaccctccaggcccctgggtggggatggggtgtcctgctgagggcggccctgggctgggccccatcatgctgtgggcggagcccggcgagggacccgggctagggcccagcatggctccaggggaagggccagggcccggggaaggacctggccgaggagttccgcccaggggtgggtctggagtggacatcttcacgggagctgcagacagtggcctcctgcaggagccgccggcgccgtcgacttcccggcgcctcccccgcccctccgcgcggggccgggggcagaatgggcgtctcgcttctcttcacgaaacaaagaagccgccgccgccgccaaacgaggggaagcctccggggaggaaaaattaatttaattaaggatcct

SEQ ID NO: 356209 - DNA, 1113 bp, Homo Sapiens
  misc_feature (929)..(930): n is a, c, g, or t
  misc_feature (943)..(943): n is a, c, g, or t
  misc_feature (950)..(950): n is a, c, g, or t
  misc_feature (964)..(964): n is a, c, g, or t
  misc_feature (974)..(974): n is a, c, g, or t
  misc_feature (996)..(996): n is a, c, g, or t
  misc_feature (1001)..(1001): n is a, c, g, or t
  misc_feature (1003)..(1004): n is a, c, g, or t
  misc_feature (1020)..(1020): n is a, c, g, or t
  misc_feature (1032)..(1032): n is a, c, g, or t
  misc_feature (1040)..(1040): n is a, c, g, or t
  misc_feature (1048)..(1048): n is a, c, g, or t
  misc_feature (1056)..(1056): n is a, c, g, or t
  misc_feature (1070)..(1070): n is a, c, g, or t
  misc_feature (1074)..(1074): n is a, c, g, or t
  misc_feature (1080)..(1080): n is a, c, g, or t
  misc_feature (1084)..(1084): n is a, c, g, or t
  misc_feature (1090)..(1090): n is a, c, g, or t
  misc_feature (1092)..(1092): n is a, c, g, or t
  misc_feature (1097)..(1097): n is a, c, g, or t
  misc_feature (1107)..(1107): n is a, c, g, or t
agcgggattaccgagggggtgcgggatgctgatgctgaactggccgatcctggtgagaggaagaagaaagggaggggaggggagaatcgaggacggacggcctagccaggccaagaatgcaattgccccggtggtgggagctgggagacccctgtgcttggacgggacagggtcgggggacacgcaggatgagccccgcgaccactggcacattcttgctgacagtgtacagtattttctccaaggtacactccgatcggaatgtatacccatcagcaggtgtcctctttgttcatgttttggaaagagaatattttaagggggaatttccaccttacccaaaacctggcgagattagtaatgatcccataacatttaatacaaatttaatgggttacccagaccgacctggatggcttcgatatatccaaaggacaccatatagtgatggagtcctatatgggtccccaacagctgaaaatgtggggaagccaacaatcattgagataactgcctacaacaggcgcacctttgagactgcaaggcataatttgataattaatataatgtctgcagaagacttcccgttgccatatcaagcagaattcttcattaagaatatgaatgtagaagaaatgttggccagtgaggttcttggagactttcttggcgcagtgaaaaatgtgtggcagccagagcgcctgaacgccataaacatcacatcggccctagacaggggtggcagggtgccacttcccattaatgacctgaaggagggcgtttatgtcatggttggtgcagatgtcccgttttcttcttgtttacgagaagttgaaaatccacagaatcaattgagatgtagtcaagaaatggagcctgtaataacatgtgataaaaaaattcgtactcaattttacattgactggtgnnaaatttcattggntgataanacaaagcaagtgtncacctatccnggagtgattcgtggagaggggnttttncnnatggtggggatacaancccctttgattnttgacaanagagactnttcccggntttcacaattaccngggngtgccncggngtggcncnggtcnttttataaanttgctt

SEQ ID NO: 356210 - DNA, 818 bp, Homo Sapiens
cgaggacggacggcctagccaggccaagaatgcaattgccccggtggtgggagctgggagacccctgtgcttggacgggacagggtcgggggacacgcaggatgagccccgcgaccactggcacattcttgctgacagtggaatatgaaagagacaaatgaagtagtggacagagaaagacttgacagtttgcttttaagcttttttattaagctgtgctgatggcataaatggaacagttaactggaagaccagacaggccaacaattttattatcagcagaaaaatggctgctgggatgaaagatgtgtacagtattttctccaaggtacactccgatcggaatgtatacccatcagcaggtgtcctctttgttcatgtattggaaagagaatattttaagggggaatttccaccttacccaaaacctggcgagattagtaatgatcccataacatttaatacaaatttaatgggttacccagaccgacctggatggcttcgatatatccaaaggacaccatatagtgatggagtcctatatgggtccccaacagctgaacaatgtggggaagccaacaatcattgagataactgcctacaacaggcgcacctttgagactgcaagggcataatttgataattaatataatgtctgcaagaagacttcccgttgccatattcagcagaattcttcattaggaatatgacatgtgaagcaactgtaggacagtggaggttcttggagaccttacctggcgcagtggaacaatgtgtggcagcagagcgccgaacgccataaactcacatcggcctag

SEQ ID NO: 356211 - DNA, 899 bp, Homo Sapiens
  misc_feature (668)..(668): n is a, c, g, or t
  misc_feature (719)..(719): n is a, c, g, or t
  misc_feature (741)..(741): n is a, c, g, or t
  misc_feature (747)..(748): n is a, c, g, or t
  misc_feature (751)..(751): n is a, c, g, or t
  misc_feature (845)..(845): n is a, c, g, or t
  misc_feature (851)..(851): n is a, c, g, or t
  misc_feature (854)..(854): n is a, c, g, or t
  misc_feature (857)..(857): n is a, c, g, or t
  misc_feature (861)..(861): n is a, c, g, or t
  misc_feature (870)..(870): n is a, c, g, or t
ggcgagtgggcctctgctcgtgggtggttctcgtggaggtcagctcccgcgtgtctccgctcgacagggtgcttgggcaggtaagggtccgctcagtagcccaaccctctctgtatgcagctccccaaattcagcgctgcgctcaggcatggcagccacccgttacgtggggccgttcgcatttgcatttattgaggtcaaataaaatgctggaaattggtgcctggtgacactgtcaggttggtggttaccctagcaggtcggcccagcccctgaacgcttccatcactgccgaaagccctgtgaggaggcgcagagctgagcattccccgccgttgcgtgggcccccctctacctgccgcgtttttcctctttgctgcagagcccatcgggtaggcgcgggccatggcgcagtacaagggcaccatgcgcgaggcaggccgtgccatgcacctcctcaagaagcgcgaaaagcagcgggagaagatggaggtgctgaaacagcgcatcgccgaggagacacatcctcaagtcgcagagtggacaagaggttctcggcgcattacgacgccgtggaggccgagctgaagtccagcacggtgggcctggtgaccctgaacgacatgaaggcccggcaggaggccctggtcagggagcgcgagggccantggccaagcgccacaacctgggaggagcagcggctgcagcaggagcggcangcgcacaggagcagcggcgcancgcaannganagatctcctgcctgtcctttgcactagacgacctcgatgaccaggccgacgcggcgaggccaggcgcgccggaaacctgggcaagaaccccgangtgganacnagnttcntgccagacngcgaccgcgaggaggaggagaaccggctc

SEQ ID NO: 356212 - DNA, 1650 bp, Homo Sapiens
acgcctccacttcctgtgtccacggctgtcgcgagagcccggggcgagtgggcctctgctcgtgggtggttctcgtggaggtcagctcccgcgtgtctccgctcgacagggtgcttgggcagagcccatcgggtaggcgcgggccatggcgcagtacaagggcaccatgcgcgaggcaggccgtgccatgcacctcctcaagaagcgcgaaaggcagcgggagcagatggaggtgctgaagcagcgcatcgccgaggagaccatcctcaagtcgcaggtggacaagaggttctcggcgcattacgacgccgtggaggccgagctgaagtccagcacggtgggcctggtgaccctgaacgacatgaaggcccggcaggaggccctggtcagggagcgcgagcggcagctggccaagcgccagcacctggaggagcagcggctgcagcaggagcggcagcgggagcaggagcagcggcgcgagcgcaagcgtaagatctcctgcctgtcctttgcactagacgacctcgatgaccaggccgacgcggccgaggccaggcgcgccggaaacctgggcaagaaccccgacgtggacaccagcttcctgccagaccgcgaccgcgaggaggaggagaaccggctccgagaggagctgcgccaagagtgggaggcgcagcgcgagaaagtgaaggacgaggagatggaggtcaccttcagctactgggacggctcgggccaccggcgcacggtgcgggtgcgcaagggcaacacggtgcagcagttcctgaagaaggcgctgcaggggctgcgcaaggacttcctggagctgcgctccgccggcgtggagcagctcatgttcatcaaggaggacctcatcctgccgcactaccacaccttctacgacttcatcatcgccagggcgaggggcaagagcgggccgctcttcagcttcgatgtgcacgatgacgtgcgcctgctcagcgacgccaccatggagaaggacgagtcgcacgcgggcaaggtggtgctgcgcagctggtacgagaagaacaagcacatcttccccgccagccgctgggaggcctatgaccccgagaagaagtgggacaagtacaccatccgctaacacccgcctgccagagcggaaaccgggggtggggggagacactcatttctaggccccatcaccagtcacttgatttcgtgaccttgatttcttcccccaaatttaataaagacagagggttctcatgattcacattggttgtgctattgctgatgttatgctttggttgcttggttggtcttttctgagtattttagtgttgccacctggatttgctgcattgctctgctgagctgtattgaaaccatgactgggcccactgtcagacagaaattagaataggaggcacattttttacctggtggttatgagcatggacttgggggccacagtgactgagtttgattcccgacacagcctcctccttgctgtgtagttttgggtaagcttattaaacccccatgcctcagtttggtcacctgtaaaaggaaataacaagagcacttactttataagattgatgtgagtattaagtgaattaatatttgtaaaacgcttagctcttaataaatgtttctgttcttatt

SEQ ID NO: 356213 - DNA, 440 bp, Homo Sapiens
  misc_feature (37)..(37): n is a, c, g, or t
ccccaagaatccacaatggttgtgcctaatgcctgangttaagcccttggttgggttgggttgggcccttttcctgaagtaattttaagtgttggcccacccggaatttgcctgccattgctcctgcctgaagcctgtaattgaaaacccatgactgggccccactgtccagacagaaattagaataggaggccacattttttaccctggtggttatgaagccatggacttgggggcccacagtgaactgagtttgattccccgacacagcctcctccttgctgtgtagttttgggtaagcttattaaacccccatgcctcagtttggtcacctgtaaaaggaaataacaagagcacttactttataagattgatgtgagtattaagtgaattaatatttgtaaaacgcttagctcttaataaatgtttctgttgttatt

SEQ ID NO: 356214 - DNA, 2351 bp, Homo Sapiens
  misc_feature (46)..(73): n is a, c, g, or t
  misc_feature (1514)..(1529): n is a, c, g, or t
  misc_feature (1683)..(1733): n is a, c, g, or t
  misc_feature (2188)..(2218): n is a, c, g, or t
cgcgcggtgatcgttggcgccgaggggaggaggcagccgctgcgtnnnnnnnnnnnnnnnnnnnnnnnnnnnntgcgttgcgcagatccgggccgcggctgtggggagggcgacggagcgggtgaccttccggaggcgggagcgagcgaggaggcccgggagcgccgagcgtcgccgccgccgccgccatgaacaactcgggcgccgacgagatcgggaagctcttcgtgggcggtcttgactggagcacgacccaagagactctgcgcagctacttttcccaatatggagaagtcgtagattgtgttatcatgaaagataaaaccaccaaccagtctcgaggctttgggtttgtcaaatttaaagacccaaactgtgtggggacggtgctggccagcagaccgcacacgctagatggccgaaacatcgaccccaagccatgcacaccccgggggatgcagccggagagaacacggccgaaggaaggatggcagaaaggacccaggagcgataacagtaaatcaaataagatatttgtcggtggaattcctcacaattgtggtgagacagagctcagggaatacttcaagaagttcggagtggtcacggaggtagtcatgatctatgacgccgagaagcagaggccccgaggttttggatttattactttcgaggacgaacaatcagtggaccaggctgtcaacatgcattttcacgacatcatgggcaaaaaagtggaagttaaacgagctgagcctcgggacagcaagagccaagcgccgggacagccaggtgccagccagtgggggagccgggttgtgcccaacgctgccaatggctgggcaggccagcccccgcccacgtggcagcaaggatatggcccgcaaggaatgtgggtgccggcaggacaggcgattggtggctatggaccgccccctgcaggaagaggagcccccccgccacccccaccgttcacctcctacatcgtgtccacccctcctggaggctttccccctccccagggcttccctcagggctacggtgccccgccacagttcagttttggctacgggcctccacctccaccgccagatcagtttgcccctccgggggttcctcctccaccagccactcccggggcagcacctctggctttcccaccgcctccgtctcaggctgccccggacatgagcaagcccccgacagctcagccagacttcccctatggtcagtatgcaggttacgggcaggacttgagtggcttcggacagggcttctcagaccccagccagcagcctccttcctacgggggtccctccgtgccagggtcggggggcccccccgccggcggcagcggctttggacgagggcagaaccacaacgtgcaagggttccacccctaccgacgctagcccgcggcgccgcgacgtctgcacggcccagacccaggattccaaacttgtgaactcgtgacaatcacaaacttggcggcaaagtggcgactcaaccttgcnnnnnnnnnnnnnnnnagggcgcgaggcttttggagcggctgtgggtgtcgtctggactgaggtttttaaatatttctttctctaacccatcagcacaataaaaaaaagtcactggttcaacaacagggtttaaaaaaaatgtcttcagctttaattcaaaacttcaggnnnnnnnnnnnnnnnnnnnnnnnnnnnnnnnnnnnnnnnnnnnnnnnnnnnacggtatattgtaaacttttatgttaaagaaaaaatatacatttacaaattgtgagatttttaagagaaattttctacgatgtatactggcttattttttaatttaaaacggggtttccgtcggcactggtggagggggtgcgctgttagtcccctcgctcctggctttgggggttgggacttggtggtccagaaactctgggagcttctagaagaaatctactgagtgtatttctgttttttgtttaattccttgcttttgtcgactgacctgcttggtagtgtctgaggtgaactgtgggggttgcgcacagccagccgcgtggatcccacgcagcgctgaaccgaaccgagtaggaagcctttctccccaggcacgtggcttcagggcgtttcccattgaccagtttgaccctggtttgaataaagagaagtgcgtttggattagaaacccnnnnnnnnnnnnnnnnnnnnnnnnnnnnnnngggcggcccggctctagagaaatccccctcgaggggggcccaaagcttacgccgtaccccagctttccttttgtacaaaaggggggccccccaaataaaggggagtcccgaattttaaaaaggcttaggggca

SEQ ID NO: 356215 - DNA, 373 bp, Homo Sapiens
gggcacgggtgacctcccggctccacctgaggaccccagagaaacctgagacttctaagcctccagagggcagagagcgccgagcgtcgccgccgccgccgccatgaacaactcgggcgccgacgagatcggcaagctcttcgtgggcggtcttgactggagcacgacccaagagactctgcgcagctacttttcacaatatggagaagtcgtagattgtgttatcatgaaagataaaaccaccaaccagtctcgaggctttgggtttgtcaaatttaaagacccaaactgtgtggggacggtgctggccagcagaccgcacacgctagatggcaaaaacatcgaccacaagccatgcacaccccgggggatg

SEQ ID NO: 356216 - DNA, 267 bp, Homo Sapiens
cagccattggcagcgttgggcacaacccggctcccccactggctggcacctggctgtcccggcgcttggctcttgctgtcccgaggctcagctcgtttaacttccacctaaacaaaccgagctctggtttagggcgaggctgcgggtcccagcacccccttccctttagacacaccctcgggtaacttatgactacacttagcatcttacaacttaagactaaatacttaactataaaccttatttaggccagtagcatttttgtcc

SEQ ID NO: 356217 - DNA, 458 bp, Homo Sapiens
  misc_feature (356)..(356): n is a, c, g, or t
acttgaagacaccccacattccaagatgcccgaggttcctgggaatgcctggggttcttcgatccggaaaatcctaccggcatcctcctagggagggattattattattatttttctttaatctggaagagaagagaacaagttgtgcttttccccccttcttcttgctaaatgccatggatataactgaataaagccgctcagggctttccccgcgtggacgtccgaggccaccatctgcctgcattcgccggagccgccggagggtttagctcgagtctgtctcgggcggggaaggatgcgtggccgagccggggagcccgggcgccccgcggagccggcctcggtgccacccnagccgggggtagatgctgcctcgcccaggcgctgagtgaccagaccatggagaccctgcttggtggcctgctagcgtttggcatggcgtttgccgtggtcga

SEQ ID NO: 356218 - DNA, 1143 bp, Homo Sapiens
  misc_feature (96)..(96): n is a, c, g, or t
  misc_feature (270)..(317): n is a, c, g, or t
aagagggtgggttccaagggtggcccaagcccgagtaacaaactttcttatcttccatcgcggcgacctggaggtccgaggcttcgtgctgcggtngaagggtggggaatacgactaaaaactgcagcccagcgcgcgcgagacgacccaagacccacgcgcactcgcacgagcgcgtgcacagacttggagcacagaccctcccttcagatccgcagtctctaggtactgaggcaggaactggtctctttgttacttttcgcgcgcgcnnnnnnnnnnnnnnnnnnnnnnnnnnnnnnnnnnnnnnnnnnnnnnnnctaatcctgcgtgcgtttgagggcgggaggggaaagggtgtcagaaacgttcactgcacaacctgttccctgcaattcgatgactgaagcgcgccgccccacacttcggaagggccgttggcgaggtgacgtgacctctttcatcccctggcgagaaaggccgaatgacccgggcgcacgcggcggagctcagcctgcagctgttgagcgagaccctcccagaactatcagcaagctgtcatcgcctccctttcccgctgtggggtggagggtggggggttcaagtcgattccaatgtacaaagagaagtagcgagaacaaaagcccaggcgcccccaaacatccagggcgcccagactggagctcgccggccggtattccagacccggccggcgtgcccgggtgagggtggggtctaccgagaggcagagagcagcggagggtctgtccacatgccctgctctcccggtaccaaggtctcggggcctgacctccgagtttctaatccagatcctgcagatgccgaaacgtcgagggctagcaattcccaaggtcatacagcaagttgaggacagggctcggactggaatctcgtcttttgggcacaccagacctcagggaaagtgaccgcatctcggccaaaagggctgtggcaggtgtcagcctcgaggtggcggctctggtgggaccaagctgcgccggaaggaacagagctagggcggcacccgcgcggcgagtgtagacacactcggagcggtcaccccctcgctgcgagctcccaggagcaaccctgatgctcagcgctggggggtggggtttgggggcc

SEQ ID NO: 356219 - DNA, 1634 bp, Homo Sapiens
  misc_feature (237)..(237): n is a, c, g, or t
  misc_feature (266)..(266): n is a, c, g, or t
  misc_feature (269)..(269): n is a, c, g, or t
  misc_feature (311)..(311): n is a, c, g, or t
  misc_feature (327)..(327): n is a, c, g, or t
  misc_feature (337)..(337): n is a, c, g, or t
  misc_feature (344)..(344): n is a, c, g, or t
  misc_feature (365)..(365): n is a, c, g, or t
  misc_feature (478)..(478): n is a, c, g, or t
  misc_feature (492)..(492): n is a, c, g, or t
  misc_feature (559)..(559): n is a, c, g, or t
  misc_feature (639)..(639): n is a, c, g, or t
tcttcaaattcagtatcttaattatacagtaacaggtgctgaatttatagtacaactatagtagatttcgcattcttacattacatagctgtgatacataccttgttatagcagtcagagccagccatctaaacttaaaaaaaggtggacacaaaagaatcctaacaaattatatacaactcacaagtaggggatagcacaccccagctctttatcctgacctactactaccaagtnagaaaagctcttatttgaatgtatatgangancaacaaaacaaagcagaacaatatacaccaacaacacaagancatatgctcgcgagtncacacaagtncccagcnaattttacatcattctttaanaattagagtttctagttgagtgaaccactggataatttgaatctgctaacttctttacactgggcatctgtattatgctgtcttctgccccaatgaactaacacataaaagantcatcttaactgtnatgattgttaatgctttattacacaaatctaatataatcaactcatgatttagactcaatgaatttnaaatgtttgatatgaccaagaattaaactaaagcttaactttgttacaaaaatgaagtatttgtaatcaaaactgcaganaacaaacttaacctactgaaagactttgaaagagtcaattgcgtgcaaataggagtttctaattataaataaatcttaactaattgactctaacaggacctctattaggaagaatttgttagcaaggaatttgaggagtaaacaatctaaccactgagaaaggacttaaaggaatttcattgaatttatttttagcaccattcaggtatttcactggaatcttggcccaattactctgagcacacaacctaaaatgcagttttagtactgaaaaaaaatggcataagtaaataattaagtaaataatttttatagtagccttaacccatatttaagtgtttgacaatggatactaagcaaatcagaaggtgcaaagatcatctgtagacaatgtggtgtcagcataacctaatgctttatcaggggtgtcaaatatgcagctcagctcctgtgaggatattttccttcccatgcccaggagagagatcattaatctaaatgtgtcactctcgtcaagctcagaccatagccttgaatctttctatagacatcccttatagatattgaagaacaaatgtatagagttaacacaaaaggcaaaccttaattgttatcccagccttaaacaattaaaaccccttctgaatcactgatacattttcacatagaaagtcagttaagtgctttgtcctcggctgaggacatgaatgttgagatagggaaggggttaaatgaggactaactaagcattccacatgtgtatttacccattcaatattattgcttacagaacagagatctaaactcccctaccaaggacctctcaaaaggccatgggatattttggacacatagcaagtgtcaaagcatataggtatttgctattttattctgaaaatatgtttgtgtatctctcatagccaggaaaaagtatacaatgaaaaataaacagattattagtaatatacaagtagatcatctggcttgtataacta

SEQ ID NO: 356220 - DNA, 2465 bp, Homo Sapiens
  misc_feature (134)..(189): n is a, c, g, or t
gctgggtggcgaattcggcacgaggctgcggctgggcgcccttcgctggttgctccacccgggacggcgacggcgacgaggaggagtactacgggtcggagccgcgggcccggggcctggccggcgacaaggannnnnnnnnnnnnnnnnnnnnnnnnnnnnnnnnnnnnnnnnnnnnnnnnnnnnnnntggacgccctgtcgctcagcagtagcctggacagcggactccgaacccctcagtgccggatctgcttccagggcccggagcagggggagctcttaagcccctgccgctgcgacggctcagtgcgctgcacgcatcacccctgcctcatccgctggatcagcgagaggggctcctggacctgtgagctctgctacttcaagcaccaggtcctggcgatcagcaccaagaacccactgcagtggcaggccatctccctgacggtcatccacaaggcccagattgctgccatagttctgggctcgctcttcctggttgccagcatctcctggctcatctggtcctcactcagcccttcagccaagtggcaacgacaggatctgctctttcagatctgctacggcatgtatggcttcatggatgtcgtctgcataggcctcatcatccatgaaggctcctctgtctaccgcatcttcaagcgctggcaggcagtgaaccagcagtggaaggtcctaaattatgacaagaccaaggacataggaggagatgcagggggagggacggcagggaagtcaggccccaggaactcacggacgggccccacctctggggccacgagccgccccccagctgcccagcgcatgcggacgctcttgcctcagcgctgcggttatacaatcttgcacctccttgggcagctgcggccaccagatgcccgttccagctcccattctggacgagaggttgtcatgagggtcactacagttctgaactggactccaggagcaggaatcttgagtcaatgcatcagtcagagaagaactctcatggctgctggaggtaccagctggacaaggtgtttggggcatgctgcccccgtcaccgaggatctgtgtgggtagcctcaagctggagacattgtctggcctcactgcccactgggtagagacacctggatgacatttcagtacccgctggcagctcctcccactcatccagagacggccggtgggcaggcggggagagcagctttccttccctggagagaaccgtctttacctcagctcctagggcctccagccccccagctccaccacggtgacttggtgaagggggaccaatgccagaagaaaggggctgtagacccctattccccaccccatggccacagggcatctggcaataagactagtatacattgacctcccgttccctgcatgagggcggggagttccccctgctccatcccccattgcatgggggaagggcataaagaatcatttatatgcacgtggagactcctttctcatctggggcttttctggagggctgggagatgtggggaggtttctctgcacaggttgcaaatcccaaatgcagcagtgggttctgagttgtaggtgtgactcccacttgctggtgaataattcatgttggctgctaggtggcagcactccgaggtatctaaagggtagacctggacctgccacctatgagttgtgtgatatagaaaaaaatctcttagctctggttttcctgtctacttcatagggttggaataaggataaatgagggacaggttggatgccgttgcagagaaaatcagcaatgacataaagagatttctagaatagttgatggtccatttatttcaaatagtagctggtgtaacaaattctaaaatgtgtttttcatctggagttgcacagaatcatggaattttgtgttgagtgacataataggtatggaaatatgaggggaaatagacattgcaaatgtgaagcatggtggttatttgttaagaatgagaactcctctgactctaaatatttgggcctgtgggctggggaaggctggagccatctgccttgttctggagatcatctgggttctatcagtccttctcaagtactgtgctcacccagaaaagcagtgtgaagtgaatttggactcatttggagtgagatggagggaatccccccactcagtgttatgagtctccaaccccagtttaagctatttccatggcagtttagggtcacaggtttgatcccggtgtgcccagccagtggtattaatggatggcattatgtttggaggcagcagcatagaggactgttgtttatagagaaaagatttgggaaggactgtttacaatgtgggtcagcctgaagcctgggcactttcttctgtgaccttggggttgtgtattatatgaatgatgctgtttttaagtaaaccattcaacagcaattaaataattccttcattcacggcta

SEQ ID NO: 356221 - DNA, 1693 bp, Homo Sapiens
ttcccgggatcggccccgccccacggaggagacgcgctttgtgctgggcgccggccgcgccagccacggcctgcggcgcccgcggcaccatgatctccaccaaggagaagaacaagatcccgaagacagcatgacgcttctgccctgcttctacttcgtggagctgcccatagtggcttcttccatcgtatccttgtacttcctggagctgaccgacctcttcaagccggccaaggtgggcttccagtgctatgaccgcactctctccatgccctacgtggagaccaacgaggagctcatcccgctgctgatgctgctcagcttggccttcgcggcccctgccgcctcgatcatggtggccgagggcatgttgtactgtctgcagtcccggctgtggggccgtgccggggggcccgccggggcggagggcagcatcaacgccggcggctgcaacttcaactccttcctgcggcgtacggtgcggtttgtgggtgtccacgtgttcggcctgtgtgccacagccctggtgacggacgtgatccagctggccacgggttaccacactcccttcttcctcaccgtctgcaagcccaactacactctcctgggcacgtcctgcgaggtcaacccctacatcacgcaggacatctgctccggccacgacatccacgccatcctgtctgcacggaagaccttcccgtcccagcacgccacgctgtcagccttcgccgcggtctatgtgtcgatgtacttcaactcggtcatctcggacaccaccaagctgctgaagcccatcctggtcttcgcctttgccatcgccgcgggcgtatgcgggctcacgcagatcacgcagtacccgcagccaccctgtggacgtgtatgccggcttcctcatcggggcgggcatcgctgcctacctggcctgccacgcggtgggcaacttccaggccccacctgcagagaagcccgcggccccggcccccgccaaggacgcgctgcgggccctgacgcagcggggccacgactcggtttatcagcagaataagtcggtgagcaccgacgagctggggcccccagggcggctggagggcgcgccccggcccgtggcccgcgagaagacctcgctgggcagcctgaagcgcgccagcgtggacgtggacctgctggccccgcgcagccccatggccaaggagaacatggtgaccttcagccacacgctgcccagggccagcgcgccctcgctggacgaccccgcgcgccgccacatgaccatccacgtgccgctggacgcctcgcgctccaagcaagctcatcagcgagtggaaacagaagagcctggaggggccgcgggctggggctgcccgacgacgccagccccgggcacctgcgcgcgcccgccgaaaccatggccggagcaggaggaaacaggaaggaggaccaacaggaaaacgcaggagaaggaacacgaggaacgactagggcccgggccccgtccttgcttcaaccgcaatttgccaggcgccgttcgggggttcgggacattccggtaattcttccccccgcgaagccgggggccccccgccaattgggtgaaccttcctcgaggcgaggccgccccaataagtgtattgcccgttcgcataaagaagccatgggcccccccgcccggtagcgctttgagcaaacccccccc

SEQ ID NO: 356222 - DNA, 1853 bp, Homo Sapiens
  misc_feature (70)..(127): n is a, c, g, or t
cggtccggaattcccgggatcagcgaagattaacctgaggggcgagccgctgcccccacctcgggggcgnnnnnnnnnnnnnnnnnnnnnnnnnnnnnnnnnnnnnnnnnnnnnnnnnnnnnnnnnnggcccgggacccgaggtcccgcgcccgggtcagtgaaaggcgtcttcccgttcccgccctccgcctcctctcgccggccagcaacatgggatgtaatatgtgcgtggtccagaaaccggaggagcagtacaaagtgatgctgcaggtgaacgggaaggagctctccaagctgtctcaggagcaaactctgcaggccctgcgctcctccaaggagcccctggtgatccaggtgctgagacgcagcccccgcctccggggggacagctcctgtcacgacctgcagctggtggacagtggcactcagaccgacatcaccttcgagcatatcatggcgctgggcaagctgcgtccgcccaccccgcccatggtcatcctggagccccccccaatcagccatgagtattatgacccggcggagtttatggagggcggcccgcaggaggcagaccgcttggatgagctggagtatgaggaggtggagctgtataaaagcagccaccgggacaagctgggcctgatggtttgctaccgcacggacgacgaggaggacctgggcatttatgtcggagaggtaaatcccaacagcattgcagccaaagacggccggatccgtgagggagaccgcatcatccagattaacggtgtagacgtccagaaccgggaagaggcggtggccatcctgagccaggaagagaacaccaacatctccctgctggtggcccgacctgagagtcagctggcgaaaaggtggaaggacagcgaccgggatgacttcctggatgactttggctctgagaatgagggggagctgcgtgctcgtaaactgaaatcaccccctgcccagcagcccggaaacgaagaggagaagggggctcccgatgccggcccaggcctgagcaacagccaggagctggacagcggggtgggccggactgacgagagcacccggaacgaagagagctctgagcacgacctgctgggggacgaacccccgagctccaccaacaccccgggaagcctgcgcaagtttggcctgcaaggggacgccctgcagagccgggacttccatttcagcatggactctctgctggccgagggggcggggctgggagggggcgacgtcccgggcctcacggatgaggagtatgagcgctaccgtgagctcctggagatcaagtgccacctggagaacggcaaccagctgggcctcctctttccccgggcctccggaggcaacagcgccctggacgtcaaccgcaacgagagcctgggccacgagatggccatgctggaggaggagctaaggcacctggaattcaagtgccgcaacatactgcgggcgcagaagatgcagcagctgcgtgagcgctgcatgaaggcctggctgctggaggaggagagcctctacgacctggcggccagcgagcccaagaagcacgagctgtccgacatctccgagctgcccgagaagtcggacaaggacagcaccagcgcctacaacactggggagagctgccgcagcaccccgctgcttgtggagcccctgcccgagagccccctgcggcgggccatggccggcaactccaacttgaaccggacccctcccggccccgctgttgccacccccgccaaggcagctcctccaccggggagccccgccaagttccggtccctctcccgggatcctgaggccggccggaggcagcacgcggaggagcgcggccgc

SEQ ID NO: 356223 - DNA, 1076 bp, Homo Sapiens
ggtgatctcagtttggcaccgacctgccctattgccaggccaggtcaatcagggagtcatcccgggcgtcgtgccgttcaaccttttcgccagctgactctcaagtcgggcaaccaaaagggaaatgttgtggttctcttcccgggctcagggatggccaccgctcttccgccgttctgcacggtcaacaccgttaatctggatgatccggtctccctcacggatccgccgtctttggctgcaatgctgttgcgatcttacctcctccgacattaaatgcccaggtcctcctcgtcgtccgtgcggtagcaaaccatcaggcccagcttgtcccggtggctgctgtttatacagctccacctcctcatactccagctcatccaagcggtctgcctcctgcggccgccctccataaactccgccgggtcataatactcatggctgattggggggacggtcatgagccaccaggcctggatgaaaggcccttcttccggtcgggccaaagaaagaagctgaagagatggaggaaattcagagcaggtagaggaatgagacagacaagggatgcaagaagattcaaggagtgatgcttgtgaggcggcagaggagagaggatggaggaggaggagctgaggccctcaaccctggcacttccggcagcgacgtcccggacaggagggtcctccctcggccagctcagagaggacgtacggctccaggatgaccatgggcggggtgggcggacgcagcttgcccagcgccatgatatgctcgaaggtgatgtcggtctgagtgccactgtccaccagctgcaggtcgtgacaggagctgtccccccggaggcgggggctgcgtctcagcacctggatcaccaggggctccttggaggagcgcagggcctgcagagtttgctcctgagacagcttggagagctccttcccgttcacctgcagcatcactttgtactgctcctccggtttctggaccacgcacatattacatcccatgttgctggccggcgagaggaggcggagggcgggaacgggaagacgcctctcactgacccgggcgcg

SEQ ID NO: 356224 - DNA, 1716 bp, Homo Sapiens
tttacgcgtccactattacgcattatgcccctttctcttcggttggaacggtccggaatcccgggatggggtgcgcgcccagactccgacccggaggcggaaccggcagtgcagcccgaagccccgcagtccccgagcacgcgtggccatgcgtcccctgcgcccccgcgccgcgctgctggcgctcctggcctcgctcctggccgcgcccccggtggccccggccgaggccccgcacctggtgcaggtggacgcggcccgcgcgctgtggcccctgcggcgcttctggaggagcacaggcttctgccccccgctgccacacagccaggctgaccagtacgtcctcagctgggaccagcagctcaacctcgcctatgtgggcgccgtccctcaccgcggcatcaagcaggtccggacccactggctgctggagcttgtcaccaccagggggtccactggacggggcctgagctacaacttcacccacctggacgggtacctggaccttctcagggagaaccagctcctcccagggtttgagctgatgggcagcgcctcgggccacttcactgactttgaggacaagcagcaggtgtttgagtggaaggacttggtctccagcctggccaggagatacatcggtaggtacggactggcgcatgtttccaagtggaacttcgagacgtggaatgagccagaccaccacgactttgacaacgtctccatgaccatgcaaggcttcctgaactactacgatgcctgctcggagggtctgcgcgccgccagccccgccctgcggctgggaggccccggcgactccttccacaccccaccgcgatccccgctgagctggggcctcctgcgccactgccacgacggtaccaacttcttcactggggaggcgggcgtgcggctggactacatctccctccacaggaagggtgcgcgcagctccatctccatcctggagcaggagaaggtcgtcgcgcagcagatccggcagctcttccccaagttcgcggacacccccatttacaacgacgaggcggacccgctggtgggctggtccctgccacagccgtggagggcggacgtgacctacgcggccatggtggtgaaagtcatcgcgcaacatcagaacctgctactggccaacaccacctccgccttcccctacgcgctcctgagcaacgacaatgccttcctgagctaccacccacaccccttcgcgcagcgcacgctcaccgcgcgcttccaggtcaacaacacccgcccgccgcacgtgcagctgttgcgcaagccggtgctcacggccatggggctgctggcgctgctggatgaggagcagctctgggccgaagtgtcgcaggccgggaccgtcctggacagcaaccacacggtgggcgtcctggccagcgcccaccgcccccagggcccggccgacgcctggcgcgccgcggtgctgatctacgcgagcgacgacacccgcgcccaccccaaccgcagcgtcgcggtgaccctgcggctgcgcggggtgccccccggcccgggcctggtctacgtcacgcgctacctggacaacgggctctgcagccccgacggcgagtggcggcgcctgggccggcccgtcttccccacggcagagcagttccggcgcatgcgcgcggctgaggacccggtggccgcggcgccccgccccttacccgccggcggccg

SEQ ID NO: 356225 - DNA, 974 bp, Homo Sapiens
  misc_feature (5)..(5): n is a, c, g, or t
  misc_feature (12)..(12): n is a, c, g, or t
  misc_feature (29)..(29): n is a, c, g, or t
  misc_feature (33)..(33): n is a, c, g, or t
  misc_feature (48)..(48): n is a, c, g, or t
  misc_feature (68)..(68): n is a, c, g, or t
  misc_feature (84)..(85): n is a, c, g, or t
cgtgntttcaantaccatacacaaagcanaccnacccccaagatctcncagcatctgcgaaggctcantggggtaggcctgagnngaagaatccaaagcactgtacagatgatcaaaacacttccggtagaacactgctgcagctgcacctctccttacagagccagagcctgctccatcagaggcctgcttccccttggctgatggtcagaagcctgcacaactggatcgccctaggacacagtcccacatgacatcccaaggctgggccaccatcatgatctttgccagctggtccgtctagccaagtggtgctactgctgcttgtgtggaaggggcttccaggtgggtgggagcttcctgtggattagggtgagtccgcagagaataaggaacactcctccccaccacaagacctcctggcactctccatacagcacatagcccaggaaggccgagctgaggatatttgaaaaagtcactgtgacagatgcaatggctgaagacatggagaaactgaggccccggctaaagaaggtccacatcagagaattggtgctcgccatcacaataatgcctaagacgcataaacccatgctcaccttaagagtcacgtggagagaaatgctcaggcacaagggacttaaaatgagaggtagagggtggatgtaggaggtgtagttcttccccgagagcgaactagcccaaccggagaaaaggttttaggtccctggtaagggaagaggcctcagtccccgacgtctcttaccacctcgctgccgaaggccagcttggcggaggcggcggccagggccccgaacgcgccggcgcacagacagttgaatacgccccaaaagcggcgccgcatcgcacccgcctggaggtgcggagggaattccgcgggggtgtcagggtacgcggtcgcggacacggcgccgcccggaggccccaggcctctcaggccatgttgcctg

SEQ ID NO: 356226 - DNA, 1026 bp, Homo Sapiens
  misc_feature (16)..(16): n is a, c, g, or t
  misc_feature (22)..(22): n is a, c, g, or t
tgacgtgcagtacccncggtanggtacgaggcctgggtggcgaattcggcacgagggccgagaggccgggccctccgggcggcgccgtgtccgcgaccgcgtaccctgacacccccgcggaattccctccgcacctccagtgcgggtgcgatgcggcgccgcttttggggcgtattcaactgtctgtgcgccggcgcgttcggggccctggccgccgcctccgccaagctggccttcggcagcgaggtgagcatgggtttatgcgtcttaggcattattgtgatggcgagcaccaattctctgatgtggaccttctttagccggggcctcagtttctccatgtcttcagccattgcatctgtcacagtgactttttcaaatatcctcagctcggccttcctgggctatgtgctgtatggagagtgccaggaggtcttgtggtggggacggagtgtcccttattctctgcggacttcaccctaatccacaggaagctcccaaacaccttggaagccactttccacacaagcagcagtagcaccacttggctagacggaccagctggaaagatcatgatggtggcccagccttgggatgtcatgtgggactgtgtcctagggcgatccagttgtgcagccttctgaccatcagccaagggaagcaggcctctgatggagcaggctctggctctgtaaggagaggtgcagctgcagcagtgttctaccggaagtgttttgatcatctgtacagtgctttggattcttcctcccaggcctaccccagtgagccttcgcagatgctggagatcctggggttggtctgctttgtgtatggtacttgaaaccacgctgtaattattgtcctgttgccaaacaaaagccagtcatgtaactctagaagcagtgactggtggggctttctgacagttccatgctgatgtatcaggccatctgtgtcatgcttatgtattatggcaagaagaggaaaactggattaataaatacgttttttgtaagttaaaaaaaa

SEQ ID NO: 356227 - DNA, 1885 bp, Homo Sapiens
  misc_feature (94)..(139): n is a, c, g, or t
  misc_feature (1235)..(1247): n is a, c, g, or t
  misc_feature (1365)..(1376): n is a, c, g, or t
cggcgcctcggccaccgcggccctggcccccgtcgcctccgacccgctgtcacccccgctctcggcgtccccgcgggacaagcaccccgggaannnnnnnnnnnnnnnnnnnnnnnnnnnnnnnnnnnnnnnnnnnnnncccagcgcgtccaactccttgctgtacactggggacctggaggcgctgcagaggttgcaggcgggcaacgtcgtgctcccgctggtgcacagggtgaccgggaccctggccgccaccagcacggccgcgcagagggtctacaccacgggcaccatccgctacgcgcccgccgaggtgaccctggccatgcagagcaacctgctgcccaacgcgcacgctgttaacttcgtggacgttaacagccccggctttggcctcgaccccaagacgcccatggagatgctctaccaccacgtgcaccggctcaacatgtcaggaccgttcggcggcgcagtgagcgcagctagcctgacgcagatgcccgccggcaacgtgttcaccacggccgagggactcttctccacgctgcccttccccgtctacagcaacggcatccacgcggcacagactctggagcgcaaggaggactgaggccccgcccgtcctgggcccggccaggccccgcttggaggaggcatcgtcggcattttcgtttagacctttaattctagcactttgaattcgagcaggtcagcgtcttctctcgccacgacggtccccattccaccccctctttctttcacctgacttattctttcgtgtaaagatatgtttattttttgccttcagagggtcagacgaccagttgcctgccgttttgtcttcttctaaggtgtgtgttgggttgttttgctttcctttgcatctttattaagatgtctttcatgtgtatatgcctctgccatagaatactcagtcttgtggtcaagagagttctcaagtgacaaccattggggtttcttcataaagatcttgatatgatcaagatggaaagagacaagcataaacaatgtgccctgtttgactaagtcaaatgaaatagggtggtttttgtttctgttcctaattcctttaaaaaatagggggaatagtattttagaattttatgcagaatttaattctctttttacggttaagattttaagattttcttacttgcacataaaaataatttgggttcttaaacttaatttctggcctgtgactagaatgtttnnnnnnnnnnnnngtcggactaaatgttaattactgaaacattaacttaatttctaaaaccatggtgctatcatttattaatctgtaatgtcttcatacaaaatgcagctcctgggctgggttttgggggnnnnnnnnnnnntgtgttctgtcctggtctggagtccgttgctgcagtctccttggttagttaagacaaagccctcattaacgtttgctgcaggacttaaaattttttacctcccaactaacaaacatagcctcacattaaatttaatgggtcagtaaagccccttttaaaggggctgctggaaaactcaatcaaactgatttgaggagcagtttaggtacatactgccttttgtttagctttttgttttccttactcagtctaactgaggctaattttgcaacttcaataacacttcggagtaaaagaaggaaaatatttaacatgtttttggtttttttcatttcttgcttaaaacaaaaaggaaggttgtatttggggggactggtttgatttgatggaatttctttccctttggttcttatttctgggttgaaaccaataagttttaaaactaaagaatgggttaataagcttcagacagataactgcaactgaaaactgcacattaagtaaaaaaa

SEQ ID NO: 356228 - DNA, 475 bp, Homo Sapiens
  misc_feature (117)..(162): n is a, c, g, or t
gcggccgcccgcaagactcagttcggcgcctcggccaccgcggccctggcccccgtcgcctccgacccgctgtcacccccgctctcggcgtccccgcgggacaagcaccccgggaannnnnnnnnnnnnnnnnnnnnnnnnnnnnnnnnnnnnnnnnnnnnncccagcgcgtccaactccttgctgtacactggggacctggaggcgctgcagaggttgcaggcgggcaacgtcgtgctcccgctggtgcacagggtgaccgggaccctggccgccaccagcacggccgcgcagagggtctacaccacgggcaccatccgctacgcgcccgccgaggtgaccctggccatgcagagcaacctgctgcccaacgcgcacgctgttaacttcggggacgttaacagccccggctttggcctcgaccccaagacgcccatggagatgctctaccaccacgtgcaccggctcaacatgt

SEQ ID NO: 356229 - DNA, 955 bp, Homo Sapiens
  misc_feature (942)..(942): n is a, c, g, or t
  misc_feature (948)..(949): n is a, c, g, or t
ggcggaagcaggaggcgggggcagcgtgcgcgctctggtcttctctcccgcggcgctggggcccgcgctccgctgctgttgctccattcggcgcttttctggcggctggctcctctccgctgccggctgctcctcgaccaggcctccttctcaacctcagcccgcggcgccgacccttccggcaccctcccgccccgtctcgtactgtcgccgtcaccgccgcggctccggccctggccccgatggctctgtgcaacggagactccaagctggagaatgctggaggagaccttaaggatggccaccaccactatgaaggagctgttgtcattctggatgctggtgctcagtacgggaaagtcatagaccgaagagtgagggaactgttcgtgcagtctgaaattttccccttggaaacaccagcatttgctataaaggaacaaggattccgtgctattatcatctctggaggacctaattctgtgtatgctgaagatgctccctggtttgatccagcaatattcactattggcaagcctgttcttggaatttgctatggtatgcagatgatgaataaggtatttggaggtactgtgcacaaaaaaagtgtcagagaagatggagttttcaacattagtgtggataatacatgttcattattcaggggccttcagaaggaagaagttgttttgcttacacatggagatagtgtagacaaagtagctgatggattcaaggttgtggcacgttctggaaacatagtagcaggcatagcaaatgaatctaaaaagttatatggagcacagttccaccctgaagttgggcttacagaaaatggaaaagtaatactgaagaatttcctttatgatatagctggatgcagtggaaccttcaccgtgcagaaaagaaaacttgagtgtattcgagagatcaaaaaggganaggganncaaaag

SEQ ID NO: 356230 - DNA, 1043 bp, Homo Sapiens
  misc_feature (23)..(23): n is a, c, g, or t
tcgacggcagtacccccgagtantggtagcgaggcctgggtggcgaatccggcacgaggctccattcggcgcttttctggcggctggctcctctccgctgccggctgctcctcgaccaggcctccttctcaacctcagcccgcggcgccgacccttccggcaccctcccgccccgtctcgtactgtcgccgtcaccgccgcggctccggccctggccccgatggctctgtgcaacggagactccaagctggagaatgctggaggagaccttaaggatggccaccaccactatgaaggagctgttgtcattctggatgctggtgctcagtacgggaaagtcatagaccgaagagtgagggaactgttcgtgcagtctgaaattttccccttggaaacaccagcatttgctataaaggaacaaggattccgtgctattatcatctctggaggacctaattctgtgtatgctgaagatgctccctggtttgatccagcaatattcactattggcaagcctgttcttggaatttgctatggtatgcagatgatgaataacggtatttggaggtactgtgcacaacaaaaagtgtcagagaagatggagttttcaacattagtgtggataatacatgttcattccttcagcgggccttcacaaggacagacgtcgctcttgcttacacatggagatagtgtagccccacgtagccgatggattccgggctgtggcccgtcctggaaacctcgtagcaaggcataagcacatgaattcaaaagtctcttggagcacagtcccccgcagtggggctctaccgacatcggaagtcttcgacgacatctccgcaaacacgacccacgcaccaaccgcggcacacgcacaccaggttcagcgaccgaacgtcgccccacgacgaacagcggaaacacctctcaccaccacacgacgagaaccaagcacgagggcgcaccaccacgtcactccgcagtgacactctcccgcacccaaggcagtctgcgccacactactcgcgagcgagactctt

SEQ ID NO: 356231 - DNA, 1281 bp, Homo Sapiens
tcccgggattccgaggtgggagacttgcgtgtctccttttcctatgctggactgagcggcgatgaccctgacctgggcccagctcacgtggtcactgtgattgcccggcagcggggtgaccagctagtcccattctccaccaagtctggggataccttactgctcctgcaccacggggacttctcagcagaggaggtgtttcatatagaactaaggagcaactccatgaagacctggggcctgcgggcagctggctggatggccatgttcatgggcctcaaccttatgacacggatcctctacaccttggtggactggtttcctgttttccgagacctggtcaacattggcctgaaagcctttgccttctgtgtggccacctcgctgaccctgctgaccgtggcggctggctggctcttctaccgacccctgtgggccctcctcattgccggcctggcccttgtgcccatccttgttgctcggacacgggtgccagccaaaaagttggagtgaaaagaccctggcacccgcccgacacctgcgtgagccctaggatccaggtcctctctcacctctgacccagctccatgccagagcaggagccccggtcaattttggactctgcaccccctctcctcttcaggggccagacttggcagcatgtgcaccaggttggtgttcaccagctcatgtcttccccacatctcttcttgccagtaagcagctttggtgggcagcagcagctcatgaatggcaagctgacagcttctcctgctgtttccttcctctcttggactgagtgggtacggccagccactcagcccattggcagctgacaacgcagacacgctctacggaggcctgctgataaagggctcagccttgccgtgtgctgcttctcatcactgcacacaagtgccatgctttgccaccaccaccaagcacatctgtgatcctgaagggcggccgttagtcattactgctgagtcctgggtcaccagcagacacactgggcatggacccctcaaagcaggcacacccaaaacacaagtctgtggctagaacctgatgtggtgtttaaaagagaagaaacactgaagatgtcctgaggagaaaagctggacatatactgggcttcacacttatcttatggcttggcagaatctttgtagtgtgtgggatctctgaaggccctatttaagtttttcttcgttactttgctgcttccatgtgtactttcctaccccaagaggaagttttctgaaataagatttaaaaaca

SEQ ID NO: 356232 - DNA, 1210 bp, Homo Sapiens
agcgggcatgcgcagaaacactgggcacagggggaggtaactgcagtaagtcccgcttggccctggagtccacgcggattttcgaagctggggctggcaagaggccgctggacaccacgctccagtcgtcagcccacttcctagctgaacagcgcgaggcggcggcagcgagccgggtcccaccatggccgcgaattattccagtaccagtacccggagagaacatgtcaaagttaaaaccagctcccagccaggcttcctggaacggctgagcgagacctcgggtgggatgtttgtggggctcatggccttcctgctctccttctacctaattttcaccaatgagggccgcgcattgaagacggcaacctcattggctgaggggctctcgcttgtggtgtctcccgacagcatccacagtgtggctccggagaatgaaggaaggctggtgcacatcattggcgccttacggacatccaagcttttgtctgatccaaactatggggtccatcttccggctgtgaaactgcggaggcacgtggagatgtaccaatgggtagaaactgaggagtccagggagtacaccgaggatgggcaggtgaagaaggagacgaggtattcctacaacactgaatggaggtcagaaatcatcaacagcaaaaacttcgaccgagagattggccacaaaaaccccagtgccatggcagtggagtcattcatggcaacagccccctttgtccaaattggcaggtttttcctctcgtcaggcctcatcgacaaagtcgacaacttcaggtccctgagcctattcaagctggagaaccctcatgtggacatcattcggcggggagactttttctaccacagtgaaaatcccaagtattcagaggtgggagacttgcgtgtctccttttcctatgctggactgagcggcgatgaacctgaactgggcccagctcacgtggtaaccgggcttcccaggggcagacactaagtcagagcctcacgagtttcctggacacagacaccttggtcaatgtcaggagcgcttggaaccccttttccctggggaaaggcacactctcgctcacactctcaggcaggcacgcttctgagcagtttcagagctcccattttcccccaggcattccatggacccacgtttagaagggcagctcaaaaggggtctcataattcgcacttatgacag

SEQ ID NO: 356233 - DNA, 2202 bp, Homo Sapiens
  misc_feature (294)..(315): n is a, c, g, or t
  misc_feature (324)..(576): n is a, c, g, or t
  misc_feature (1241)..(1241): n is a, c, g, or t
  misc_feature (1326)..(1326): n is a, c, g, or t
  misc_feature (1531)..(1531): n is a, c, g, or t
  misc_feature (1580)..(1617): n is a, c, g, or t
tcagtcaggagggcctttctagcccacctagaaatagtgcagatttcttgctacccagggtcttgctgtgcctcttgtcaccagtgctctggcctgtgtgcacatactcactgtgacacagtttagcatgagagaggtggggaagggggcgaaggcagctggctgatcctccaaaagcccccagataatcaccctgactcctgccccagggctccttcctgttccctatttccataaagggcagagctttctcagaactcacagccaccttcacagaagtcatctcctatagannnnnnnnnnnnnnnnnnnnnngagacggannnnnnnnnnnnnnnnnnnnnnnnnnnnnnnnnnnnnnnnnnnnnnnnnnnnnnnnnnnnnnnnnnnnnnnnnnnnnnnnnnnnnnnnnnnnnnnnnnnnnnnnnnnnnnnnnnnnnnnnnnnnnnnnnnnnnnnnnnnnnnnnnnnnnnnnnnnnnnnnnnnnnnnnnnnnnnnnnnnnnnnnnnnnnnnnnnnnnnnnnnnnnnnnnnnnnnnnnnnnnnnnnnnnnnnnnnnnnnnnnnnnnnnnnnnnntgagcacctgcacccggcccctcctgtagatcttttagcctttggtcttttctttggtcttatttctccatcacacaagacccatctgttttctatctttcatgaattcctgaaacagtctggtatgccaataaacacttttgtttttcagtaatggggtttaattctgaatttcaggagattttcagatgtgtagcaggagggctatgggactctttgtggccctccatatccatgttacattacactcctggctatgacctggcacataggtggtctgtgccactttgattaacagcacaggggaccttggcttgggtgggcttcatgcttacaggaaaaagacctgccaacatcaggatttgtaaccagaaaaggcattggaaacatatcctcaaaatcaggctatcaaattttagaagggaacctttcagacctagaatcagttatggagaagtgagatgataaacagttccagaaactgtaaatggactgcttctaagccacaacttgtcttcgtacacactgatgtatacataatatggcaaagttttatgtgcaactgagggtgtggcatttatgattcagaaagaatgagttcgtgtagatggaaatgggcatttgggtggggattaggcaaggacagaattataatgcacgccggntggatggtaacacctctttttgtctataccaaaactgttcagagaaaactgtatccataaaactgactttttgcgattactaaanacatagaatcatttaagtatccaatttgagaaaaaaaattacatgagtagaagtcatccacagatgagtagtccaggttttagaggaaaaaaactttaagtgaacatttcagttgggtaaattcagtctctcactgagaatcttctcaatctcatcttgccagatgacaaatgactgtctattattgtaaaggtttgtggactcntcacaaaaggaacagtcgaattgattcagcatcagctaagcatggaagnnnnnnnnnnnnnnnnnnnnnnnnnnnnnnnnnnnnnngatttctggctgctgccctcagaagcctcccgcacagacgatgtctcctgacaggatcaacaaacgtcgcatttcactgtcccacagtgcagcttcgcccatcagccacttactcgcatgggccaggagcagtgttggtctcggtgacagtgacttccttgccctgctctgaatgagtgtcctttctgtgaaagtaggtctcatggttctagggctgatcccagcgccatcccacaacatttcagtgtgcccgacagcgtgcctggcaagcagcgagctcctgacaattggaagctgctaatgctgttacagacatctgcaagcaagtcagatcagccagctcccatcacgtgagacaccttggaggacaaagccacattgtgtggaggaaaacacaccaccattcaggcccatcgtcatcctgctttctcctatactcagtcccccacagtgccaggtagttttctgcctgtactaagaagggtgaatggaaaggtgagatgtaaaaacaaacaaacaaacaagggctcgaaatgtctatgggaagataaaattgtagcagtcttaaaaaacaagaagcgcatg

SEQ ID NO: 356234 - DNA, 989 bp, Homo Sapiens
  misc_feature (250)..(502): n is a, c, g, or t
  misc_feature (511)..(532): n is a, c, g, or t
  misc_feature (876)..(876): n is a, c, g, or t
  misc_feature (882)..(882): n is a, c, g, or t
  misc_feature (909)..(909): n is a, c, g, or t
  misc_feature (953)..(953): n is a, c, g, or t
  misc_feature (963)..(964): n is a, c, g, or t
aggagtgtaatgtaacatggatatggagggccacaaagagtcccatagccctcctgctacacatctgaaaatctcctgaaattcagaataaacccattactgaaaaacaaaagtgtttattggcataccagactgtttcaggaattcatgaaagatagaaaacagatgggtcttgtgtgatggagaaataagaccaaagaaaagaccaaaggctaaaagatctacaggaggggccgggtgcagtgctcannnnnnnnnnnnnnnnnnnnnnnnnnnnnnnnnnnnnnnnnnnnnnnnnnnnnnnnnnnnnnnnnnnnnnnnnnnnnnnnnnnnnnnnnnnnnnnnnnnnnnnnnnnnnnnnnnnnnnnnnnnnnnnnnnnnnnnnnnnnnnnnnnnnnnnnnnnnnnnnnnnnnnnnnnnnnnnnnnnnnnnnnnnnnnnnnnnnnnnnnnnnnnnnnnnnnnnnnnnnnnnnnnnnnnnnnnnnnnnnnnnnnnnnnnnnntccgtctcnnnnnnnnnnnnnnnnnnnnnntctataggagatgacttctgtgaaggtggctgtgagttctgagaaagctctgccctttatggaaatagggaacaggaaggagccctggggcaggagtcagggtgattatctgggggcttttggaggatcagccagctgccttcgcccccttccccacctctctcatgctaaactgtgtcacagtgagtatgtgcacacaggccagagcactggtgacaagaggcacagcaagaccctgggtagcaagaaatctgcactatttctaggtgggctagaaaggccctcctgactgagaggactcagccttcctcacactgccctgtgtttcctctgctgtggttatnagaggnaaactcatgtcatcagaacctggttcnacagacaggagaataggaattttgaaatatgagccccaaatttnaattgcgaannatttgagggaatgtatagctggcac

SEQ ID NO: 356235 - DNA, 1666 bp, Homo Sapiens
  misc_feature (10)..(10): n is a, c, g, or t
  misc_feature (27)..(27): n is a, c, g, or t
tcctacaagnggaagagttgagaaagnatgtatgtattttcaatttcttagataccgtcatatggccaaagtggagacaccagtttaaacttttaacaagagagcctgtttgcccacaatcctcatcaacccacgatagtagcagactttttacctttgccatgtaagtgtgtggggagaagcagagccagcgctgtcaaaccacagctccacgtccatggtttgagatctccccaaagcaggggagcaaagagttcctcgggcttctgagctcgagcccagtataaatggccaatcccttgccctgccctctgccagctatctggaagaggcgagctcatacagtcggtcttagaaatcccacctcttactggctagggctggcggcagaaggggacagtgagccaagggagggctcagtctctctcccccttgtgctccacctggtggtggctgcgttgatgaaggagcagtaagcgtctctggccaaaggctggccgcagctggagcatcggtgccaggcagtcgcctggctgccgggcgcggttggggggtcgtgacataggcgatgggcggccagcttggagggaaatgagaaagccttggggcaatgcgggcaaggataggggcgggcgtcggtggcgtggtgcgtgtggcggtgggccgcaagcttggaagggtagcagaaggacttggggcagtcggggcacgggtaggggcgggtgggtgcgtgggtccagaggtgagccgccagcttggagcggtggccaaaggacttcgggcagtgtgggcacgggtgcgggcgggcgccgctgtgcgtgaggcggtgggctgccagcttggaggggtaggagaaggccttggggcagtctgggcatgggtggggtcgggcgcctccgtgtgctaagcggtgcgtggccagcttggacgggtacgagaaggccttgtcacagtcggggcagcggtgcgggcgctggggcgggggccgccggcgaggccggggaggcgagccccgcggacgcggtgggccctggagctgactggctgggcttctgcggtgggccctggtggggagcttctttggtcactgtgttccttgccagtgggactaggatcggtagccctcggccgcggactccgcgcctcgctccagcatcttgctggcacaggaacctaggggcagggcgcggggcgggggtgacgccggtgatgaccaggctgatggggatagggttggagggcccggcttttgacttagtctcagttcattgacgccgcgtcaactgcgcccttcttgccgttaaatttcatccctggcttggatggggccgtggaggatagaggggggacctgcaggacggcccctccccgggggcggggcttccggctcctcccgccacggccacggccgcagccgctgtcgccgctgctgcactgccctcggaccagcggagctgccccgcccggcgcgcgtccggcgtcgggggagggcaggcaagggagcgcgcgcaagctgcttagcccaacctcatttccatcccctcctcccacgctggaccaaagggggcgtcagaaagcatgcgcagtgcgggctggcagaggctgcagagagggggaagaaggaatggaaggaggggctgggtgcgccagccagatccgaaaaatt

SEQ ID NO: 356236 - DNA, 999 bp, Homo Sapiens
cgggcacacaagcaatagggttcttctctacggaggaagatggtcaagcttctggaagctgcctgagcattactgaagcaattccagtcaaatgaaaaccaggggcggaatatggaaaggatgagacagcccgctcttctcaacttgttggccctggtggagagtctcgctgaggatcttacagattactctcagaccaaatgctagcataataaagtatacaaacaggccatcaaaattctaataaaagcttcgtgaaatagccaaagaaggaagtgacaaaaagatggaagcggaaacctcttactgacttgggcttagcacacttagctgctgaggaaatatgaaactagcattaacagtccttgacacttactgtaaaatctgccacagacctggatgatgatctcagtctggggagaggctatgaagccatagctcaaggtcctgcagagccaaggagagatgacagaagcaattaaatacgtgaaaaaatttgtgaaaattgcaagaaacaattttcaaagcctagatttggtgagagcaagtacaatgctaggggacatctacaatgaaaaaggatactacaacaaagcttctgaatgctttcagcaagcttttgacacaacagtagagctaatgagcatgcctctgatggatgagacaaaagttcactatggaatagcaaaagctcatcagatgatgcagtacagtgaacaactatatagagtctgcagatgctcaccagcctcaactatcctgctgtcagtggaaggagagcagaggtaacattgaacctgatccagttagctgaagagtttagaggatccacagtggaagctgtatctcaaaactcagaacgtgttggaagaactcagtacggtttccaggtgatcaaaaaaatgaaagcttaaagcaagcttttcacttaacatcaaagcaagaagaaatccatcatgtcaccttagacttcaaaaccctgtagagaggagcatgtta

SEQ ID NO: 356237 - DNA, 941 bp, Homo Sapiens
agcggggcgtcccctgtctccgctccggcggagccaggcttcggaatcactgagagaggagggggcagcgccaacgcccagcacctgccgccggtgggggactgacttcggcggaacggaaaactggagttgtttccctgggccagtgcaccgaggctgaagtctataagcctggagagaccatcagcagtaatctgcaaattccgaaatgaccaccctgcccccactgcccatgacacgcccgaagcttacagccttagccagacagaagctgccttgctcctccagaaaaattccaaggtctcaattgatcaaagaaaaagatgacatagatcattatctagaggtaaatttcaaaggattatcaaaagaggaagttgctgcttataggaactcctacaagaagaatatctgtgtggacatgctgcgagatggttatcataagtccttcaccgagctcttcgctctgatggagcggtgggatgccctgagggaggctgcgagagtcaggtccctcttctggctgcagaagcccctggaggagcagcctgataaactggattacctgtaccattacctgaccagggctgaggacgctgagaggaaagaatccttcgaagatgtatataataacttgtatgctctggcctgttacttcaataattctgaagacaagtgggtaaggaaccacttctatgaacgatgttttaagattgctcagctgatcaaaattgactgtgggaagaaagaagccgaggcacacatgcatatgggtcttctctacgaggaagatggtcagcttctggaagctgctgagcattatgaagcattccatcaattgacacaggcgcagactatggaacgatgaaaacaggccgtctctccattgttggcttgtgaagtctccgaagactacagattatctcaacaaatgttgaaat

SEQ ID NO: 356238 - DNA, 1022 bp, Homo Sapiens
  misc_feature (951)..(951): n is a, c, g, or t
  misc_feature (955)..(955): n is a, c, g, or t
  misc_feature (966)..(967): n is a, c, g, or t
  misc_feature (974)..(974): n is a, c, g, or t
  misc_feature (1001)..(1001): n is a, c, g, or t
  misc_feature (1004)..(1004): n is a, c, g, or t
  misc_feature (1013)..(1013): n is a, c, g, or t
aattcccgggatccggagagggggaaggcgcctggaaaacgttcttcttctccctggccgacccgagcggggaacagcactcccaggatgcagtttgtgtcaacacggccgcagcctcagcagctgggcatccagggcctggggctggacagcgggagctggagctgggcccaggctctgcccccggaggaggtctgccaccaggagccggcgctgcgcggggaaatggccgagggaatgccgcccatgcaggctcaagaatgggacatggacgcccggcggccaatgccttttcagttcccaccctttccagatagggcacctgtcttccccgaccgcatgatgcgagagccccagttgcccacagcagagatctcactctggactgtggtggctgccattcaggctgtggagaggaaggtggatgcccaggccagccagctgctgaacctggaggggcgcacggggacagccgagaagaagctggccgactgtgaaaagacggccgtggaatttgggaaccacatggagagcaagtgggccgtgctggggaccctgctgcaggagtacgggctgctgcagaggcggctggagaacttggagaacttgctgcgcaacaggaacttctgggtcctgcggctgcccccgggcagcaaggggggaggcccccaaggttccagtgacttttgtcgacattgctgtgtacttctccgaagacgagtggaagaacttggacgaatggcagaaggagctttataacaaccttgttaaggagaactacaaaaccctcatgtccctggacgcggagggctcagtccccaagccagatgctccagtccaggctgagcccagggaagaaccttgtgtgtgggagcagcgccaccccgaagagagagaaatcccaatggatcccgaagcaggagcagagcccctggtgcctgcgcaagatgntccntccaagtgaanntgaaganacctgtgtgtccggggtaacggggctngangaaaagcancctaaggaa

SEQ ID NO: 356239 - DNA, 886 bp, Homo Sapiens
  misc_feature (266)..(266): n is a, c, g, or t
  misc_feature (367)..(367): n is a, c, g, or t
caacaggctctggggcgccgagtcggacagtgaacgcagcacgggggctccgaggcggggtctgggtgttgaggggcgactggagccatggcggagtcggcgcctgctcgggtaaagaggcaccggcgcgctggctcgagggcgcgttggggatggctggagtcccctgcctgggggcggggcttcgcggtttggacgccgccggggtcttggtttcccggggctgccgtttggcgctgggtgaacgcggaccctcctcttcgcgnacccagtgctctgcccttttttccctccgcttccttctgcagcggggtcggagcctcggcgccgtgcgcccttgcccagaaacttctctgacgcttgcttnaggagaaaacgacgctccacacctttaacttcttccacacttccttcacaagcaacagagaaaagctcctattttcagaccaccgagatttcactctggacggtggtggccgctattcaggctgtggagaagaagatggagtcccaggctgcccggctacagagcctggaggggcgcacggggacagccgagaagaagctggctgactgcgagaagatggccgtggagttcgggaaccagctggagggcaagtgggccgtgctggggaccctgctgcaggagtatgggctactgccagcaggcggctggagaacgtgcacaaactgctgcgcaaacaggaacttctggatcctgcggctgcccacgggcaacaaaggcgggaggcccccaaggcgtccagtgtcattggagaaattgatggcggtctgtttccacgtagcaggactgggagaattctggacggcatggcagaatggaacctctaacagacacgttgatggacagtacactatgagaacc

SEQ ID NO: 356240 - DNA, 1138 bp, Homo Sapiens
tcccgggatgccatgtgtcaaggacagtggtatgaaaagatgcaataccatgttcagggagcccacagtgtaggtgtgggtaggaaattattgtgtagggtgataagcaccgtgataagggtctgcattgtgctgcagaggcctgtcgtaaaggcacccacccagacatagacctaacatacccaagcaggtgatggccaacctgagatctggcatgtggtataggatagccccacttgtccacacatatggactcccagcccaactcccccgtgcctagggagagaggggctcaatgaagacagtggatggaatgagtgatgccagtttctcttttgtttctgaaagatttctccgtggacgatggcagccacgattcaggccatggagaggaagattgaatcgcaggctgctcacctgctttccctagaaggtcaaaccgggatggccgagaagaagctggctgattgcgagaagacagccgtggagttcgggaaccagctggagggcaagtgggccgtgctggggaccctgctgcaggagtacgggctgctgcagaggcggctggagaacgtggagaacctgctgcgcaacaggaacttctggatcctgcggctgcccccgggcagcaagggggagtcccctaaggtgcctatgacatttgatgatgtggctgtgtagttctctgagcaagtgtggggcaagctggaggactggcaaaaggagctctacaagcacgtgatgaggggcaactgcgagatgctggtctctttggactacgccatctccaagtccgaggtcctctcccagattgaacaagggaaggagccctgcaactggcaccgccctgaccccaagattccagatgttcctgtggacccccagtccagtaaatctctggcttcctgctctgtttgttccgggtgccctggaaagcctgctgctcaacccatgccccgggatttcctccacccttcacaaggaacatcctttcccatctctggcctcctggggggcaaagtccctttcctcccggaatccattgcctggaaggtcttctcaatttacttcctccccttttggcccaggaatgcccccccagctgtctttcttggggaaacctccttccgccagcggg

SEQ ID NO: 356241 - DNA, 1209 bp, Homo Sapiens
  misc_feature (1007)..(1008): n is a, c, g, or t
agcgggtgtatgagaggcgcagggatcggcgggaggaaggctgtcggagccaatcaagccgcctccagaccccggcacgtcgcctgggctgcgcgctccgactgcgcctccgcccgcgcgcctcccggcctcgcccgagggtgcctgggcaggcgaggaccccaggttcagcagctggacatggagaaccaacgctcatcacctctgtcgttccccagtgttccacaagaagaaaccttacgtcaggcccctgctggactcccccgagaaactctgttccaatcccgcgttcttcctcccaaagaaattccttctttgtctcccaccattccccgtcaaggctccctgccccaaacttccagtgctcccaagcaagagacttctggctggatgccacatgtgctccagaagggaccctcactcctgtgttctgccgcttctgagcaagagacttctctccagggccccctggcttcccaggaagggacccagtatccacccccagctgctgctgaacaagaagcctcccttctctcccactccccccaccaccaggaagcccccgttcactcccctgaagctcctgagaaagaccccctgaccctttccccaacagttcccgagactgacatggacccgctgctccagagcccggtttcccaaaaggacacccctttccagatctcttctgcagtccagaaggaacagccgctccccacggcagagatcacccgcttggctgtgtgggctgccgtccaagcaatggaaaggaagctggaggcccaggccatgaggctactgaccctggaaggcaggacggggacaaatgaaaagaagatagccgactgcgagaaaacagccgcggagttcccgaaccatctggaaaaccaaacgggtcctgttggggaaccctgctgcaagagtatgggctgctgcagaggcggctggagaacatggagaacctgctgaaaacagaaatttctggaatctgccggtgccccccgcannccaatggagaaattccccaagtccctgtcaaattttaatgaaggttgctgtgcaccttcccgaaaacaggaggggggaaaaccggtctgaatggggaaaaaagaacccctccaaaaacgctgatgtaagggccacattacaagtcccccggctttcctagggaataattcaatttccaaaaccaaaacctcctggttcata

SEQ ID NO: 356242 - DNA, 617 bp, Homo Sapiens
  misc_feature (492)..(516): n is a, c, g, or t
  misc_feature (521)..(523): n is a, c, g, or t
  misc_feature (531)..(531): n is a, c, g, or t
  misc_feature (536)..(537): n is a, c, g, or t
  misc_feature (583)..(583): n is a, c, g, or t
cctgggatggagggtgacgccatgggtggggcggagcgtctgggatgcgctgggagcctaggatccccgacagttttgcagaacactgaaatctatggactctaaaatggacttcatttaaagaaacccacggaccattaatggacaaaaacatgagtcaatatgtattgtggcattcaaatcctagcactctgggagagcatcaagtaccacgtttttgaagaccatggcctatcatcattatgcattcaagatttgagtttgaataacctcatcaagacttagatcttcttcagaagcttcaagtctcatctgcattaaagctctccattgaaccctctcacaaaagtacaagcttaaaggggctaaaatccattaatacattccattttatatcccttcctctgacttctcttcaatttccttggcctctagggtccttcatattgcttacgttcctttagactagagccaaggagacagtgctttccnnnnnnnnnnnnnnnnnnnnnnnnnaaaannnggggcggngagannttttcattaataaaaaagcataaatttggtgaatttagaattaggncttttatcatatcctataaaaagttgagttaaca

SEQ ID NO: 356243 - DNA, 1826 bp, Homo Sapiens
  misc_feature (758)..(758): n is a, c, g, or t
  misc_feature (1300)..(1472): n is a, c, g, or t
  misc_feature (1653)..(1662): n is a, c, g, or t
gggatcagaactcaggacagcccatgtctgtaggccgtgccgatgatgctgagaagcagcgggcatgaaataaaataaaaacagacaaggctattcattggagaaaataggaagctgtgctcccttgtgcacaaataccagtcgtcaggagaagtattctgttgtatgagcagcgatttgtgagggcctgggattgtacattttagagataactgggctaaagctctgttgagagcagtgtcctaatgcggcttcatggccagctgcactgggtttttgcgtcttttgtaatgtgtttattttgtcagtgacattcctctcatagtgtttctagatgaatgtttgttttaacaaaaaactttgggatgtgtggccatgtaccagaattttttcttattttgcatagtgttagtgtatttgtattttgctttaattgtttattttcatttctttccttttctgaagtcaacagctctttataccacctttgatcaagtaagtaagtaaacttgtaaggcaacttgaaacaaacagaacgctgtcttcttttaaaatacaaattaaaatgcaaaattaaagatcagccataaatcatatacttacaggaaaatgtccatagtaatataaaccaaaaaaagctgataattgatattttccggttaattttggggccccagtgttaccaatctagctcccaaagctatccaaagctcaaagttggaaaataccaagggatctaaacatgattagctataatntatttagaggcttgcattttagattaaggggtgacatcttttttgtacaggaaaatattccccgctactgttaacaagtgtgtggaatacattgattcatttaatctgcatgttggcggtgtgaatagtagaaaactcacagttgaaaatgcctcttgtcagccacggagcgcacaggcatttgtgtgcgtaaccccgggtagcgttcatgtgcacctaaagtgtgacgacagcctatgggaaaccaagggaagggtcacctgtagaggtccggacattcggttttgcctttaagacaactattagatcctaagcgactgtgttgtggctgagttaaaaatgtgcctgtttacttgcagagcttcttccattaggtgaacaatctgttgtgattttaatgtgtaagacctttggtaatgtgaggaattgattagatagtgcagcccagtctctagaggatcagatctgtgggattggttggggtggttgggcaaagtccatggtgagttaagaaatgactttggaagtgactctaatgtgtnnnnnnnnnnnnnnnnnnnnnnnnnnnnnnnnnnnnnnnnnnnnnnnnnnnnnnnnnnnnnnnnnnnnnnnnnnnnnnnnnnnnnnnnnnnnnnnnnnnnnnnnnnnnnnnnnnnnnnnnnnnnnnnnnnnnnnnnnnnnnnnnnnnnnnnnnnnnnnnnnnnnnnnnnnnnntcaccggcatacccatactctaatgtgtaccacatacacatgcacacaccacacacggaacttacacattcatgccatcatgttcacacacgggcttatcccacttgcaggccctttactctttattacacactcatacatactgtggcagtttgctttaaacacacaaatggttcactannnnnnnnnnagatttggcccttcccattattctcacccacactatattctttggttcctattcccaaaccctctatgttgtttacaagattttttattttagcctctaaaggcaattactgtttgtgtttaagaaaaatttttcttagtacacctgttttgttgcgattgtta

SEQ ID NO: 356244 - DNA, 568 bp, Homo Sapiens
  misc_feature (14)..(14): n is a, c, g, or t
  misc_feature (17)..(17): n is a, c, g, or t
ctacctcggcgganttnccgggtcgcgctgcgcccggtctcttcatgtctcctctaggcctggcagcggcggtcctctcggacggatacggggccgagcagcgcccagccggatccagcgctgctgccatcgtgccctgggcttgtgcgccccccgcctgcccgtctgtaccgcgcgcccgaggccttcctcaggcgtgggaaaaggaaaaactccaggccgtggaagggaccctgcaaacccctccgcggcgtggtggggcggcggcggcctcctctggccggagctgcgtacagggaagccggtcccctcgtggctgggagctggaggggtgcatttcgacctgcccaagatactttctagggctctggctggaattcgcaccaagccctcactgaaatgctgggcgaggccgatttgtccacgatgttgctccttaaccttaagttacttgcaagaggagcctgtggccctcgcgactgttaagtgcacgctcagcctcaccctgctggggaaacgacggttcctcgtaaccgcacgcatacgttcctttagaaaagccaggccc

SEQ ID NO: 356245 - DNA, 1641 bp, Homo Sapiens
  misc_feature (145)..(211): n is a, c, g, or t
  misc_feature (977)..(1155): n is a, c, g, or t
  misc_feature (1306)..(1333): n is a, c, g, or t
  misc_feature (1449)..(1564): n is a, c, g, or t
ctttcctagccctgggctaggttagctttcattcgagtgctgtcattccatctaatattggcacactgttaaatatagctgtgagatgatctgttcaactgtaagctccttggggtttcgtgtctgccctgttttctagggtttnnnnnnnnnnnnnnnnnnnnnnnnnnnnnnnnnnnnnnnnnnnnnnnnnnnnnnnnnnnnnnnnnnntgatggaggtggtattccaactcagggactgcctcaacgcccggcgctgtctcctctgctactctgtttcggtgttttagcagaggcagatagtgagggcggcacagtgcccacggcatgccgctggactaagcgctaagcgggcttgggatgatgcgcacgcggggggtctgagccagccaaggggccgggcgccgcctggggggcgctgcggctgctgcggggacgcaccagggcctagtcgcccgcaggctccggcccggaggagcagcccagccaccccaggggcccggaggaccaaccgcttcgacccgcgcccgggcggcggcagtgttggccggcgaggcgaggagggccgggccgccacggtggggcgaaaagccctgaaagttcctctcagttccttccggtgcgcctcccgctcgcccttgcggaggccctgagggcggattcaaggccccgcgagaagccatctgaggcggcgacgactgttctcagccccacgggaacgccgcggacgcagcgtccctctcccggacaagaaaacagccattctagagtaggttcctcccctttccttgttttttcccctttcccgtgcccatggctgacgcgagctgcttttggacgtgggtcccgggcttgactggacagacgtgggttctgtttctgaaaggcgtaaaacctcagacttgtcctgcaacctcctggtctccgtttttgcctctataaagtgggcataacaaggtctgactcactgacctgnnnnnnnnnnnnnnnnnnnnnnnnnnnnnnnnnnnnnnnnnnnnnnnnnnnnnnnnnnnnnnnnnnnnnnnnnnnnnnnnnnnnnnnnnnnnnnnnnnnnnnnnnnnnnnnnnnnnnnnnnnnnnnnnnnnnnnnnnnnnnnnnnnnnnnnnnnnnnnnnnnnnnnnnnnnnnnnnnnnatataatagagaccaatcagatgaaataaatcaaaccattatatagtaaagaacctggctcaataaatagtagttgtggttattattatttcaggaatagacaggcattcattggcacagaaattgaaggttaagcaaatgcttctttccnnnnnnnnnnnnnnnnnnnnnnnnnnnngaaacagtgtttttcacacttgttgcccaggccaccgcaacctctgcctcctgggttcagcctcctgtctcaagccccgcgagtagctgagattacaggcatgtacgaccacgttnnnnnnnnnnnnnnnnnnnnnnnnnnnnnnnnnnnnnnnnnnnnnnnnnnnnnnnnnnnnnnnnnnnnnnnnnnnnnnnnnnnnnnnnnnnnnnnnnnnnnnnnnnnnnnnnnnnncgcatgagccactgcgccccacccttttcttttctttatgcaggtcagtatagtcttgctttaaaaaaactgaaaca

SEQ ID NO: 356246 - DNA, 1008 bp, Homo Sapiens
  misc_feature (776)..(794): n is a, c, g, or t
  misc_feature (827)..(827): n is a, c, g, or t
  misc_feature (904)..(904): n is a, c, g, or t
  misc_feature (909)..(909): n is a, c, g, or t
  misc_feature (913)..(913): n is a, c, g, or t
  misc_feature (918)..(918): n is a, c, g, or t
  misc_feature (945)..(945): n is a, c, g, or t
  misc_feature (947)..(947): n is a, c, g, or t
  misc_feature (949)..(949): n is a, c, g, or t
  misc_feature (954)..(954): n is a, c, g, or t
  misc_feature (957)..(957): n is a, c, g, or t
  misc_feature (973)..(973): n is a, c, g, or t
  misc_feature (976)..(977): n is a, c, g, or t
  misc_feature (979)..(979): n is a, c, g, or t
  misc_feature (984)..(984): n is a, c, g, or t
  misc_feature (987)..(987): n is a, c, g, or t
  misc_feature (989)..(989): n is a, c, g, or t
  misc_feature (994)..(994): n is a, c, g, or t
  misc_feature (1002)..(1002): n is a, c, g, or t
  misc_feature (1004)..(1004): n is a, c, g, or t
  misc_feature (1007)..(1007): n is a, c, g, or t
ggcgcgggggcgcgggcagggccggctgctgagacgcgctgctgccccccgcgcgggcgccgcggcttcaatggcgccatcgcccaggaccggcagccggcaagatgcgaccgccctgcccagcatgtcctcaactttctgggcgttcatgatcctggccagcctgctcatcgcctactgcagtcagctggccgccggcacctgtgagattgtgaccttggaccgggacagcagccagcctcggaggacgatcgcccggcagaccgcccgctgtgcgtgtagaaaggggcagatcgccggcaccacgagagcccggcccgcctgtgtggacgcaagaatcatcaagaccaagcagtggtgtgacatgcttccgtgtctggagggggaaggctgcgacttgttaatcaaccggtcaggctggacgtgcacgcagcccggcgggaggataaagaccaccacggtctcctgacaaacacagcccctgaggggccccgggagtggccttggctccctggagagcccacgtctcagccacagttctccactcgcctcggacttcacccgttctctgccgcccgcccactccgtttccctgtggtccgtgaaggacggcctcaggccttggcatcctgagcttcggtctgtccagccgacccgaggaggccggactcagacacataggcggggggcggcactggcatcagcaatacgcagtctgtgggagcccggccgcgcccagcccccgccgaccgtggcgttggccctgctgtcctcannnnnnnnnnnnnnnnnnncagctccggcagccacagaaggctgcagcccancccgcctggagaaacgacgcctgccccaggggactgttcaggcacagaagcggcctcctcccgtgccccagactgtncgaanttgnttttnttttcttatactttcaatataatccananancaaanagnaaaactatctgaactnggnncnccccnctntnagggncctggggngnttnt

SEQ ID NO: 356247 - DNA, 2397 bp, Homo Sapiens
  misc_feature (47)..(47): n is a, c, g, or t
  misc_feature (49)..(49): n is a, c, g, or t
  misc_feature (55)..(55): n is a, c, g, or t
  misc_feature (167)..(167): n is a, c, g, or t
  misc_feature (292)..(292): n is a, c, g, or t
  misc_feature (372)..(372): n is a, c, g, or t
  misc_feature (460)..(460): n is a, c, g, or t
  misc_feature (1951)..(1968): n is a, c, g, or t
  misc_feature (2316)..(2324): n is a, c, g, or t
cagcctgctcatcgcctactgcagtcagctggccgccggcacctgtnanattgtnaccttggaccgggacagcagccagcctcggaggacgatcgcccggcagaccgcccgctgtgcgtgtagaaaggggcagatcgccggcaccacgagagcccggcccgcctgtntggacgcaagaatcatcaagaccaagcagtggtgtgacatgcttccgtgtctggagggggaaggctgcgacttgttaatcaaccggtcaggctggacgtgcacgcagcccggcgggaggataaanaccaccacggtctcctgacaaacacagcccctgaagggccccgggagtggccttggctccctggagagcccacgtctcanccacagttctccactcgcctcggacttcacccgttctctgccgcccgcccactccgtttccctgtggtccgtgaaggacggccatcangctttggcatcctgagcttcggtctgtccagccgacccgaggaggccggactcagacacataggcggggggcggcacctggcatcagcaatacgcagtctgtgggagcccggccgcgcccagcccccgccgaccgtggcgttggccctgctgtcctcagaggaggaggaggaggaggcagctccggcagccacagaaggctgcagcccagcccgcctgagacacgacgcctgccccaggggactgtcaggcacagaagcggcctcctcccgtgccccagactgtccgaattgcttttattttcttatactttcagtatactccatagaccaaagagcaaaatctatctgaacctggacgcaccctcactgtcagggtccctggggtcgcttgtgcgggcgggagggcaatggtggcagagacatgctggtggccccggcggagcggagagggcggccgtggtggaggcctccaccccaggagcaccccgcacaccctcggaggacgggcttcggctgcgcggaggccgtggcacacctgcgggaggcagcgacggcccccacgcagacgccgggaacgcaggccgctttattcctctgtacttagatcaacttgaccgtactaaaatccctttctgttttaaccagttaaacatgcctcttctacagctccatttttgatagttggataatccagtatctgccaagagcatgttgggtctcccgtgactgctgcctcatcgataccccatttagctccagaaagcaaagaaaactcgagtaacacttgtttgaaagagatcattaaatgtattttgcaaagcctaaagttatatatttaacagtttttatatgttgtatatttgtagaaaatcctatttaacaattaacgtggcagtcccggccgtcctgagagtcgggccgagccccgtgtgtttctgaagactctgggggtgggacacggcggggaggtggtgccccgcggaccccggggtgccaggcacggaaggcgggactctgggagaagcgtgcggaggaccgtggcgtcggcgtcccggatgtgtcggtcgtgcccggggaggccgggttcccctcgctgcgggccaggcttggctcctgattccctctctggtccctgtattggtcaacacttgagcgtacaatatcttgaacatgcttcttccaatgggttttgtttcccatttcctgcccctttcgccactcacggaccttgaggccagttgacggcccttctccccacgcctgtgtccccgcgttctgagaagtcctctgtcttcgtgtcactaggtccagaaagtcgcgccgggcagaggcgcaggcggggccggcagggccgaggaataagcgacaattctggtttttctcccctggccgtcgttcgccagcctccttcattttcctgagttcccgctgaagtatatactacctatgagtccaattaacatgagtattatgctagttctatcctactnnnnnnnnnnnnnnnnnntaactatatagaagctgttccagcaaccatagactgaagatacgaaagaaaatccatttatttaagacctgttccggtatccatgaggacataatttacctttcagtcaccacaaatttataggcatttgtatcctggactaaaagaaggggctgaggttgggtttgtcatcacagagggggtgggcctggaaagggtccttcccaagctgccccggctccggcggcccgggccggcagcctctgccagccagcgtcctcacggcctccccctcgcctgtttcttttgaaagcaagtgtagacaccttcgagggcagagatcgggagatttaagatgttacagcatannnnnnnnncttgttttacagtattcaattttgtgttgattcagctaaattatgaaaaataaagaaaaactccttttgaaaa

SEQ ID NO: 356248 - DNA, 1071 bp, Homo Sapiens
  misc_feature (1038)..(1038): n is a, c, g, or t
  misc_feature (1045)..(1045): n is a, c, g, or t
  misc_feature (1047)..(1047): n is a, c, g, or t
ccgcccgacccccccggcgccccacgggcataattgtgtctcgtatcggatccaaaacacaccgctggtaccggtccggaattcccgggatcctggggctgccgcgggcgggcggacgcggagggcgggccctgctctagcgggccgcgtagcggacatggcgggctcccggctcccgcggcagctcttcctccagggcgtggcggccgtcttcatgtttgctttcgcttccctctacacgcaaatcccaggcctgtatggccccgagggcatcctacctgcaaggaggacgctgcggcctcagggcaaggggcgctggcagcagctgtgggagaccccgacgctgctgtgggaagcgccgagactggggctggacacggcccagggcctggagctgctgagcctgctgggtgcactagtggccctgggagccctgctgctgagcccactgcgccaccctgtcatctacttgctgctttgggccgcctacctgtcagcctgccaggtgggccaggtgttcctttatttccagtgggactccctgctgctagagactggcttcctggccgtgctggtggccccgctgaggccagcctcccaccgcaaggaggccccccagggcaggcaggcaggggccctgccccacgaagacctccccttctggctggtgcgatggctgctgttccgcctcatgttcgcctcaggcgtggtcaagctgaccagccgctgccctgcgtggtgggggctcactgccctcacctaccactacgagacccagtgcctgcccacgcccgccgcctggttcgcacaccacctgccggtctggctgcacaagctcagcgtggtggccaccttcctaattgagatcgctgtgccgcccctgttcttcgcccccattcgacgcctgcgcttggctgctttctactcgcaggtgctgctgcaggtccctgattatcatcaccgggcaactacaacttcttcaacctgatgacgctggtgcttaccactgcgctgttggacgacagcacctggctgctnagctggncnatggcagcgcaaaaagacggcaac

SEQ ID NO: 356249 - DNA, 1815 bp, Homo Sapiens
aggtagcgaggcctgggtggcgaattcggcacgaggcctgattatcatcaccggcaactacaacttcttcaacctgatgacgctggtgcttaccactgcgctgttggacgaccagcacctggctgctgagcctggccacggcagccgcaagaagacggccacctcctggcccaaggccctgctggccaccctgtcgctgctgctggaactagccgtctacgggcttctggcctatggcactgtgcactactttggcctggaggttgactggcagcagcgcaccatccactccagaaccactttcaccttccaccagttttctcagtggctgaagacactgacgctgcccactgtgtggctgggtgtggcctccctggtctgggagctgctgagtgccctgtggaggtggacccaggtgcggggctggctacggaagctcagtgctgtagtccaactgtcccttgtgggcactgcgaccgtggccttgttcctgattagcctggtgccgtactcctacgtggagcccgggacccacgggcgcctctggaccggggcccaccgcctgtttggtgccgtggagcacctacagctggccaactcctacggcctcttccgccgcatgactgggcttggtggacggcctgaggtggtgctggagggcagttacgacggccaccactggacggagatcgagttcatgtacaagcctgggaacctgagccggccgcccccggttgtggtgccccaccagccacgcctggactggcagatgtggtttgcagccctgggcccacacacgcacagcccgtggttcacaagcctggtcttgcgcctgctgcagggcaaggagccagtgatccgccttgtccagagccaagtggccaggtatcccttccacaagcagccgcccacctacgtccgagcccagcgctacaagtactggttctcccagcctggggagcagggccagtggtggcggcgccagtgggtggaggagttcttcccatccgtgtccctgggggaccccacgctggagacgctgctcaggcagtttggactacaggagaaaagcccacctcgcacccgcagcgccaacagcaccctggcccaggccctccactggactcgctctcagctgtctcccctggaggcccccgccctgctctgggggctcctcatggccgtgggggctgtcagatttgtgcaggccctgctagcaccctgttctctccggtcctccccgctggcaccagtcagcggggagaagcgcaggccagcctcccagaaagactccggagctgcctccgaacaggccaccgcagcccccaacccctgctccagtagttcgaggaccacccggcgaaagaagtagctgtgttctcccagctgcacgtcctgagagggccaggtcgccgggagtgctctggcctccggcaggacaggacccagccactgtgccttagctgaccctgcagggccaggcacaggttggggggctgcccctggggtttgcagggtgctgcattgagggctccaggccccaccccccacgccagccatgcccctccccaggactcccactattgcctctgtgattggcccaggaggaaaacacgaccaagctcaagacccttcccctgccctgggctgtgggggtctgagtctagagcccccaaccctaggccccgtgccagaggggaagaggctgactcccaggggaagaggggaagcactgtcatcttccacgtcatcttcacaccagcccatcctgccctttagatctgggcaccaataaaggcgtcttttgtgcttgaa

SEQ ID NO: 356250 - DNA, 862 bp, Homo Sapiens
agcggacatggcgggctcccggctcccgcggcagctcttcctccaggcgtggcggccgtcttcatgtttgctttcgcttccctctacacgcaaatcccagcctgccaggtgggccaggtgttcctttatttccagtgggactccctgctgctagagactggcttcctggccgtgctggtggccccgctgaggccagcctcccaccgcaaggaggccccccagggcaggcaggcaggggccctgccccacgaagacctccccttctggctggtgcgatggctgctgttccgcctcatgttcgcctcaggcgtggtcaagctgaccagccgctgccctgcgtggtgggggctcactgccctcacctaccactacgagacccagtgcctgcccacgcccgccgcctggttcgcacaccacctgccggtctggctgcacaagctcagcgtggtggccaccttcctaattgagatcgctgtgccgcccctgttcttcgcccccattcgacgcctgcgcttggctgctttctactcgcaggtgctgctgcaggtcctgattatcatcaccggcaactacaacttcttcaacctgatgacgctggtgcttaccactgcgctgctggacgaccagcacctggctgctgagcctggccatggcagccgcaagaagacggccaccctcctggccaaagggccctgctggccaccctgtcgctgctgctggaactagccgtctacgggcttctgccctatggcactgggcaactactttggcctggaggtgactggcagcagcgcaccatccactccagaacactttcaccttccacaatttactcagtggctgaagacactgacgctgccaa

SEQ ID NO: 356251 - DNA, 3303 bp, Homo Sapiens
  misc_feature (18)..(18): n is a, c, g, or t
  misc_feature (23)..(23): n is a, c, g, or t
atccttaattaaattaancctcncccccccaaaagcagtctcaagcctgccgcagggagaagatggcggtcgccgtaagaactttgcaggaacagctggaaaaggccaaagagagtcttaagaacgtggatgagaacattcgcaagctcaccgggcgggatccgaatgacgtgaggcccatccaagccagattgctggccctttctggtcctggtggaggtagaggacgtggtagtttattactgaggcgtggattctcagatagtggaggaggacccccagccaaacagagagaccttgaaggggcagtcagtaggctgggcggggagcgtcggaccagaagagaatcacgccaggaaagcgacccggaggatgatgatgttaaaaagccagcattgcagtcttcagttgtagctacctccaaagagcgcacacgtagagaccttatccaggatcaaaatatggatgaaaagggaaagcaaaggaaccggcgaatatttggcttgttgatgggtacccttcaaaaatttaaacaagaatccactgttgctactgaaaggcaaaagcggcgccaggaaattgaacaaaaacttgaagttcaggcagaagaagagagaaagcaggttgaaaatgaaaggagagaactgtttgaagagaggcgtgctaaacagacagaactgcggcttttggaacagaaagttgagcttgcgcactggcaagaagaatggaatgaacataatgccaaaataattaaatatataagaactaagacaaagccccatttgttttatattcctggaagaatgtgtccagctacccaaaaactaatagaagagtcacagagaaaaatgaacgctttatttgaaggtagacgcatcgaatttgcagaacaaataaataaaatggaggctaggcctagaagacaatcaatgaaggaaaaagagcatcaggtggtgcgtaatgaagaacagaaggcggaacaagaagagggtaaggtggctcagcgagaggaagagttggaggagacaggtaatcagcacaatgatgtagaaatagaggaagcaggagaggaagaggaaaaggaaatagcgattgttcatagtgatgcagagaaagaacaggaggaggaagaacaaaaacaggaaatggaggttaagatggaggaggaaactgaggtaagggaaagtgagaagcagcaggatagtcagcctgaagaagttatggatgtgctagagatggttgagaatgtcaaacatgtaattgctgaccaggaggtaatggaaactaatcgagttgaaagtgtagaaccttcagaaaatgaagctagcaaagaattggaaccagaaatggaatttgaaattgagccagataaagaatgtaaatccctttctcctgggaaagagaatgtcagtgctttagacatggaaaaggagtctgaggaaaaagaagaaaaagaatctgagccccaacctgagcctgtggctcaacctcagcctcagtctcagccccagcttcagcttcaatcccagtcccaaccagtactccagtcccagcctccctctcagcctgaggatttgtcattagctgttttacagccaacaccccaagttactcaggagcaagggcatttactacctgagaggaaggattttcctgtagagtctgtaaaactcactgaggtaccagtagagccagtcttgacagtacatccagagagcaagagcaaaaccaaaactaggagcagaagtagaggtcgagctagaaataaaacaagcaagagtagaagtcgaagcagtagcagtagcagttctagtagcagttcaaccagtagcagcagtggaagtagttccagcagtggaagtagtagcagtcgcagtagttccagtagcagctccagtacaagtggcagcagcagcagagatagtagcagtagcactagtagtagtagtgagagtagaagtcggagtaggggccggggacataatagagatagaaagcacagaaggagcgtggatcggaagagaagggatacttcaggactagaaagaagtcacaaatcttcaaaaggtggtagtagtagagatacaaaaggatcaaaggataagaattcccggtccgacagaaagaggtctatatcagagagtagtcgatcaggcaaaagatcttcaagaagtgaaagagaccgaaaatcagacaggaaagacaaaaggcgttaatggaagaagccaggctttcttagccattctttgcagcagaagatttcttgataaaaaaggattacctttccttgtaaagaggatgctgccttaagaattgcatgttgtaaaaaatctttttggaaaatacagactgtttgtttaccagacattcttgtactttttgcataattttgtaagagttatttatcaaaattatgtgaggttccaaaatatgtaaaaatgataataataaaaaaagattaacatcccttgtcatcttttttaaatatcctatactcttcagtaagaatctgtatattttaataggcaaatctttaagtctgttcccttctaattctgtatcatacattgcttttgtagaaataaatgtgtgtttatttcattatttttgggatgtcctcgttgacacttgtataataaatatcctctttatcattttcagcttttaacactagatactgcacgtgattagaatgtttttgaaggtttcctcgtttttatttgccttggacagtttttagttgtcagagtcagagctttgcagctttgagggggaacagttctctttaaaatcatttgctattttctattctcccttgttattttaatctaagcattttcccccgtttctcatattttaaccatatgtccggtagataacctaaacagtatgatcctggttggccattttcttcctgatgatgggagcgtcattcttttgtcttcatggttacttgtgtgatataacatacatctgttaaagaaaatcacttctttctaggggagggaggtagaaaagtatctttcaaacttggtttttgagtttgtgtcttgtcttaactttgtgttggctctaacttaaacatgctgatatgtgttttcaagaattttgtttaaggaagtattgtatggaagtccacaaaatgaaggaagttcatctaggttttaatatgtaagcaagataacacacaagtgtaccaagtgattattaactttgttgttttacaaatttgtatgaacttggagtatctgttggccattactatacatgtgcaaataaatgtgggcttagaacttgctgttg

SEQ ID NO: 356252 - DNA, 351 bp, Homo Sapiens
gaaacagaagttttcacaacccagggggcctggcacgccggtctgtgcctgcccgccccgccctggcccaccggccccactccctgggcacagagtcacacccactcatccttccgccaacagtccaggtcacacagcagcagtcactgtaacagactgccacatacacactcggtctcacactcacctgtgggttttggttccgttcaacttgggtttttaactttacagggtcagttccgcttcacctccttttgtatggagttccatccagggggtttcaccccctgctccagtcctgaggcctcctgaccctgacgttgtgatacgccccacagagatctatgtttt

SEQ ID NO: 356253 - DNA, 999 bp, Homo Sapiens
cccctatttctaccgggatccccatgtaacgccgcaacaggatgtacgtatggaaggccccgggacgtggtgttaatgctgcgcccagttccggctgttaacagagcttgacctggatctgccttggtgctcagaaacccgtgggacctgcgtttggtctggaaaagggaatcgaacgtgggggttcttacctcttgtgcacacaagggagctgggaccggtgggccaggccgtggcgggcacggcacagaccggcgtgccaggcccctgggttgtgcaaacttcggttgttcgttgtgtctcggctatgtgttacgtagattcaaagctagaaatataaacagaaacttgtgagtgacgtggatggagcttagtccagactccaaaccctaggtttaaaaacgtcccagggccccccaccccacaggtcatcgctgagtgtgaggagtcacagtgtggggggctgggcaccctcgggggtctttgactctccccagggcctgtggtgaactgactctaggggtccccctatgatgccctcagaagcccaaggtgggggcgctgcctccaaggggcccttggggcctccccaagcagcagggattcaccagggaaccccgctcaggctgggtgaggctctggaaggacaggctgggcaaacagctggacccagggtgcaggatggcctctgactttctttggaagaggagacagggtgctctcacaggtacaccccacgcatgcacacggtgcacgcctccacggccccgcgctagtccagagcggcccctggtggccactcagtaatcaggcacacacacggctcccacgtgctcagacgcacccagtttcacccacacacataaagggcaggacaggagactttggggtccaaggcagggaggcttctctgctgtagttgcccaagagcatggggaccaagctagccccctccttggggagagaccctgtgaggaagatggctgcggtggagcggca

SEQ ID NO: 356254 - DNA, 790 bp, Homo Sapiens
  misc_feature (6)..(6): n is a, c, g, or t
  misc_feature (8)..(9): n is a, c, g, or t
  misc_feature (53)..(53): n is a, c, g, or t
  misc_feature (61)..(61): n is a, c, g, or t
aggaantnnagaagataaaatgaggttgtttattatatattatataagaaaanagaaaganaattatgaggctgatttggagcaatataaaaaagctttaactgatgcaggatgcaaccttaatcctttacaatatatcaaacagtggaaggcttttaccaagatggcctcagctccggccagctatggcagcactaccactaaaccaatgggtcttttatcacgagtcatgaatacaggatcacagtttgtgatggaaggagtgaagaacctggttttgaaacagcaaaatctacctgttactcgtattttggacaatcttatggagatgaagtcaaaccccgaaactgatgactatagatattttgatcccaaaatgctgcggggcaatgacagctcagttcccagaaataaaaatccattccaagaggccattgtttttgtggtgggaggaggcaactacattgaatatcagaatcttgttgactacataaaggggaaacaaggcaaacacattttatatggctgcagtgagctttttaatgctacacagttcataaaacagttgtcacaacttggacaaaagtaacacagaagaaccttactatgataatctacttggaatgtggataaatgtaaaaagaagaaaagttagaagagcaatatgtttccttctctgtaacagtgtcctaacagtgaaaatcagagttatttgttaatttttaaggaaattatatacttaatatgtattgattaaaagaaacatttcagaaataaaatttcaacattg

SEQ ID NO: 356255 - DNA, 2062 bp, Homo Sapiens
  misc_feature (1810)..(1811): n is a, c, g, or t
ggggcagtggctcgtgggagccaagatggcggcggcggcggcagcgacagcagcagcagcagccagtattcgggaaaggcagacagtggctttgaagcgtatgttgaatttcaatgtgcctcatattaaaaacagcacaggagaaccagtatggaaggtactcatttatgacagatttggccaagatataatctctcctctgctatctgtgaaggagctaagagacatgggaatcactctgcatctgcttttacactctgatcgagatcctattccagatgttcctgcagtatactttgtaatgccaactgaagaaaatattgacagaatgtgccaggatcttcgaaatcaactatatgaatcatattatttaaattttatttctgctatttcaagaagtaaactggaagatattgcaaatgcagcgttagcagctagtgcagtaacacaagtagccaaggtttttgaccaatatctcaattttattactttggaagatgatatgtttgtattatgtaatcaaaataaggagcttgtttcatatcgtgccattaacaggccagatatcacagacacggaaatggaaactgttatggacactatagttgacagcctcttctgcttttttgttactctgggtgctgttcctataatcagatgttcaagaggaacagcagcagaaatggtagcagtgaaactagacaagaaacttcgagaaaatctaagagatgcaagaaacagtctttttacaggtgatacacttggagctggccaattcagcttccagaggcccttattagtccttgttgacagaaacatagatttggcaactcctttacatcatacttggacatatcaagcattggtgcacgatgtactggatttccatttaaacagggttaatttggaagaatcttcaggagtggaaaactctccagctggtgctagaccaaagagaaaaaacaagaagtcttatgatttaactccggttgataaattttggcaaaaacataaaggaagtccattcccagaagttgcagaatcagttcagcaagaactagaatcttacagagcacaggaagatgaggtcaaacgacttaaaagcattatggggactagaaggggaagatgaaggagccataagtatgctttctgacaataccgctaagctaacatcagctgttagttctttgccagaactccttgagaaaaaaagacttattgatctccatacaaatgttgccactgctgttttagaacatataaaggcaagaaaattggatgtatattttgaatatgaagaaaaaataatgagcaaaactactctggataaatctcttctagatataatatcagaccctgatgcaggaactccagaagataaaatgaggttgtttcttatctattatataagcacacagcaagcaccttctgaggctgatttggagcaatataaaaaagctttaactgatgcaggatgaaccttaatcctttacaatatatcaaacagtggaaggcttttaccaagatggcctcagctccggccagctatggagcactaccactaaaccaatgggtcttttatcacgagtcatgaatacaggatcacagtttgtgatggaaggagtgaagaacctggttttgaaacagcaaaatctacctgttactcgtattttggacaatcttatggagatgaagtcaaacccgaaactgatgctatagatattttgatccaaaatgctgcgggcaatgacagctcagttcccagaaataaaaatccattccaagaggccatttgtttttgtggtgnngaggaggcaactacattgaatatcagaatcttgttgactacataaaggggaaacaaggcaaacaccatttatatggctgcagtgagctttttaaagctacacaggtcattaaacaagttgtcacaactttggacaaaagtaccacagaaagaacctttcctttgaataatctacttgggaattgtgggtaaaatggtaaaaaggaagaaaaggttagaaggagcaatttgtttttccttctctttgaacag

SEQ ID NO: 356256 - DNA, 909 bp, Homo Sapiens
  misc_feature (54)..(90): n is a, c, g, or t
agatgtatacgactcacctatagggcgaactggcgcttatcgcggtggcggcgnnnnnnnnnnnnnnnnnnnnnnnnnnnnnnnnnnnnnatcaggccaaatcggccgagctcgaattcgtcgagagcgggggtagtggctcgtgggagccaagatggcggcggcggcggcagcgacagcagcagcagcagccagtattcgggaaaggcagacaggtactcattcatgacagatttggccaagatataatctctcctctgctatctgtgagggagctaagagacatgggaatcactctgcatctgcttttacactctgatcgagatcctattccagatgttcctgcagtatactttgtaatgccaactgaagaaaatattgacagaatgtgccaggatcttcgaaatcaactatatgaatcatattatttaaattttatttctgctatttcaagaagtaaactggaagatattgcaaatgcagcgttagcagctagtgcagtaacacaagtagccaaggtttttgaccaatatctcaattttattactttggaagatgatatgtttgtattatgtaatcaaaataaggagcttgtttcatatcgtgccattaacaggccagatatcacagacacggaaatggaaactgttatggacactatagttgacagcctcttctgcttttttgttactctgggtgctgttcctataatcagatgttcaagaggaacagcagcagaaatggtagcagtgaaactagacaagaaacttcgagaaaatctaagagatgcaagaaacagtctttttacaggtgatacacttggagctggcccatttcagcttccagaggccccttattagtccttggttgacagaaaccatagattttggcaactccctttacatcatc

SEQ ID NO: 356257 - DNA, 1509 bp, Homo Sapiens
gttctcctaactagcaccttcccctctcccctgactcagctggtagcccctcctccccgcacctgcccaaaggtcactggacaggtctcttaaccttcattaactgtgcctatgtcaaatggggaaccctggtacaagatattttcacctatgctaaagtattggcactgatcgcggtcatcgttgcaggcattgttagacttggccagggagcctctactcattttgagaattcctttgagggttcatcatttgcagtgggtgacattgccctggcactgtactcagctctgttctcctactcaggctgggacaccctcaactatgtcactgaagagatcaagaatcctgagaggaacctgcccctctccattggcatctccatgcccattgtcaccatcatctatatcttgaccaatgtggcctattatactgtgctagacatgagagacatcttggccagtgatgctgttgctgtgacttttgcagatcagatatttggaatatttaactggataattccactgtcagttgcattatcctgttttggtggcctcaatgcctccattgtggctgcttctaggcttttctttgtgggctcaagagaaggccatctccctgatgccatctgcatgatccatgttgagcggttcacaccagtgccttctctgctcttcaatggtatcatggcattgatctacttgtgcgtggaagacatcttccagctcattaactactacagcttcagctactggttctttgtggggctttctattgtgggtcagctttatctgcgctggaaggagcctgatcgacctcgtcccctcaagctcagcgttttcttcccgattgtcttctgcctctgcaccatcttcctggtggctgttccactttacagtgatactatcaactccctcatcggcattgccattgccctctcaggcctgcccttttacttcctcatcatcagagtgccagaacataagcgaccgctttacctccgaaggatcgtggggtctgccacaaggtacctccaggtcctgtgtatgtcagttgctgcagaaatggatttggaagatggaggagagatgcccaagcaacgggatcccaagtctaactaaacaccatctggaatcctgatgtggaaagcaggggtttctggtctactggctagagctaaggaagttgaaaaggaaagctcacttctttggaggcacctgtccagaagcctggcctaggcagcttcaacctttgaacttactttttgaaatgaaaagtaatttatttgttttgctacatactgttccagacttttaaaggggacaatgaaggtgactgtggggaggagcatgtcaggtttgggcttggttgttttagaagcacctgggtgtgcctacctactcctcttttcttttaaaagggcccacaatgctccaatttcctgtctcctttagagagacatgaaactatcacaggtgctggatgacaataaaagtttatgttcctttt

SEQ ID NO: 356258 - DNA, 1173 bp, Homo Sapiens
agcggaacaagcctttgtgtcacactgtgcaaccttcctccctttcttaaatgcttggggtgagagagaagagaggctagggtggggcatggaggacacagagagagagagtgctgtgtattccttcccagctactgtcctgtcctcagctaacttgctctgggacagcttccgcagggctacagatactgcactcagctgactgtcctttcttctgggcccctggtcccagagcagagctgacaaaggagattcctgagagagcaccttcttatcacagaaagtgctgagccaagagctcctagctgccccttttgcagatgtgaagggccagtgaaccttggacccagatggttgcttaatactcctttgcccctccctcccctcactccttcctttgcgggctgcctcacctcctccacccttcttgcttaaatccataggcatttgtctggccttcccttttactgctggctgggaaggaggagcatcagaccacagatcctggaaggcacttctctccctgactgccgctcacactgccgtgagaacctgcttatatccaggaccaaggaggcaatgccaggaagctggtgaagggtttcctctcctccaccatggttgacagcactgagtatgaagtggcctcccagcctgaggtggaaacctcccctttgggtgatggggccagcccagggccggagcaggtgaagctgaagaaggagatctcactgcttaacggcgtgtgcctgattgtggggaacatgatcggctcaggcatctttgtttcccccaagggtgtgctcatatacagtgcctcctttggtctctctctggtcatctgggctgtcgggggcctcttctccgtctttggggccctttgttatgcggaactgggcaccaccattaagaaatctggggccagctatgcctatatcctggaggcctatgaagaataccatgctttcatcagaatatggacctccctgctcatcattgagcacaccagccaggccatcattgccatcacctttgccaactacatggtacagcctctcttcccgacctgcttcgccccttatgctgccagccgaatgctggctactgcctgcatctgtctcttaaccttcattaactgtgcctatgtcaaatggggaaccctggtacaagata

SEQ ID NO: 356259 - DNA, 2830 bp, Homo Sapiens
  misc_feature (3)..(3): n is a, c, g, or t
  misc_feature (21)..(21): n is a, c, g, or t
  misc_feature (37)..(37): n is a, c, g, or t
  misc_feature (80)..(80): n is a, c, g, or t
  misc_feature (82)..(82): n is a, c, g, or t
  misc_feature (93)..(93): n is a, c, g, or t
  misc_feature (100)..(100): n is a, c, g, or t
  misc_feature (135)..(135): n is a, c, g, or t
  misc_feature (137)..(137): n is a, c, g, or t
  misc_feature (151)..(151): n is a, c, g, or t
  misc_feature (159)..(159): n is a, c, g, or t
  misc_feature (185)..(185): n is a, c, g, or t
  misc_feature (187)..(187): n is a, c, g, or t
  misc_feature (203)..(203): n is a, c, g, or t
  misc_feature (206)..(206): n is a, c, g, or t
  misc_feature (211)..(211): n is a, c, g, or t
  misc_feature (220)..(220): n is a, c, g, or t
  misc_feature (227)..(227): n is a, c, g, or t
  misc_feature (239)..(240): n is a, c, g, or t
  misc_feature (242)..(242): n is a, c, g, or t
  misc_feature (245)..(247): n is a, c, g, or t
  misc_feature (251)..(252): n is a, c, g, or t
  misc_feature (256)..(256): n is a, c, g, or t
  misc_feature (261)..(262): n is a, c, g, or t
  misc_feature (271)..(272): n is a, c, g, or t
  misc_feature (288)..(288): n is a, c, g, or t
  misc_feature (296)..(296): n is a, c, g, or t
  misc_feature (300)..(300): n is a, c, g, or t
  misc_feature (313)..(313): n is a, c, g, or t
  misc_feature (322)..(322): n is a, c, g, or t
  misc_feature (349)..(349): n is a, c, g, or t
agnggaagtggtgtcttgtgngcccgaggtttggggngcttgccttgggactccatccccatctctttcccgctagcgcncngagaggaaggngcctgcntgccgggcccacggattcttcggctgtgggataangnaatgtgtgttctgnaggaaggnggtcatgggtgggtggtagacgagangnggggttgtgagggggnggnaagcngagggtgtngaggggntgagttgaaatnngnggnnntagnnaggnggaannaggagaagnnaggggggggtggagantaaagagnagangaataaagaatgnaattggaanaggtctcaggatgggatcatgcctttnctcctcttgcggtcggccatggttctccggttgtggttggctcttgtcgccttgttggcttccttcttcctgcgttcctgggttgtctcgcggctctgcccatggcctcgggggctgccggccactgctgttgagctgtcatgccggtaccctttcttggcgagaaaggccatgcgcctggcttctgccttctctctcagcactgcagggtcctgaacaaaatggtcgggcttgggagcctcctcgtcagcatcgtcttcctcatcgtcgtcatcctcctcctgcccttctctaggcactttggttctcagcacctgagggatggtgaatggcctgcggctgatgagctcgtcatcagagtctgcatcattggcgcccacctggttgccatcgtatgtgtcatcgtactcatcctcgtagtagacactgtggtagggcaggctctcgcctggctgcagtggcacctcctccaccaccacgctgtactgctcgtagcgctgccgctgtgccgccactgcacgcttgtcgttcagcaaactccgcgtgttttcctccttcctggtgctcttgcccttgtgcacccggctcaggtctactgagtccctgctgaacacatcaaactcgtcattctggaagacgttgtggcgagacgtcagcaggggtgtagggtctggtttcatttctctgtctaggttgcggtccagctggctgagggtgggggccagccgctcctccaggatattgttgatcacctgctctgggtcgtagtggtagtactccaggcaggccaggatgaagccctcaccaaggtctggcagcaggtccttcacttgggagatgagagagtccagttccaccccacacatggcagggcccacagccgcggctgctcccatgcactcctcttcctccgagttctccggatgtgatgatgcttgactgactgcctctgctgtcaccgtgaccccgttaggctccccattaggctcctcaatcaccgatgggtctttagcatctgtggctttccgtctgtccaccccttcccatgcactctcgactgcctggaggatgtaggcagtccgcgtctcgtccaagactgatgaggcctgctgcagcaagctgatgtcttcggccacggggaagagtgcatcatagtcccggaggaacctcttctcctgcagcaaggagctgaagatctgaaggaactcttcgatgaagccctgaatgttgtcacagctgctttctaggatgggaaggaggcagatctggttcaggatgatgtggaaaatctccattagcttcttcctggaatgggagagcctctgccacaggtcaccaagaagcttgctatcttcaagcctcctcttcttaattgcagactccatttcgggaattgctgcttcgtagaaggaagctagtctgtaacaaaagtcgtgcttctggaaggtctggcaagccaaagggaagatatccagaaaggcccaaagtgtggtgcaggtatcacaaaggtagagaacaatgtcctttaattccaggagaggcatgtcactgggggtcaatcggcccctctcctcaagcttctggggtgtggtattggccccgtccccttgcaaaccacagtgctggaggatattgctgaagacctgaaggatggtaggcagggtttcatccaggtcactgtagtaacttggctgctgtgtaaagatgtttcctatcatcttctggagcagtggtgagttgccttttccaaagagcacgcagaggtccaggatctttggaatgtcaaagaggaagttattgtagaggatttctccaaacgcagaaggggaaatgaagtgatctttggattccttgtgagtggacatgcggaggaaggtgagaaaaacacttcgatggaggcgcttctgcatgtcaacaacctcaggggctgaggccaccccctcgtcgaatttgcgggggacatagcgcaggtaggagtccaggcacttctgtagagtctcgtcaaagatcacctggcaccagaatttatcgtgaggcaaggccaggagccagtcgaggtcattggctacgaaggtggcgcgttccaggtactcctccactagggcgggaatgttgtctttagggggcggtttgtataacacaaaataccggtctgccttctgctcggggtggcgagtttccaaactgtagagcctgtgggtaccacaaggattcttcaaggccacctctcatgtgggtctgcaggaccccctcccatttaaatcaaatttgtatcatggagttacaggtgcaaatcagcgctggtgaagtcctcagctttcctgtcttcgggtccttgtgggtgatctggagttggtccaggggcagagctggcattgtgctgcgtgaccctcctgttccagctctaggatcccagcagatcagacacacatggtctctgcatacacgaggtggcctcggcggctccaccaccggctctgt

SEQ ID NO: 356260 - DNA, 621 bp, Homo Sapiens
agagaaggcagaagccaggcgcatggcctttctcgccaagaaagggtaccggcatgacagctcaacagcagtggccggcagcccccgaggccatgggcagagccgcgagacaacccaggaacgcaggaagaaggaagccaacaaggcgacaagagccaaccacaaccggagaaccatggccgaccgcaagaggagcaaaggcatgatcccatcctgagacctggtgcagggccagtggggaggcagcggcaccagactcaccaggccgtgctcccatcgcctggggcctcctcactaggggccccaagttcaactcaacccctcaacagcctcagctttgcagcccctgagaaggccgcctctcatctaccagccagccatgagcgccttcctgcagaacacacagtgccttatgccacagccgaagaatccgtggggccggcaagcaggcaccttcccccagctgcgctagcgggaaagagatggggatggagtcccaaggcaagcgccccaaacctcgggccacaagacaccacttcccctttaccctggacagcaggaaacctgtatattcaaaaacacaaaaagtcctgctaataaaatttttgaccctttcaaaaa

SEQ ID NO: 356261 - DNA, 854 bp, Homo Sapiens
  misc_feature (732)..(776): n is a, c, g, or t
tgtttttcagtgtgcgttcatcacgtttcattttagaattatatttgactacatagtcagacttcacaaacaaaatattttcaggcttcagatctgtatgggttaatttattatgatgtaaaaaatttattgactggcagatctgatacgccatctgcctgatgtggtcaatttgaaatggcagaaagctgttttctttaatgaaatcgtaagtactaagtcccagtagttcaaacacaatacaaacatgaccatgatgatcaaaccattctagcatctggacacatcggaagacactattgggatcagtactatttaagtgctctaatacttggatttctgaacgagctgcttcacggtaacggcctacattttttacgattttcactgctacatgcatgccatccatgccatgatcaatacactctacaactgtgacaaaggctccttcacccaaagtgaccaccatttcatctagagtcaggaggcaaaacagaggtgtaagtacctgaggacaaactgtctagttcttcaaacaatgaatgcttaagtgtggaatattttcaaatgatctctaacaaagcataactaaggtttcagcactcaaattattttagtttcagctgctacaaaaacaattagatagagctatctttcttgctctaatctcaaattccactgattattttggaactttagaatagaaatatttaaattctacagaaaagaagnnnnnnnnnnnnnnnnnnnnnnnnnnnnnnnnnnnnnnnnnnnnncaatgaagagttctttagccccccgctggcaagctattcttaaaaagattattgcgttctgcaaagtttacaaaagtg

SEQ ID NO: 356262 - DNA, 1332 bp, Homo Sapiens
ctgttgggtgtgtaccacacccccaaggttggctcgcaacctactctttgatggagggatcccatggcaggtaaatgtgcctcccaagcaccccatttttgtcacctccaaaaaaagcggggctcaaccaggaatcttcaagggaattttcttgttgtaaccctttcaaaaaaattgtgggcagttttaacccaagcaaagggacggggagcaatagacatgatcgataatggtattgctctctaataaggcttcaaccactagtcttgcttgcatgcatccaaacacagtgatgggagcatctttctcgtaatctcggaaaccaccactccgctgaggtaaactatgaggcatgttcaggttggtgcgtatgtagcggcctttggcatcgaagcactgggacagccagtacttcccaaacacaacatccatcctctcaccatgccgacacacaaaaaggcatcgcttctgggggccgggctggctgttgaccctcagcggctgcatgggctggcagatgatagtaagaggagtcgtctccccgagcccctggtcctcataaggccgcctctccaatactccatccccaaacgtgagagagttggacgacgatgtatttaagattgaataagaaccatgaaatatccaggtgctgcattcatcagccttggtaatgtaattctcaggcaggagtccagagcagccggtggttaaggacgtgccatagatccaaccctcgctggtgctggtctgctccattggagacatgaagatgaagtccccggggaccagctccagctcatcgtcattttgtggggtataggggtagatgacctgtaatgtctcatggttagcaaatcggatatcccgagaaaatatggtagccacccagtcacaccctagcttgacgtcaatgttctgggccagtttctctagggtgggtaggtggctggcttggaagtggtaagccagggtcacatgtagctgcttcttatgaggttccacatgcacttcggttttggatgcagcctctgcagcaaagtcagcagcaaacttcttgaggacctccgcactgtcttcctttacaaagaggccgatgaagttggacgacgtatagagctccaggggcagcgggccgagaacttacatttccagcgactgaccgtggtctgcagggcttcccccagggcatccaccttgctgtcctcgcactggcagggaaaacaggcagtcttcactcagacacaaggggagatggaagtctgctgctacttaacattggcatcctctccccagagacctggaggaggctgataatgcaattacttaacc

SEQ ID NO: 356263 - DNA, 1270 bp, Homo Sapiens
  misc_feature (13)..(13): n is a, c, g, or t
  misc_feature (297)..(297): n is a, c, g, or t
  misc_feature (539)..(574): n is a, c, g, or t
  misc_feature (624)..(634): n is a, c, g, or t
atacctataaaanagtttctccttctctgaagggaaaggaaagtgctaggcagcctgtgattagcaacattctttgtgcttttttgttgttcctctgctctgtcacagttctacgttgtttgccttagaaatgtaatttttaaaaaccattttaaaaatgaacggtgatttggctggctggaaaaaaatcacactgtcaggggactatatttgaagtcagtctagacggggctggactaggaacccacctggacccaggagaccccacaggacccaggaggtccctgccggaaggcnagggttcaggtgagagtggctcacctctgagctggtgaagtgaggacttgcctgtgacatgacccagggatctgctgctggcttctggagacagggccttgggctgacttctcaggttgattgaggcctcctgactagcggtgttcccaggctagaggtgattggctgcaacaaagatgcttctattagtctattagcagtgccttcgggaccctgggattttgctctctctagaaaggtgnnnnnnnnnnnnnnnnnnnnnnnnnnnnnnnnnnnncctggctttgctccagggtttgtgtatttgcctgtttattgtcctgctcnnnnnnnnnnnggatgaaaactccagcctttcctgactcacctccatcttcggttcttcagttttctgagaagagttgggatatgtgggaaggggcatgggagctcggcagcctccgcctgccaggaaggcagtttcgcctctgcaggaaagagcagagcccgtgggaagccctgggtgagggtggcgcagctggcccagcacgcatggtattgccagccacggggggcctgcgtgtagtctctgctccctgcatttcaccttctttgttgactttccttctctgttttcccccatctgtttgccagaggggtgggactggcaacagaacagccgtggctgctttatctctcctctccacggtgtactcaggcctgagtggtgactcacgggagcctggccacctcgcagctgttcgccccctcaacctttgaactggaactgctggctcacacagggttttcgacaactgcagctgaatctcatggaaaagctggattcctctgccttacgcagaaacacccgggctccatctgccaggtgcttgccactggtcctggcagaaatggcggctgctgaaagtgaccttccaaatccttggtggcacttcagcgccacaggctctccaataaaaaccctttacacaca

SEQ ID NO: 356264 - DNA, 564 bp, Homo Sapiens
ggagaggcgtcttgacgcctgcggaagaagtgcctgtcgaatgcaggcgcgtgcagcaaagtgttcgtgaagagctccgacctcctcaagcacctacgcacccacaccggggagcggccctacgagtgcgcccagtgcggcaaggccttcagccagacgtcgcacttgacgcagcaccagcgcatccacagcggcgagacgccctacgcgtgccccgtgtgcggcaaggccttccggcatagctcctcgctggtgcggcaccagcgcatccacacggccgagaagtccttccgctgctccgagtgcggcaaggccttcagccacggctccaacctcagccagcaccgcaagatccacgcgggtgggcgtccttatgcttgcgcacagtgtggccgccgcttctgccgcaactcgcacctgatccagcacgagcgtacgcacacaggcgagaagcccttcgtgtgcgcgctctgcggtgctgccttcagccagggctcctcgctctttaagcaccagcgcgtgcacacaggcgagaagcccttcgcctgcccacagtgcggccgc

SEQ ID NO: 356265 - DNA, 1092 bp, Homo Sapiens
  misc_feature (4)..(4): n is a, c, g, or t
  misc_feature (10)..(10): n is a, c, g, or t
  misc_feature (16)..(16): n is a, c, g, or t
  misc_feature (18)..(18): n is a, c, g, or t
  misc_feature (38)..(38): n is a, c, g, or t
  misc_feature (45)..(46): n is a, c, g, or t
  misc_feature (49)..(51): n is a, c, g, or t
  misc_feature (53)..(53): n is a, c, g, or t
  misc_feature (56)..(56): n is a, c, g, or t
  misc_feature (64)..(64): n is a, c, g, or t
  misc_feature (68)..(68): n is a, c, g, or t
  misc_feature (76)..(76): n is a, c, g, or t
  misc_feature (84)..(84): n is a, c, g, or t
  misc_feature (209)..(209): n is a, c, g, or t
ccgnaagccnttccgnanacgggcacgcttaggcgttncccgctnngannngntgntgtgcgtnaagngcgacgtntggttaangccttgccgcactgggcgcactcgtagggccgctcgcccggtgtgtgtgcgtaggtgcttgaggaggtcggagctcttcacgaacactttgctgcacgccctgcattcgaaggacttctcccccnagcgtgaagagcctcgcccagctcgtcccaggtcgagggctcctggccaccgagggagtctatgaggctcctcccaaaactgcacccattcggtgatgtccccgaccgccggccagcctccaggtcctgggcgctcccaaaggttctcccagggacctcctgtgcacatggtttctgccgctcaggcgtcctgggctgcctccccagcaacgcatgctctgtgagtgtcttttccctaagcccggacgccctcgggaggcctaagcggggaggtcagtcgcaggctgacgctggcttgcccactgcctgagcctagcaggagcctctcccagtagatcaccgacacccccgtgggttttctctcccgagatggggaggcaccccgttgtctctgcaggctttttacactgtggcaggcaccggcaacagggaagacgctagtagtcatcccaggtggggtatctgggaaagctcgtggccattctccagaaacatctctatcctctgtcaaactccaggaaccagggttgcgcctcctgtaggtggtcctggacagggttgtgtccgttccactgggaacccagggctcctcgccacgctccagttggatgaccacacgaggtcgagaggtggagagtcccagcgaggccacaagtgcgaagttgtctagcatcacgcggcggtacagggccctctgggctgtgtccaggagcccccactcctcctgggagaagtacacagccacatcctcaaaggccatctggtccttcctcgccgccagcctcgagcaccaggaaccccctggaaaccggacccgacccgcggtccccagcccagaccaccggtgtggcctgacgcgggcggcgaagatcccgggaattcc

SEQ ID NO: 356266 - DNA, 967 bp, Homo Sapiens
ttggtgctagtgcttgaggaggtcggagctcttcacgaacactttgctgcacgccctgcatttcgaaggaccttctcccagcgtgaagaccctcgcccagctcgtcccaggtcgagggctcctggccacccgagaagtctatgaggctcctgccaaagcctgccgcccattctccgatccctgccaccactgcggcccttcaaggtccgaaggcaattcccgaaggcttctccccagggacctcctgtgcacatggcttctgccgctcaggcgtcctgggctgccctcccaaggcacccggtactctgtgaaggtcttttccctgggccggctgctcttggggggcctgagtggggaggtcagtcgcaggctgatgctggcctggtcactgcgcgagcctagcaggagcctctcccagtagatcaccgacacccccgtgggttttctctcctgagatggggaggcacccggttgtcgctgcaggctttttacactgtggcaggcatcggcaactgggaagacgctagtagtcatcccaggtggggtatctgggaaagctcgtggccattctccagaaacatctctatcctctgtcaaactccaggaaccagagttgagcctcccgtaggtgttcctggccagggtcatgtcctttccactgggaacccagggctcctcgccacgctcaagttgaatgaccacacgaggtcgggaggtagagagtccaagtgaggtcacaagtgtgaagttttccagcatcacgtggcggtacagggccctctgcgctgtgtccaggagcccccactcctcctgggagaagtacacggccacatcctcgaaggtcatcaggtctcgaagataccgaggcttgggggcgcggccggctgctcgtggtccgtaccttcctggccgcccgcctcgggccccgacccgcgcgccacagcccagaccaccggtgtggcctgac

SEQ ID NO: 356267 - DNA, 1779 bp, Homo Sapiens
  misc_feature (19)..(19): n is a, c, g, or t
  misc_feature (54)..(54): n is a, c, g, or t
  misc_feature (898)..(898): n is a, c, g, or t
taaaatttcaaattatatngcctttaagttaattaaggaattttaggtaaaatnatggagtattttaactactggattttgcaactaatcagtttcacgtaaattagcctgaaagctgctacttatttacttctgaaggccttaaaatagttacaatactattcacattttacccattggtctctctgcattttaattttaaacttcaagttactgaagtacaaaagattctactgaatttagtcagacttcttttgatttttgcttatgaagtagattttataagtaaagatagccaacccaataaaccaagttgaacagggcaaaagcggttgggaaaaatattctagaataagagtcaattttggcaatgcgtatgtgtatccttccttccctccaagatcctgttctgcagtcttcaaagcaacagaagaagctggcacaatctttgccctccaaacactgatacccataatcatcttcttgcggcacagaaatattattcattggaatcagagtggatccaggatggagaccaggagtcatcgaggctttattttttagctttctgtctttagtagcagtctttcctttttggttgctggtaaaataatgcaaggttccatattccatcaaggctgcaaaaacaaaaatgaaacaaacagaaacaaagagatccatcgcagtcacataagaaaccttaggtaaagacttcctggcaattgtactcagggttgtcatagtcagaactgtagtgatacccaacgatgttcttgcaggcactgcatctttattgatccaaaaagacacccaagaaagaacaactgtcagaatgcatggaatgtaggtctgaatagtgaaatatcccattcttctgctcaggtcaaaaaaaattgtncatgataacataatccccagagatcgtgtgagtgatttcagttgagttccgtaaccctacaaatgcaaactgatataatctccagtatttaggatcagccacttctacggagggctttttccacctatactcaaatttcatttttagggtatccatagcttgaaaattccaagtggacaggaatgttcaatccattgggaaagtttatgaagctgaagataaccattctgcattaattggtcaatcttagagtatacagaactcgtccatcattccaaattcgaagcagacgatttaggagttgttatccagtgagcatcagattttcttgagtttctgaagaaagtgtcaggaatccaaatttttccaaccatattactgttaagcataagcactttcatggtactattgaattttaaacgactgtcaaaccaggtttgggcaaaaattatatctattgtatattccatattaattggatcaactggtccaatgctgtttacataaacatcagtttcaattaccgtgggcctcactcctatatctggacgaagtttattgtcatagccttgaagcaatgaattcagaatttgtgtgatatctccttcatgaatttttggggccaagacccaggttttgttcaccgttaaatcctcatcatcttcatcatctgccttatcaacacagtttcccaaatgcagggtcagtaacaagaagaccaacctcacccctctactttgactccgcagaagaaaaggggagaagagaaaagctttcaaaggacccatcggaatcgcttttttacgtgtgctgcactagctcaattctcccagccaggacttttcctcccacctcagcagcagctggctgagtaccccgct

SEQ ID NO: 356268 - DNA, 828 bp, Homo Sapiens
atcaggccaaatcggccgagctcgaattcgtcgagagcggagagggggttgcaaaaggagccgagcggcttctgctcaatggcgggaaaagccgccggtgctctgacggcctcgttcccctagcagttgctgggggagtttcctgccggcgcggctggagtctctgattctcagggttctggtggttggaagatgctccagagagacgaggctgcggcggaggacggtggctggcggccgaagtcggcaacggcgctagggtggagagaacggcggcagcgagcggcggctggcggcgtgagtgtggccggggcggtgtaaacagccccggaggcggcggagtgcggcggtcgagaccccgagggggaagcggcggctgagtcaggcgtcgcgcctccgttggaaacttgggctgagtaccgcggcgggcgcgagcgaggcgccctagacatcttctccctcccttgcctcagcatttattgctaaacatgggtgcatatcctggataaacccaaaactgaaaaaccataatgctcatggtgctgggaactggtccacgtcatggcctgagcacgcatgcaaggactggacgagtgcgacaatggaagatgcacacacagcctgtcctacggtattcctcacggccttggaagactggtcattcctcgcagctctactgatggtcatgcctggatccccgacgtggcacaattactgctcaacacatctacttcagaacacatcacgtactaacgaaagacttcagggcagctggaaaatcaggatctgctcttgagcttccagtggaaaatgtcacgaatggtatcc

SEQ ID NO: 356269 - DNA, 3179 bp, Homo Sapiens
  misc_feature (206)..(246): n is a, c, g, or t
  misc_feature (1310)..(1310): n is a, c, g, or t
  misc_feature (2604)..(2729): n is a, c, g, or t
  misc_feature (2741)..(2751): n is a, c, g, or t
  misc_feature (2776)..(2785): n is a, c, g, or t
  misc_feature (2809)..(2955): n is a, c, g, or t
  misc_feature (2971)..(2979): n is a, c, g, or t
  misc_feature (3095)..(3137): n is a, c, g, or t
agcgggggggcttctgctcaatggcggaaaagccgccggtgctctgacggcctcgttcccctagcagttgcgggggagtttcctgccggcgcggctggagtctctgattctcagggttcggtggttggaagatgctccagagagacgaggctgcggcggaggaggtggcggcggccgaatcggcaacggcgctagggtggagagannnnnnnnnnnnnnnnnnnnnnnnnnnnnnnnnnnnnnnnntgtaaacagccccggaggcggcggaggcggcggtcgagaccccgagggggaagcggcggctgagtcagggtcgcgcctccgttggaaacttgggctgagtaccgcggcgggcgcgagcgaggcgccctagacatcttctccctcccttgcctcagatttattgctaaacatgggtgcatttttggataaacccaaaactgaaaaacataatgctcatggtgctgggaatggtttacgttatggcctgagcagcatgcaaggatggagagtggaaatggaagatgcacacacagctgttgtaggtattcctcacggcttggaagactggtcattttttgcagtttatgatggtcatgctggatcccgagtggcaaattactgctcaacacatttattagaacacatcactactaacgaagactttagggcagctggaaaatcaggatctgctcttgagctttcagtggaaaatgttaagaatggtatcagaactggatttttgaaaattgatgaatacatgcgtaacttttcagacctcagaaacgggatggacaggagtggttcaactgcagtgggagttatgatttcacctaaacatatctactttatcaactgtggtgattcacgtgctgttctgtataggaatggacaagtctgcttttctacccaggatcacaaaccttgcaatccaagggaaaaggagcgaatccaaaatgcaggaggcagcatgatgatacaacatgttaatggttcattagcagtatctcgtgctctgggggactatgattacaagtgtgttgatggcaagggcccaacagaacaacttgtttctccagagcctgaggtttatgaaattttaagagcagaagaggatgaatttatcatcttggcttgtgatgggatctgggatgttatgagtaatgaggagctctgtgaatatgttaaatctaggcttgaggtatctgatgacctggaaaatgtgtgcaattgggtagtggacacttgtttacacaagggaagtcgagataacatgagtattgtactagtttgcttttcaaatgctnccaaggtctcagatgaagcggtgaaaaaagattcagagttggataagcacttggaatcacgggttgaagagattatggagaagtctggcgaggaaggaatgcctgatcttgcccatgtcatgcgcatcttgtctgcagaaaatatcccaaatttgcctcctgggggaggtcttgctggcaagcgtaatgttattgaagctgtttatagtagactgaatccacatagagaaagtgatggggcctccgatgaagcagaggaaagtggatcacagggaaaattggtggaagctctcaggcaaatgagaattaatcataggggaaactaccgacaacttctggaggagatgctgactagttacaggctagctaaagtagagggagaagaaagccctgctgaaccagctgccacagctacttcttcgaacagtgatgctggaaacccagtgacaatgcaggaaagccatactgaatcagaaagtggtcttgctgaattagacagctctaatgaagatgcagggacaaagatgagtggtgaaaaaatatgactttcctttttggtaatatttttgtgatctttgatggtttttaacctaggaagtgtaatgtatgcatttatataactgttttgttatttgaatcttggaaaactagttttattatattcagatagccttgttttttaaaaaggcctttgcatacacctttatgagatagtgtaaaattgactatttatagtactatggatttaatgaaattatatgtcatttcacattgtatgccagaaattaggctaccaattatgaattaaagtcagtagttaaattaatactagatagaattagaaattttgattagagagattatgctatattatggaaaaacttgttaatgtagaattatactgcttcatattattttacctattagtacactcatagttagctttgtaataaatttatgttttctttaataattttagttcttcaaagaatggctgatgctggcctgtaatttttctttcaaggatgataatttgtgtgttgtttgatttgtttatattttacatctctgtagttttatttttagaagttgtgagatattggatgtgtggctatttttcctttctctgtattctttatgaaacataacttttgaaaaacctatgtattattcatacagctttggtttgtatattctgtatagcctaactacacacatcaaaatgtatgtcaaccaagtgtttagaatgaaattataagtgtttaagtccaaataaagcatgtgatgtggaatnnnnnnnnnnnnnnnnnnnnnnnnnnnnnnnnnnnnnnnnnnnnnnnnnnnnnnnnnnnnnnnnnnnnnnnnnnnnnnnnnnnnnnnnnnnnnnnnnnnnnnnnnnnnnnnnnnnnnnnnnnnnnntttgggggcccnnnnnnnnnnnaaaaattttttaaaacctttttttnnnnnnnnnnccccaaaaggaaaagaaaaggggnnnnnnnnnnnnnnnnnnnnnnnnnnnnnnnnnnnnnnnnnnnnnnnnnnnnnnnnnnnnnnnnnnnnnnnnnnnnnnnnnnnnnnnnnnnnnnnnnnnnnnnnnnnnnnnnnnnnnnnnnnnnnnnnnnnnnnnnnnnnnnnnnnnctttatttaaattttnnnnnnnnntgggaatttttgggaataggggggtaatttttttaaaccttcggccgacggggaacccccccaaaagggggtggaaaaacctaaatccccaggggaataaacccttgtggcccctnnnnnnnnnnnnnnnnnnnnnnnnnnnnnnnnnnnnnnnnnnnttttcccttatgggccccgttttaaatcaaaaggggggaaaa

SEQ ID NO: 356270 - DNA, 1950 bp, Homo Sapiens
  misc_feature (1494)..(1494): n is a, c, g, or t
cggtccggaattcccgggatctgggggcctacagaagggttgctgatcacctgccacccagggtcggggccccgcaccatccgggggcgagctcccgggaaggggctccgcctctacacccaccccccaacctctgacatcgccggccgaacgggagctgccgcttccttcccggccccgctgcacctccccagggagccgagggcgggcgtggacgggaccgacgtggaacgcattctgtagcccagacgggcggccccggcggcttcgggagtggggtcacgcccagctggagaagcagttagggcggacgaagcaggagccgcggggctgggaggattccagtcggaacgcaaccgatcctggggaggcgagagccttggaagccgccagccccagaagatgcctgccttcaatagattgtttcccctggcttctctcgtgcttatctactgggtcagtgtctgcttccctgtgtgtgtggaagtgccctcggagacggaggccgtgcagggcaaccccatgaagctgcgctgcatctcctgcatgaagagagaggaggtggaggccaccacggtggtggaatggttctacaggcccgagggcggtaaagatttccttatttacgagtatcggaatggccaccaggaggtggagagcccctttcaggggcgcctgcagtggaatggcagcaaggacctgcaggacgtgtccatcactgtgctcaacgtcactctgaacgactctggcctctacacctgcaatgtgtcccgggagtttgagtttgaggcgcatcggccctttgtgaagacgacgcggctgatccccctaagagtcaccgaggaggctggagaggacttcacctctgtggtctcagaaatcatgatgtacatccttctggtcttcctcaccttgtggctgctcatcgagatgatatattgctacagaaaggtctcaaaagccgaagaggcagcccaagaaaacgcgtctgactaccttgccatcccatctgagaacaaggagaactctgcggtaccagtggaggaatagaacaggagcagtgtgacatgaggtggcctgaacacttgagggactggacatcccatgttcagcaatgtcaatggcatcaggagggcgccccaagggccccatcgcttcccttcatgcatccaatgttctgtttcattcattcatccatacatccacctgcctctgagctttcacctctgactccctaactccatcagacctctacgcaccataagactctgccagaactgagaagcaaacatttctacatagactcaacctcaccctctcctagttttccaacaagacactccaaagccaactggatttctcccctgtgctccaaatgactttgtacaagtgctggagttagcacctccctctgcccttaactggctggaactggttcattctccattactgcaagagaatggaagtcttaatagaaggaagcaggagtgattnagttcgggttaaagcaaaagtgtgtcatgaacttggattccctgaagtcagttttgtcaggttcatggcccactttgctacagcatcagagtgaagcacgcctgtctaggttctccagtgacagaaagatcctgaagcatggactaacatgctctctggagcttagtactccagagctagatcctgatgggtctctaaggttccctccaagaagacaaggacaggagacttgggaaggaccaatggtaatttaagtggctcttaaaaagtcatgcaacatgtttctggacacgttcctgatcctattgcgataatgtatgtgtgccctccctgtgggcacaccacctgggcattaggactgaaattcctgagttcttcctctcaaaatttctgtgcaccagtattattcctcattttacatacaggaggcaactaagactcatacagggcgtcaac

SEQ ID NO: 356271 - DNA, 1102 bp, Homo Sapiens
  misc_feature (5)..(5): n is a, c, g, or t
  misc_feature (8)..(8): n is a, c, g, or t
  misc_feature (17)..(17): n is a, c, g, or t
  misc_feature (25)..(25): n is a, c, g, or t
  misc_feature (27)..(27): n is a, c, g, or t
  misc_feature (34)..(34): n is a, c, g, or t
  misc_feature (36)..(36): n is a, c, g, or t
  misc_feature (69)..(69): n is a, c, g, or t
  misc_feature (75)..(75): n is a, c, g, or t
  misc_feature (91)..(91): n is a, c, g, or t
  misc_feature (98)..(98): n is a, c, g, or t
  misc_feature (110)..(110): n is a, c, g, or t
  misc_feature (116)..(116): n is a, c, g, or t
  misc_feature (130)..(130): n is a, c, g, or t
  misc_feature (148)..(148): n is a, c, g, or t
  misc_feature (170)..(170): n is a, c, g, or t
ttcanatnacttgacanattatgancntctgcangncttgctccatccactcaggccccctgaaagggntctccncctcctgtgccattcnatactcnaaataagaaatnttaccnccctcggcctgtanaccattccaccaccgtgntgcctccacctcctctctcttncatgcaggagatgcagcgcagcttcatggggttgccctgcacggcctccgtctccgagggcacttccacacacacagggaagcagacactgacccagtagataagcacgagagaagccaggggaaacaatctattgaaggcaggcatcttctggggctggcggcttccaaggctacacagagagattccctcggtcaaggatgcgccctctcagattctttcgaggaaaccctttgggacgaactgcccccagggggcgactttctgaccgaaggaagggccgagcaccggtccctggggagggccctgggagcttttggacccgggtgggggctttggcccctaagcgaccccacgggacctccccagttcgagggagccgatcagccgctccgcgcccgctctcgccggcgctcagcaccacggacagtcgcctccccgcccaccccggaactccagcttccactcgcgcccctgcctcgctcgtttgcgcccagggtaagctcagctcggaagggagtcgcactgctggcctagcagccaggctgtggaagggtccaggttgattcacctctcgcctccccaggatcggttgcgttccgactggaatcctcccagccccgcggctcctgcttcgtccgccctaactgcttctccagctgggcgtgaccccactcccgaagccgccggggccgcccgtctgggctacagaatgcgttccacgtcggtcccgtccacgcccgccctcggctccctggggaggtgcagcggggccgggaaggaagcggcagctcccgttcggccggcgatgtcagaggttggggggtgggtgtagaggcggagccccttcccgggagctcgcccccggatggtgcggggccccgaccctgggtggcaggagatcagcaacccttctctacgatcctggaaat

SEQ ID NO: 356272 - DNA, 958 bp, Homo Sapiens
ttattttttgagcgccgggatttcttgcacaaaataaataaaaaattattaaccttgttcttttgggaggaagacaagaaaccatctattttcgggccttaaggttataaatgcaaatttaatagggcttcaaggtcaaacagtttgtttacatttttaaaagtcccgtaatgaatttaattacaacaaaggaaggcaggcggtcaaattgatagtttaattcttcaagtgataatataggaagtttcaccttgcctttgtccaagccccacctattaaaaccctttactcacagtttgaaactgaagcagtaaacttgtttccagacatctttttcagattgtcttaagcccaaagttgcctcacttccactattctcagcagccaaccaggatttggcagctgctccactgttacggttgagggaacagggatcagtcctgttagaagtctgtgagcctcaaactctacctgttctctgcaatcatccaaaatttgaaaaagaagctatatccagtgtttcactgccaaacagattcactactcttactgattcttcactgagctttgctagtataagcagagttccaagtctcccctagggttgtctctacatttctttatcattccagtgggtagggtttagctgggggaaggacatttcataagggttagttggactgagcagtatggacatttgcttttttcattacgtactgttgtttttccttgttaggtgtgctttggtggttttaatattattgtgccagggatggggaaatggggggggttgtgtgggaagagtacttattattgtgttttcttcagtgtaattgttcttggtaattgatacctctctgttttatttctctcattctttcaaaataaaactttttgaaactttggaggaacaaaagagaaaggaataggagaaaaagagaagaggaagggaaggaag

SEQ ID NO: 356273 - DNA, 1027 bp, Homo Sapiens
gggaaagaatgcggagccgggttcacacaccccgcggcggcgaggccttaaatagggaaaaggcctgaggcgcgcgcgggcctggagccgggacccgccctaggggctcggatcgccgcgcgctcgccgctcgcccgccagcccgcccgtggtccgtggcggcgcgctccacccggcacggggaggcgcggggcgcaccatggccgcagacacgccggggaaaccgagcgcctcgccgatggcaggagcgccggccagcgccaccaggaccccagacaagcccgggaaaccgagcgcagcaccgaaggcaggagcgccggccagcgccagccggaccccagacaagccccggagcgcggccgagcaccgcaagtcctccaagccggtcatggagaagcggcgccgagcgcgtattaacgagagcctcgctcagctcaaaaccctcatcctggacgccctcagaaaagagagctcccgccactcgaagctggagaaggcggacatcctggagatgaccgtgagacacctgcggagcctgcgtcgcgtgcaggtgacggccgcgctcagcgccgaccccgccgttctgggcaagtaccgcgccggcttccacgagtgtctggcggaggtgaaccgcttcctggccggctgcgagggcgtcccggccgacgtgcgctcccgcctgctgggccacctggcagcctgcctgcgccagctgggaccctcccgccgcccggcctcgctgtccccggctgcccccgcagaggccccagcgcccgaggtctacgcgggccgcccgctgctgccatcgctcggcggccccttccctctgctcgcgccgccgctgctgccgggtctgacccgggcgctgcccgccgcccccagggcggggccgcagggcccgggtgggccctggaggccgtggctgcgctgaggctgtggccctgagactgcatcggaggcggcgccccgttctagggccgtggcctttgccgagactgtagcagagaaaacgtatttattattccag

SEQ ID NO: 356274 - DNA, 1784 bp, Homo Sapiens
cggtccggaattcccgggatggggaagaggctgactgtacgttccttctactctggcaccactctccaggctgccatggggcccagcacccctctcctcatcttgttccttttgtcatggtcgggacccctccaaggacagcagcaccaccttgtggagtacatggaacgccgactagctgctttagaggaacggctggcccagtgccaggaccagagtagtcggcatgctgctgagctgcgggacttcaagaacaagatgctgccactgctggaggtggcagagaaggagcgggaggcactcagaactgaggccgacaccatctccgggagagtggatcgtctggagcgggaggtagactatctggagacccagaacccagctctgccctgtgtagagtttgatgagaaggtgactggaggccctgggaccaaaggcaagggaagaaggaatgagaagtacgatatggtgacagactgtggctacacaatctctcaagtgagatcaatgaagattctgaagcgatttggtggcccagctggtctatggaccaaggatccactggggcaaacagagaagatctacgtgttagatgggacacagaatgacacagcctttgtcttcccaaggctgcgtgacttcacccttgccatggctgcccggaaagcttcccgagtccgggtgcccttcccctgggtaggcacagggcagctggtatatggtggctttctttattttgctcggaggcctcctggaagacctggtggaggtggtgagatggagaacactttgcagctaatcaaattccacctggcaaaccgaacagtggtggacagctcagtattcccagcagaggggctgatccccccctacggcttgacagcagacacctacatcgacctggcagctgatgaggaaggtctttgggctgtctatgccacccgggaggatgacaggcacttgtgtctggccaagttagatccacagacactggacacagagcagcagtgggacacaccatgtcccagagagaatgctgaggctgcctttgtcatctgtgggaccctctatgtcgtctataacacccgtcctgccagtcgggcccgcatccagtgctcctttgatgccagcggcaccctgacccctgaacgggcagcactcccttattttccccgcagatatggtgcccatgccagcctccgctataacccccgagaacgccagctctatgcctgggatgatggctaccagattgtctataagctggagatgaggaagaaagaggaggaggtttgaggagctagccttgttttttgcatctttctcactcccatacatttatattatatccccactaaatttcttgttcctcattcttcaaatgtgggccagttgtggctcaaatcctctatatttttagccaatggcaatcaaattctttcagctcctttgtttcatacggaactccagatcctgagtaatccttttagagcccgaagagtcaaaaccctcaatgttccctcctgctctcctgccccatgtcaacaaatttcaggctaaggatgccccagacccagggctctaaccttgtatgcgggcaggcccagggagcaggcagcagtgttcttcccctcagagtgacttggggagggagaaataggaggagacgtccagctctgtcctctcttcctcactcctcccttcagtgtcctgaggaacaggactttctccacattgttttgtattgcaacattttgcattaaaaggaaaatccacaaaaaaaa

SEQ ID NO: 356275 - DNA, 1917 bp, Homo Sapiens
cttaaaaatgtgctttattttctcttagtgaactttatccaggaccagtgggggtgggagagccaagtgaggcccaaaggcagctgtgggctggctgcggggcctgtggttgtgtactcattcctatgagtgggtgagtgatggggactgggcaggaggacagggaggggacaggagctggctgctgttggggatgactaggaccacagctccttggtccttggcttggaccggggaagggcactcgctaggggtggcagtgagatggcatgcctcttccatgaggtggtgcccgcttcctgcccaagtgggagccaggaagccagcgggggcctgaggcatgcctgccctgtgggtagctcccgaaagattccagactcgctctttagaatcaggtggctcactgagctctgtattttgtttcctggagctttcactggtttcttcccctgagataccccaagtgacatgaaaagcatactcagggcctagagacactttactggggatgggcttctgtcacaggtcagaggtctgagaagaggggcaggccccactcctctccactagtagagaaaggttgacagagaatcatttcttgcttctcttggccgtagttttggttgtgctgggggcctcagccacagaggccttgggggctgtggctgctcgtgcccccttccttccccagaaagagctttggtggcccctgggaatcagactgcatggtttcttggtgggagaggaggcctggggtgaggagacggcctcagggactgtctcctccccttgcgcaggagtggcagaagggctgctgtccccagccatgggcaccccaggtagcaggggcaggtcggtgagggtgggctgcatctccatcctcagcaggtgctctgtcagggccgtctgttgccggtgctccctgtgcctgctcagctcctgctccagctccttgaggaagcctcgttctgagcagaatgggccactcagctctgggaactcctcatcgcttgaggcttcatcctcctcatccgaaatccagcgctccaccacaggctgcccgtccaggtccaggagaagtggcagggcttctgtcaccagctcgcggtagccatcctggttggtgcagctgtttccagacaggttgaggatgagaaggctctgggggaactcatccagcttcaatgtttctatcaggttctcagaaaggtccagaaactggaggcatgggaggtcgaggaggttttccacctgcctgatttggtttcctgccagagacaggaagcgcaaggaggggatgcaagccaggttctcaatttgctggatcttattcccttgcagatagagactgtgaagattctggaggccttctaagttcctgatagtagtaatcccctcccggtccaggcggacagtctgcagttcatcaagagtgtgaaacatcttctctgacagttccccatcttcagggaaagtcaagttccgcttagtgataagggcttcagtgatgcagacgcccccttcctctggaccctgggctgacttccctccagacatgatctaaaataaaaggctgctggtctgaggcgggagaggaacgaaaagagaggtcttggcggcccctaaggatggcagaactcaggatggcaggaggagagagaaactcagagacttaggagaggaggaaagggggttgattcagagaaaattgctggggtgaggtcgaagaaaacagtaaattgatgtgaagggtctggagtttgaggggtgtggaggggctttgctggcagcaagctggggtgttgtgggcaggaatggttgagaaaggagcagttcctaggaagccggagtcgttgctaagagactggacgccgagtggggaggtaaaggcgatcccgggaattccgggccctaggc

SEQ ID NO: 356276 - DNA, 2929 bp, Homo Sapiens
  misc_feature (10)..(10): n is a, c, g, or t
  misc_feature (14)..(14): n is a, c, g, or t
  misc_feature (21)..(21): n is a, c, g, or t
  misc_feature (28)..(28): n is a, c, g, or t
  misc_feature (56)..(56): n is a, c, g, or t
  misc_feature (63)..(63): n is a, c, g, or t
  misc_feature (84)..(84): n is a, c, g, or t
  misc_feature (89)..(89): n is a, c, g, or t
  misc_feature (94)..(94): n is a, c, g, or t
  misc_feature (96)..(96): n is a, c, g, or t
  misc_feature (154)..(156): n is a, c, g, or t
  misc_feature (185)..(186): n is a, c, g, or t
  misc_feature (206)..(206): n is a, c, g, or t
  misc_feature (214)..(216): n is a, c, g, or t
  misc_feature (223)..(223): n is a, c, g, or t
  misc_feature (247)..(247): n is a, c, g, or t
  misc_feature (255)..(255): n is a, c, g, or t
  misc_feature (262)..(262): n is a, c, g, or t
  misc_feature (266)..(266): n is a, c, g, or t
  misc_feature (288)..(288): n is a, c, g, or t
  misc_feature (290)..(291): n is a, c, g, or t
  misc_feature (293)..(293): n is a, c, g, or t
  misc_feature (297)..(297): n is a, c, g, or t
  misc_feature (301)..(301): n is a, c, g, or t
  misc_feature (303)..(303): n is a, c, g, or t
  misc_feature (305)..(306): n is a, c, g, or t
  misc_feature (315)..(315): n is a, c, g, or t
  misc_feature (318)..(319): n is a, c, g, or t
  misc_feature (322)..(322): n is a, c, g, or t
  misc_feature (332)..(336): n is a, c, g, or t
  misc_feature (339)..(339): n is a, c, g, or t
  misc_feature (346)..(346): n is a, c, g, or t
  misc_feature (358)..(360): n is a, c, g, or t
  misc_feature (376)..(379): n is a, c, g, or t
  misc_feature (381)..(381): n is a, c, g, or t
  misc_feature (383)..(383): n is a, c, g, or t
  misc_feature (389)..(391): n is a, c, g, or t
  misc_feature (396)..(396): n is a, c, g, or t
  misc_feature (406)..(406): n is a, c, g, or t
  misc_feature (409)..(410): n is a, c, g, or t
  misc_feature (413)..(413): n is a, c, g, or t
  misc_feature (417)..(418): n is a, c, g, or t
  misc_feature (433)..(433): n is a, c, g, or t
  misc_feature (436)..(436): n is a, c, g, or t
  misc_feature (443)..(443): n is a, c, g, or t
  misc_feature (451)..(451): n is a, c, g, or t
  misc_feature (454)..(458): n is a, c, g, or t
  misc_feature (460)..(461): n is a, c, g, or t
  misc_feature (463)..(463): n is a, c, g, or t
  misc_feature (469)..(469): n is a, c, g, or t
  misc_feature (471)..(472): n is a, c, g, or t
  misc_feature (496)..(496): n is a, c, g, or t
  misc_feature (563)..(563): n is a, c, g, or t
  misc_feature (597)..(598): n is a, c, g, or t
  misc_feature (2352)..(2377): n is a, c, g, or t
  misc_feature (2457)..(2475): n is a, c, g, or t
  misc_feature (2540)..(2540): n is a, c, g, or t
  misc_feature (2582)..(2582): n is a, c, g, or t
  misc_feature (2589)..(2589): n is a, c, g, or t
  misc_feature (2643)..(2643): n is a, c, g, or t
  misc_feature (2659)..(2659): n is a, c, g, or t
  misc_feature (2675)..(2675): n is a, c, g, or t
  misc_feature (2806)..(2806): n is a, c, g, or t
  misc_feature (2820)..(2821): n is a, c, g, or t
  misc_feature (2829)..(2829): n is a, c, g, or t
  misc_feature (2856)..(2857): n is a, c, g, or t
  misc_feature (2864)..(2864): n is a, c, g, or t
  misc_feature (2871)..(2871): n is a, c, g, or t
  misc_feature (2879)..(2879): n is a, c, g, or t
  misc_feature (2885)..(2886): n is a, c, g, or t
  misc_feature (2894)..(2895): n is a, c, g, or t
  misc_feature (2900)..(2900): n is a, c, g, or t
  misc_feature (2905)..(2907): n is a, c, g, or t
  misc_feature (2914)..(2914): n is a, c, g, or t
attgtaaaancaanattaagngcatgtngttttcgataataaataaccccaaaatnccttttntttcaacaacaaagactttangatangatanancaaatccaaatcgagtagcttaatcttaactcccaatgtttttaaaggaaaaaataannnggaggggttgctgaggtcactgctaaacnnccgttttcacaactgggggnttgcaaannngtctggnaagatgagtatttttatataacantcaaatcngtggganaatntgcacagttacctttatttacngnntntgtnttgntntnnaggctaatnatnntgntttggttttnnnnnagngagtttngggggttttttnnngtgttcacatattgannnntntntttttnnncgtcnaaatgaggtnatnngcnaagnnacttttggttttatnggnataaaanataagagnggnnnnntnntnttggtngnngggagagctgagggagcgctcctngggggggcggtgggggtaagataagggatgggggctccgagggctgggaactgcaggaaggaaagangcggcggggccgcccgggtcaaggggccacgtgnnggagggcgggcaggcgggaccgggaggtcaataactgcagcgtccgagctgagcccaggggagcgggcgaggagaaagaagcctcagagcgcccgggaagcctcgcgcgcctgggaggcttccatctcccgggacccagctctcagcccggggcgaggaaggcgccagacaggctcacccggagggaagggaaggcaagtccgaggcggggctcgaaacagccgagacccggggctcaggtcagaaatgcggccttttagggaggcctttgccaagctgctgtccggttcccccgagagaggggcccgtttggtggccccgggagtgagcagggcctgagacggagccactgcaggtagcagcctgcaggagaggtggctggcgacagcgggccgggaggagggaaccccggctcagggggtaagcaatgaggataagtggtctctgctctcagtctctggcgagttctccctggggttagaaaatcagtccccagcgctcaccggggcgcccccacgccagccgtgatgcatggtgcgtggtgatcacggctgcggggtctgagtgggctgcagcacgcggcgccgtggcctgcaggtgtgagacggatcccgaggtctggtggtaccaggggtagttgcccagaaaagccgagaccgcgctgctcgggctggagcccgagctagccggcgccgctgccgccactgcccggaccaccgccgcccgccatccgctgcggcacaccaaagtcccaggaggccggcgctgagactggcggcgaagcacaaggtggagaagcgctggccccagggtgctgctccgaggggatctcaccacatagtccacatcttcgtgaacattggaccggacggttctggaaccagatctttgacctttgaggaaaaagacctgagcattagtggaggaacctagtcttggggcagtaggggttcgaagaggagaaaaaagaaggcagagaaaaaccgctggctagctggtgggcagcgagcgccctggggagataagaggatcacgggcggcggccttcgaggctctgccggttcctgctccctggggaggtaattgccaaaaggccaggactgctggtgtacgtgcactgtgatgatggtgacagcgggagggtgaggagggccagttatttcacccgcttaatcagtagcgagaggtacgggatttctgtccacccggtccctttccttccctcccacggcggccccttgggggtttccagctttgggcctagaagcttacttagggccgctcgaggcgcaggcctggaaatccttaaaagtacttaaaatgaactttaaaaagcattgtcctaaacccgcctgcttcccagccatctcaggcccgcgctctcctcgcccctgcagggcgcgagccccacctgagtctgggtgaggcccagagaggccgccagctcggctacgctccggcaaggccaagtactgagtcttttggaaacgccgctgaagagccgccagctggaaactggagtagatggtgcggggtttccggactttctttgcttcccgttcactatccgaatttcaggctcaaggtcctccttctcaggctcgttgttggctggggacgaactggttccatagggagcgtaggaggtgtaggcggcggtgtagcccaggtcatagctgctcttggcggagtaagggacgttgttgaggccgctggcttggtactggtagaaacccatgtgcgcgtagagcgannnnnnnnnnnnnnnnnnnnnnnnnnggtgctgctggttggtgtagtagctgctgtcggtggcggtggacaccggaagggtgggcgactcctggggcttgtggagnnnnnnnnnnnnnnnnnnnttgccacccgggccgcgccgccgccgctcgggggctgctggtgctggtggtacgtgctggaggcngcgatctgggtcgagtgcatatcagccactagactatcaaanactccantcatcctggcccgagacgggaaagagcagaggtggcgggcgtgcgggggaagcnaggcgcctcctctgtntctcccggtcccctcnagcagccaatgtaattacgggggtggtggtggggaaacaagaaaggaggcaaccgtctaggcgcctcctcctccgggggaggcgatcaccgtgcgctgctcgggacagctgcctctggtcgaatcctcttncggcctctgggccnnctcggctnccttgcccagcgcgagcgcgggctctnncgggggncgggcantggagggngcaggnncgggtggnncgggncgggnnnctgggangcgggagcaggtgag

SEQ ID NO: 356277 - DNA, 1345 bp, Homo Sapiens
ctggaaggagaggccaggcggaagaccctggctccgtcatggcctctgccctgaggccaccccgtgtccccaagcctaagggtgtcctgccttcacactactatgagagctttctagagaagaaggggccctgtgaccgggattacaagaagttctgggcaggcctgcagggtctcaccatttatttctacaatagcaatcgggacttccagcacgtggagaagctcaacttgggagcatttgagaaactcacagatgagattccctggggaagctcacgtgaccctggcacccacttcagcctgattctccggaatcaggagatcaagttcaaggtagagaccttggagtgtcgggaaatgtggaaaggcttcatcttaacggtggtggagctccgtgtcccgaccgacttgaccctgcttcctggggcacctatacatgatgtctgaagtcttggccaaagaggaggcgcgccgtgcactggagacaccctcgtgcttcctgaaggtgagccggctggaggcacaactgctcctggagcgctaccccgagtgcgggaacctgctgctgctggcccagcggggacggcgccgacggcgtgtcggtcaccacgcggcagatgcacaacgggacgcacgtggtccggcattacaaggtgaatgcgggagggccccaagtacgtgatcgatgtggaacagccgttctcttgcacctcccctggacgccgtggtcaactatttcgtgtcgcataccaaaaaggcgctggtgccattcctgttagacgaggactacgagaaggtgctaggctacgtggaagccgataaggagaatggcgagaatgtgtgggtggcgcccctccgctccgggcccaggtcctgcaccctgcacaggtggccccaagccgctgtcacctgcgtctagccaggacaagctgcccccactgcccccactaccgaaccaggaagagaactacgtgacccccattggagatggcccagctgttgactatgagaaccaagatgtggcttcctctagttggccagtcatcctgaagccaaagaagttgccaaagcctcctgccaagcttccaaagccacccgttggacccaagccagagcccaaagtctttaatggtggcttgggcaggaagctgccagtcagttcagcccagcctctcttccccacagccgggctggcagacatgacggcagagctacagaagaagctggagaagaggcgggcactggagcactgattcggacacaccagggaccagcgggctagtcccagggcatggcccagcggccagattctttttcccaggattaaaactctgaccccagga

SEQ ID NO: 356278 - DNA, 818 bp, Homo Sapiens
cagggcaccactctgactttcctcgacagccctgtgaggtgaacagggactggctccagcctctgttgcacagggtcaaagaggactacacgcgggtggtgtgccctgtgatcgatatcattaacctggacaccttcacctacatcgagtctgcctcggagctcagaggggggtttgactggagcctccacttccagtgggagcagctctccccagagcagaaggctcggcgcctggaccccacggagcccatcaggactcctatcatagctggagggctcttcgtgatcgacaaagcttggtttgattacctggggaaatatgatatggacatggacatctggggtggggagaactttgaaatctccttccgagtgtggatgtgcgggggcagcctagagatcgtccccctgcagccgagtggggcacgtcttccggaagaagcacccctacgttttccctgatggaaatgccaacacgtatataaagaacaccaagcggacacctgaagtgtggatggatgaatacaagcaatactattacgctgcccggccattcgccctggagaggcccttcgggaatgttgagagcagattggacctgaggaagaatctgcgctgccagagcttcaagtggtacctggagaatatctaccctgaactcagcatccccaaggagtcctccatccagaagggcaatatccgacagagacagaagtgcctggaatctcaaaggcagaacaacccaagaacccccaaacctaaagttgagccccctgtgccaaggttaaagggcggaagatgcaaaagtccaagtta

SEQ ID NO: 356279 - DNA, 1169 bp, Homo Sapiens
tggctaggtacgaggcctgggtggtgaattcggcacgaggggagctcagaggggggtttgactggagcctccacttccagtgggagcagctctccccagagcagaaggctcggcgcctggaccccacggagcccatcaggactcctatcatagctggagggctcttcgtgatcgacaaagcttggtttgattacctggggaaatatgatatggacatggacatctggggtggggagaactttgaaatctccttccgagtgtggatgtgcgggggcagcctagagatcgtcccctgcagccgagtggggcacgtgttccggaagaagcacccctacgttttccctgatggaaatgccaacacgtatataagaacaccaagcggacagctgaagtgtggatggatgaatacaagcaatactattacgctgcccggccattcgccctggagaggcccttcgggaagtatgggccttcacatacacccagcagatcctccaggaggagctgtgcctgtcagtcatcaccttgttccctggcgccccagtggttcttgtcctttgcaagaatggagatgaccgacagcaatggaccaaaactggttcccacatcgagcacatagcatcccacctctgcctcgatacagatatgttcggtgatggcaccgagaacggcaaggaaatcgtcgtcaacccatgtgagtcctcactcatgagccagcactgggacatggtgagctcttgaggacccctgccagaagcagcaagggccatggggtggtgcttccctggaccagaacagactggaaactgggcagcaagcagcctgcaaccacctcagacatcctggactgggaggtggaggcagagccccccaggacaggagcaactgtctcagggaggacagaggaaaacatcacaagccaatggggctcaaagacaaatcccacatgttctcaaggccgttaagttccagtcctggccagtcattccctgattggtatctggagacagaaacctaatgggaagtgtttattgttccttttcctacaaaggaagcagtctctggaggccagaaagaaaagccttctttttcactaggccaggactacattgagagatgaagaatggaggtgtttccaaaagaaataaagagaaacttgaaagtgtctc

SEQ ID NO: 356280 - DNA, 1188 bp, Homo Sapiens
  misc_feature (1129)..(1129): n is a, c, g, or t
  misc_feature (1139)..(1139): n is a, c, g, or t
  misc_feature (1152)..(1152): n is a, c, g, or t
  misc_feature (1161)..(1161): n is a, c, g, or t
  misc_feature (1166)..(1166): n is a, c, g, or t
cagcgacgcggtgaggagacggcccacggcgcccgcgggctggggcggtcgcttcttccttctccgtggcctacgagggtccccagcctgggtaaagatggccccatggcccccgaagggcctagtcccagctgtgctctggggcctcagcctcttcctcaacctcccaggacctatctggctccagccctctccacctccccagtcttctcccccgcctcagccccatccgtgtcatacctgccggggactggttgacagctttaacaagggcctggagagaaccatccgggacaactttggaggtggaaacactgcctgggaggaagagaatttgtccaaatacaaagacagtgagacccgcctggtagaggtgctggagggtgtgtgcagcaagtcagacttcgagtgccaccgcctgctggagctgagtgaggagctggtggagagctggtggtttcacaagcagcaggaggccccggacctcttccagtggctgtgctcagattccctgaagctctgctgccccgcaggcaccttcgggccctcctgccttccctgtcctgggggaacagagaggccctgcggtggctacgggcagtgtgaaggagaagggacacgagggggcagcgggcactgtgactgccaagccggctacgggggtgaggcctgtggccagtgtggccttggctactttgaggcagaacgcaacgccagccatctggtatgttcggcttgttttggcccctgtgcccgatgctcaggacctgaggaatcaaactgtttgcaatgcaagaagggctgggccctgcatcacctcaagtgtgtagacattgatgagtgtggcacagagggagccaactgtggagctgaccaattctgcgtgaacactgagggctcctatgagtgccgagactgtgccaaggcctgcctaggctgcatgggggcagggccaggtcgctgtaagaagtgtagccctggctatcagcaggtgggctccaagtgtctcggtgagtctcctgctgatgggacacaggcacctgggagtgcctcacccagcatgaatggtgaagagcctggaatatgggcagatggaaggcatgtgtgtgaaggagcagatcccagagtncagcaggttnttgttcagaggtngacagaagnacganttggtgggtgctgcagcagatg

SEQ ID NO: 356281 - DNA, 1325 bp, Homo Sapiens
  misc_feature (1066)..(1066): n is a, c, g, or t
  misc_feature (1072)..(1072): n is a, c, g, or t
cgggctggggcggtcgcttcttccttctccgtggcctacgagggtctggatccttctctgccggctcgtgggccgtgcctttgcccttctgcgaggccctgaatctgatcccttcccttcatatccggatccgggctcctccctccaagcccggggttccggacacctcccccaagacaacccctctggcctcctctccttcagtacttggaatctgatctcttctccctaattctgcggatccggcccctaatattctttatcagaccctcagacaagaggctgacttctgcccccttgtcaaggagcgaggccactttcctctccaccccatgctagcgaggataacttatttctcttctggaattgcatcttatgcgcctttccccacccatccccacagcccctgcaatacccagtttggcctcttttgcttgtaataacgcagatcccagcgccacggcaccttagaacagacctttttctttctcgcgtggggcctgactccttcagtgaagcctctccacgccctctatctgcaggtccccagcctgggtaaagatggccccatggcccccgaagggcctagtcccagctgtgctctggggcctcagcctcttcctcaacctcccaggacctatctggctccagccctctccacctccccagtcttctcccccgcctcagccccatccgtgtcatacctgccggggactggttgacagctttaacaagggcctggagagaaccatccgggacaactttggaggtggaaacactgcctgggaggaagagaatttgtccaaatacaaagacagtgagacccgcctggtagaggtgctggagggtgtgtgcagcaagtcagacttcgagtgccaccgcctgctggagctgagtgaggagctggtggagacctggtggtttcacaagcagcaggaggccccggacctcttccagtggctgtgctcagattcccctgaagctctgctgccccgcaggcaccttcggggccctccctgccttccctgtcctgggggaaacagagaggcccctgccggtgcctacnggccantggtgaggagaaaaggaacccaagggggcaaacggggccctggtgaatggccaagccgggctaacggggggggaaaggccttgggggcccaggtgggggccccttggcttcactttttagagggcaaaaagcccaaaggccccagccatattttggggaattgttccgcggctttgttttttgggccccccgtgggcccccaaggggcctccgggaccctggggggaaaaacaaacttgtttttccaacagac

SEQ ID NO: 356282 - DNA, 1333 bp, Homo Sapiens
  misc_feature (1056)..(1059): n is a, c, g, or t
  misc_feature (1061)..(1061): n is a, c, g, or t
  misc_feature (1063)..(1064): n is a, c, g, or t
  misc_feature (1068)..(1068): n is a, c, g, or t
  misc_feature (1080)..(1080): n is a, c, g, or t
  misc_feature (1089)..(1089): n is a, c, g, or t
  misc_feature (1186)..(1203): n is a, c, g, or t
gaggaatcacactgtttgcaagtgcaagaagggctggtcctgcatcacctcaaggctgtgtagacattgatgagtgtgtgctacagagggatgccaactgtggtagctgaccaattctgcgtgaacactgagggctcctatgagtgccgagactgtgccaaggcctgcctaggctgcatgggggcagggccagggtcgctgtaagaagtgtagccctggctatcagcaggtgggctccaagtgtctcgatgtggatgagtgtgagacagaggtgtgtccgggagagaacaagcagtgtgaaaacaccgagggcggttatcgctgcatctgtgccgagggctacaagcagatggaaggcatctgtgtgaaggagcagatcccagagtcagcaggcttcttctcagagatgacagaagacgagttggtggtgctgcagcagatgttctttggcatcatcatctgtgcactggccacgctggctgctaagggcgacttggtgttcaccgccatcttcattggggctgtggcggccatgactggctactggttgtcagagcgcagtgaccgtgtgctggagggcttcatcaagggcagataatcgcggccaccacctgtaggacctcctcccacccacgctgcccccagagcttgggctgccctcctgctggacactcaggacagcttggtttatttttgagagtggggtaagcacccctacctgccttacagagcagcccaggtacccaggcccgggcagacaaggcccctggggtaaaaagtagccctgaaggtggataccatgagctcttcacctggcggggactggcaggcttcacaatgtgtgaatttcaaaagtttttccttaatggtggctgctagagctttggcccctgcttaggattaggtggtcctcacaggggtggggccatcacagctccctcctgccagctgcatgctgccagttcctgttctgtgttcaccacatccccacaccccattgccacttatttattcatctcaggaaataaagaaaggtcttggaaagttataaaaatnnnnanannctgnaactcctcaaancccccccangcaatgtggatcttgtccaattcactgaaaaaaggtacaaatctattgtccaggtccgggacggctttctactccttcaaaattcctttggcttggnnnnnnnnnnnnnnnnnnaaaaaatttttaaaacattctttgtggcgggggggcccaaaaaggagggagaaagggggaaatattttcttctccaggaaaaatcccccccacaccctggtgcgtggaccctccccccaataaaaaaacc

SEQ ID NO: 356283 - DNA, 1121 bp, Homo Sapiens
ctaccgtccagtgccgtcgccttcgccctctctcgagactatatattaacgatcgacccgccaccgcgtcgcccgcgcgccagagccacggcgggggccgtcctttcatcgccccgcgcgctgagtcgggaaccacagatgcgcaacctccgcaacacagcggccgcgtacctccccaccgagctacgcgggcggggaggcccttcgccagagctctttggcggtacccaacgcagccctccacgcgtcccaacccaacctcgctcagccccccgcaaacatccgccggaacggggccgcgcgtacatcgaagagccagcctcccgagggcggttccgaacccgcgaccttttcttgcctttcaagccagtgcggttcctccggggtcgcggggcctcagggcccagggcccaacccaagctaaccttcccgacagcctggcctcgcgttctgccgtcaaagtgcccaaggccacatggggcccaggccttcacccccgtagccggcttggcagtcacagtgcccgctgccccctcgtgtcccttctccttcacacgtgcccgtagccaccgcagggcctctctgttcccccaggacagggaaggcaggagggcccgaaggtgcctgcggggcagcagagcttcagggaatctgagcacagccactggaagaggtccggggcctcctgctgcttgtgaaaccaccagctctccaccagctcctcactcagctccagcaggcggtggcactcgaagtctgacttgctgcacacaccctccagcacctctaccaggcgggtctcactgtctttgtatttggacaaattctcttcctcccaggcagtgtttccacctccaaagttgtcccggatggttctctccaggcccttgttaaagctgtcaaccagtccccggcaggtatgacacggatggggctgaggcgggggagaagactggggaggtggagagggctggagccagataggtcctgggaggttgaggaagaggctgaggccccagagcacagctgggactaggcccttcgggggccatggggccatctttacccaggctggggaccgcgtcactgccacagcctgcgtaaaacatccggagaattcc

SEQ ID NO: 356284 - DNA, 1166 bp, Homo Sapiens
  misc_feature (11)..(11): n is a, c, g, or t
  misc_feature (15)..(15): n is a, c, g, or t
  misc_feature (26)..(27): n is a, c, g, or t
  misc_feature (34)..(34): n is a, c, g, or t
  misc_feature (59)..(59): n is a, c, g, or t
  misc_feature (70)..(70): n is a, c, g, or t
  misc_feature (72)..(73): n is a, c, g, or t
  misc_feature (76)..(76): n is a, c, g, or t
  misc_feature (93)..(116): n is a, c, g, or t
  misc_feature (165)..(165): n is a, c, g, or t
  misc_feature (206)..(206): n is a, c, g, or t
  misc_feature (306)..(306): n is a, c, g, or t
gagagagacgncacncgagaaatganncggaacntgtaactcatcagatttcgttccanttctctggacncnncgnaaaaccccggggcggcnnnnnnnnnnnnnnnnnnnnnnnncgtccggaagccgccgagcccgggcagatctgctgcgataagccggtgntgagagacatgaacccctggagcacagccatcgtggccttntgagcccttgggcccctgcggggaggaggtggagcagcgggcgtccccgaagtgagggccaggcccttcccggctgcgaggacgcccagagaccgcgggnctgagcgcgttgggcagactggttgcctctgggcatcgcaaactgcccccgggcgcatctggcttatctggagacctgggagcttaaggctcattggaagagaacgatcgttaacttttgagtttgtgtatgtctgtgtatgtaagtttgtcttgtggcattaagactattttgctcttctggaatgcaccactccttccccagggtttaagagattggggacagacagggactttcctctgccggctgcgtggagaaggaagcggctaaaaggtttgggccggggagttccccattcgttctccggggagggagagactttacacctacccctcaccggaaagctagacccgcttcagggccaggagtggcgtttccgcacaggatttcctaagacgagagggatttagccaagagcacagacttggattccttctgtccctccccacctttctctcccaatgaaaaaacgtttatatcctgtgattactctagaaaaggggcgtattaacggtcctttgcttccccgcaggggagaaaaagcttgacgaacttcacagaagagttcaagcttggaaataatggagtttatagagaaaagatatatttttaaaagctctaggtcagaagtactacacagtgcttttaaaaagtgtttaatgagagtttacagacagaagcccgaagtggaaagaccttatggttttgtagatatggtgactccagtctttgttgtataaaggttgggggagctgataaggtttttgtacagtattttctccttcgttgtattgatttttgtataaaaatgtaacttctacgtgtctaacacgtattaaatattttgaagcaacgtaaaa

SEQ ID NO: 356285 - DNA, 1058 bp, Homo Sapiens
  misc_feature (922)..(922): n is a, c, g, or t
  misc_feature (939)..(939): n is a, c, g, or t
  misc_feature (957)..(957): n is a, c, g, or t
  misc_feature (979)..(979): n is a, c, g, or t
  misc_feature (985)..(985): n is a, c, g, or t
  misc_feature (994)..(994): n is a, c, g, or t
  misc_feature (1003)..(1003): n is a, c, g, or t
  misc_feature (1016)..(1016): n is a, c, g, or t
  misc_feature (1027)..(1027): n is a, c, g, or t
  misc_feature (1034)..(1034): n is a, c, g, or t
ggtccggaattccctggatccgaaacggggaagttgtcttgtgtggagaggttagtagagcagcgcgcgcgtcaccagagtcgtttctcttcggagtcttaggtgatcgagggtgtgcccagggggcggacttgtttgcgcctcccgttccctcccaatttccaaacgtgtcaccccggcgccgacggccctgtgcaggggaagcagatggagttcaagctggaggctcatcgcatcgtcagcatctctctgggcaagatctacaactcgcgggtccagcgcggcggcatcaagctgcataagaacctcctggtctcgctggtgctgcgcaggcccgccaagtctacctgagcgacccgtgccccggcctctacctggccggtcccgctgggaccccggcgccgccaccgcagcagcagcccggggagccggcggccgggccacccgccggctggggagagccgcccccgcccgccgctcatgcctcttggccggagaccgagccgcagccggagcgctcctccgtctcagacgcgccgcgggtaggggacgaggtgccggtggccacggtgactggagtcggggacgtttttcagggcggagaggcggacgcgacggaagctgcctggagccgcgtggaggggccgcgccaggcggcggccagagaagccgagggtaccgccggaggtgggggcgtcttccccgaggtatctcgtgccgcgcgccgcccctgcgctgccccctaggcggggaggacccgccgggtacaccggccgcgacccccggcgctgcctgctgctgcgcgccgcgaccagcgaaggacgagccccccgcgccgcccgcggtgtgcccaaggaagcgctgcgcggcgggggtgggcggcggccagcggctgcccggcgcccggctcgacccgctcaanaagcccgccggaactanacagccgcgagtggaganagacgagaccggagagatgaanccggangtggtactnatagatctngttcagttttggnctctaagaaancccgggnggaaaaagaaagaggagagaaggg

SEQ ID NO: 356286 - DNA, 1047 bp, Homo Sapiens
  misc_feature (944)..(946): n is a, c, g, or t
  misc_feature (965)..(965): n is a, c, g, or t
  misc_feature (972)..(972): n is a, c, g, or t
  misc_feature (974)..(974): n is a, c, g, or t
  misc_feature (999)..(999): n is a, c, g, or t
  misc_feature (1022)..(1023): n is a, c, g, or t
ccagcgctggtacgcccgggtttcgggatatcgtcgacccacgcgtcggcgtggtagggaagggcgaccgcgaaactgggactttctcggagcgccggggccctaccagcgttcacagtccgccgctcccacccttctcacgtctgacggactctgctgacagcccttgccctgttggatgaataggcacctctggaagagccaactgtgtgagatggtgcagcccagtggtggcccggcagcagatcaggacgtactgggcgaagagtctcctctggggaagccagccatgctgcacctgccttcagaacagggcgctcctgagaccctccagcgctgcctggaggagaatcaagagctccgagatgccatccggcagagcaaccagattctgcgggagcgctgcgaggagcttctgcatttccaagccagccagagggaggagaaggagttcctcatgtgcaagttccaggaggccaggaaactggtggagagactcggcctggagaagctcgatctgaagaggcagaaggagcaggctctgcgggaggtggagcacctgaagagatgccagcagcagatggctgaggacaaggcctctgtgaaagcccaggtgacgtccttgctcggggagctgcaggagagccagagtcgcttggaggctgccactaaggaatgccaggctctggagggtcgggcccgggcggccagcgagcaggcgcggcagctggagagtgagcgcgaggcgctgcagcagcagcacagcgtgcaggtggaccagctgcgcatgcggggccagagcgtggaggccgcgctccgcatggagccccagggccgcctcggaggagaagaggaagctggcccagttgcaggtggcctatcaccagctcttccaagaatacgacaaccacatcaagagcagcgtggtgggcagtgagcggaannngggaatgcagccggaaganctcaaanancagccccagcaggccgaggaggccntggtggccaaaaaggaggggatnnaaaagctgaaggaggaggcgagca

SEQ ID NO: 356287 - DNA, 479 bp, Homo Sapiens
actggtaaagatagggtaagagtaatccgatcacattcctcctctactgagaaccctaccagggatccccgtggccttctgcgtaaaagccaatctccctacaacggcctacaaggccctgtaccatcgggttccccatcccttcctctccaactgtgctcccctccctcactctgctccagctatagtgacctccgtgctattcctctaatgtgccaggagagcccattcattctcagatcacagaaacagtatgacgataggcagatgttgtctggcaaaacgagcaaacaggcatatgaaatcagatacctagctgccaaactatatgtgaggcatttccgaagaatttaacgacctcgatagagcgcagtcaagttgggtgagcagaatatgtctctgaactagaggagtcctcacacaaggagtagggtcagaccccgcagtggaggaggtgggaggagaggaaggggatcctc

SEQ ID NO: 356288 - DNA, 1543 bp, Homo Sapiens
  misc_feature (1276)..(1285): n is a, c, g, or t
  misc_feature (1499)..(1499): n is a, c, g, or t
  misc_feature (1506)..(1506): n is a, c, g, or t
  misc_feature (1510)..(1510): n is a, c, g, or t
  misc_feature (1518)..(1518): n is a, c, g, or t
  misc_feature (1520)..(1522): n is a, c, g, or t
  misc_feature (1525)..(1525): n is a, c, g, or t
  misc_feature (1530)..(1530): n is a, c, g, or t
  misc_feature (1537)..(1538): n is a, c, g, or t
cggaggaatgcccccctgacgggaaaagcttcagggagcagcagtgtgagaagtataatgcctacaattacactgacatggacgggaatctcctgcagtgggtccccaagtatgctggggtgtccccccgggaccgctgcaagttgttctgccgagcccgggggaggagcgagttcaaagtgttcgaggccaaggtgattgatggcaccctgtgtgggccagaaacactgggccatctgtgtccgtggccagtgtgtcaagcccggctgtgaccatgtgggggactcgcctcggaagctggacaaatgcggggtgtgtgggggcaaaggcaactcctgcaggaaggtctccgggtccctcacccccaccaattatggctacaatgacattgtcaccatcccagctggtgccactaatattgacgtgaagcagcggagccacccgggtgtgcagaacgatgggaactacctggcgctgaagacggctgatgggcagtacctgctcaacggcaacctggccatctctgccatagagcaggacatcttggtgaaggggaccatcctgaagtacagcggctccatcgccaccctggagcgcctgcagagcttccggcccttgccagagcctctgacagtgcagctcctgacagtccctggcgaggtcttccccccaaaagtcaaatacaccttctttgttcctaatgacgtggactttagcatgcagagcagcaaagagagagcaaccaccaacatcatccagccgctgctccacgcacagtgggtgctgggggactggtctgagtgctctagcacctgcggggccggctggcagaggcgaactgtagagtgcagggacccctccggccaggcctctgccacctgcaacaaggctctgaaacccgaggatgccaagccctgcgaaagccagctgtgccccctgtgattcaggggggcaggggccagtcttgtgctcctggacatgcggtactgaggtgcagacaagggtctccactgtggtgactgggtcccttggccatatcaaggcagcacggcccacccaggcctcccattgccgcaacccctccagtactgcacaaattcctaagggggaagaggagagggtatggggcggcagaccctatcatcaactgtccagtggactggaccttgctcgggttcaagtagagggcataggttaaaaggtaaaagtgcacttattgactcagacaggacactcagcgtcagtctgtttgcaaaggactagcaaacttaaatgnnnnnnnnnnttctatctggtttccccgataaataatctacctcacaggggaaaaaattagtacaagagaggcgtggggcagggagtcaatggtgaatgtcaaagcaggctccaaagctggaccccaagctgtcttcaagaatgaccacgactgtcttcagtgttaaaatccatcacctaaagggccgcagcgtcgcagggtttggagacccacatgttctcangctgccncccncagggccnannnagngcaancatttanncaaat

SEQ ID NO: 356289 - DNA, 1801 bp, Homo Sapiens
gggatgtgctttctgtctagtgagggggtctgtggatttctagtttatgataaataggactttaaaaaccaggacgggagggcgagtgttcaggttctagagctatgcagctggagcactgcctttctccttctatcatgctctccaagaaatttctcaatgtgagcagcagctacccacattcaggcggatccgagcttgtcttgcacgatcatcccattatctcgaccactgacaacctggagagaagttcacctttgaaaaaaattaccaggggatgacgaatcagtcagatacagacaattttcctgactccaaggactcaccaggggacgtccagagaagtaaactctctcctgtcttggacggggtctctgagcttcgtcacagtttcgatggctctgctgcagatcgctacctcctctctcagtccagccagccacagtctgcggccactgctcccagtgccatgttcccgtaccccggccagcacggaccggcgcaccccgccttctccatcggcagccctagccgctacatggcccaccacccggtcatcaccaacggagcctacaacagcctcctgtccaactcctcgccgcagggataccccacggccggctacccctacccacagcagtacggccactcctaccaaggagctccgttctaccagttctcctccacccagccggggctggtgcccggcaaagcacaggtgtacctgtgcaacaggcccctttggctgaaatttcaccggcaccaaacggagatgatcatcaccaaacagggaaggcgcatgtttccttttttaagttttaacatttctggtctcgatcccacggctcattacaatatttttgtggatgtgattttggcggatcccaatcactggaggtttcaaggaggcaaatgggttccttgcggcaaagcggacaccaatgtgcaaggaaatcgggtctatatgcatccggattcccccaacactggggctcactggatgcgccaagaaatctcttttggaaaattaaaacttacgaacaacaaaggagcttcaaataacaatgggcagatggtggttttacagtccttgcacaagtaccagccccgcctgcatgtggtggaagtgaacgaggacggcacggaggaccactagccagcccggccgcgtgcagacgttcactttccctgagactcagttcatcgccgtcaccgcctaccagaacacggatattacacaactgaaaatagatcacaacccttttgcaaaaggatttcgggataattatgacacgatctacaccggctgtgacatggaccgcctgaccacctcgcccaacgactcgccgcgctcgcagatcgtgcccggggcccgctacgccatggccggctctatcctgcagggaccagttcgtgagcaactacgccaaggcccgcttccacccgggccgggtacggaccgcagcgtgccgcacaccaacgggctgctgtcgccgcagcaggccgaggacccgggcgcgccctcgccgcaacgctggtttgtgacgccggccaacaaccggctggacttcgcggcctcggcctatgacacggccacggacttcgcgggcaacgcggccacgctgctctcttacgcggcggcgggcgtgaaggcgctgccgctgcaggctgcaggctgcactggccgcccgctcggctactacgccgacccgtcgggctggggcgcccgcagtcccccgcagtactgcggcaccaagtcgggctcggtgctgccctgctggcccaacagcgccgcggccgc

SEQ ID NO: 356290 - DNA, 1404 bp, Homo Sapiens
  misc_feature (157)..(166): n is a, c, g, or t
caggtgattatcctaattaatgtctatctaattaaattactgtcagcagctaaccaatggcaggagccgtttcatcggctgcacaagcagcaagatcaaaagtgagccttttctgattgctgcatagtgtcaattggccaatctcttctcccagggnnnnnnnnnngtaaatcaaacctttgagaagcatttgctggttgaagtgctttctgtctagtgagggggtctgtggatttctagtttatgataaataggactttaaaaaccagggacgggagggcgagtgttcaggttctagagctatgcagctggagcactgcctttctccttctatcatgctctccaagaaatttctcaatgtgagcagcagctacccacattcaggcggatccgagcttgtcttgcacgatcatcccattatctcgaccactgacaacctggagagaagttcacctttgaaaaaaattaccagggggatgacgaatcagtcagatacagacaattttcctgactccaaggactcaccaggggacgtccagagaagtaaactctctcctgtcttggacggggtctctgagcttcgtcacagtttcgatggctctgctgcagatcgctacctcctctctcagtccagccagccacagtctgcggccactgctcccagtgccatgttcccgtaccccggccagcacggaccggcgcaccccgccttctccatcggcagccctagccgctacatggcccaccacccggtcatcaccaacggagcctacaacagcctcctgtccaactcctcgccgcagggataccccacggccggctacccctacccacagcagtacggccactcctaccaaggagctccgttctaccagttctcctccacccagccggggctggtgcccggcaaagcacaggtgtacctgtgcaacaggcccctttggctgaaatttcaccggcaccaaacggagatgatcatcaccaaacagggaaggcgcatgtttccttttttaagttttaacatttcctggtctcgatcccaacggctcattacaatattttttgggggatgggaattttggcgaatccccaatcactgggagggtttcaaaggaggcaaatgggggtcccttggcggcaaaagcggacacaccatggtgcaagggaaaatcgggtcctatattgccatcccgggaattcccccccaccacctggggctttccccgggattgggcccaaggcaaaatccccccttttggggaaaagttacaaaactttacccggagaggccgcgtaaggcggcgttttcaccccctaacacattttgcgcgccaccacacgggtgtcgcgcctcttatatataaccgccatcgctcgccccatatatggccccccccaagacca

SEQ ID NO: 356291 - DNA, 1771 bp, Homo Sapiens
  misc_feature (798)..(806): n is a, c, g, or t
  misc_feature (1367)..(1367): n is a, c, g, or t
  misc_feature (1488)..(1488): n is a, c, g, or t
caaatatttgttcccacttgcaagggaagaaacggccctatattgagtttgataaaaactccccaccaagctggtttaagaatccggtaatccttgtgttggccctccattccaagtgtggtggaccatattcaccctgcatcttccaactggtaataattttgaaagtgctttatttttttgttccatgactcattgacagtacgaaaagttttgggggtactcttgaccatccccgtaccaagaaaactccatccacaagtccttgctgaataatcaatcgctgagcctcatctctagaaattttgtgggtgaaaccaatggctgggaccggtggatagccatgtttgtggcagagctctgtaaagaggcagtggggctaccgtgagtgcccaggcgtaaacatccttttttcctccaagcgagtccttcttcaaccgcaactgaaagggcttcagtgggattttctataactctgcttttctggcctgagaagtccattgctaccagggaattctctgatatacttctcataggtgatatgctctgtgaactgcagccacttctaccttgatatggatgcatataattctggtacagctgcatgccatacttaagcaatctaatcgcggtcacccagcacgtcctactctgctcttcttctgcacagagcattttcaggtctcggggccctcccgctttgttaggctagaaggccacagcacattgtttatcgttaatgcatatcttgaaggtaacaccttaaagcagaatccatagttagtcggtgctccatgnnnnnnnnngcctgccagtgacacataaatatcactattgccaaattcgctgaaaaactgcaaatgccgcggttcctttgatgttcctttagtagaaaaatataaaccagatcttcttagaaaaaagtaaatttttttccaagacttctttccctgttctttcgcatgtaagaaaccatgaatttcaggatatgtgcttgaactcagaaacatctgcaaaatctgtgtgggggatatttcaccattggtttcagttgcaaaagataccatatgctctggaaaaaaatacattgggtttttaaagaactcatatttggcataattttttctaaagtatagtttgttttcttcttctatcccccagttggatagcacttcaatcaccagttcgtggtcttctattgttctttctacacctatgtgaggcaggtgctcaaaaagggtccagctgtggtcatcaatgtaatgattcttcaggatcaacagctgacaaacatctcgagccgttatgtcactgggtacatctaaagccctgctggtttcatcttcactgtatactttaatcacctnttttttccttgaatttgctttgggaaataggtctgctgacaacacagatgtaattggagaacagcatagctcaggaaaagggtttggaatagatggcatttccggaacatcaagatctttnttttttctcctgtctgcagcacagccgcgggtcccgtccggaaggggcaggagctcgcgcgtgcagccagggggccggcgccaggtcgtgggcgtcgcccctcccctgggcagcgccacacacctgggcggccagcggcgaatccccgggcagccgccctgcctcgcggcgctctgcccatcttgcagggaagtggtcattgtcgccggccggggggctcgggcgtcatgggagactcggcgcgtggggagaaggggtttgcgcggcgggaggcgaggtgccg

SEQ ID NO: 356292 - DNA, 1899 bp, Homo Sapiens
  misc_feature (1850)..(1850): n is a, c, g, or t
  misc_feature (1868)..(1868): n is a, c, g, or t
  misc_feature (1883)..(1883): n is a, c, g, or t
ccagtgggaaggcaggccgcgcgcgcgggagcgcggaaggatcggcggctcgcggtcactggtccctggctcggttccccgcaccccggggctcacacttacccgcgcggaggagcagcggccgggtgtccacccccatcctgcgcccagtctcctcgattcccctcgctctgagccgggagagccgaacagctgaagagagttcactgactccccagccccaggtgggccttgtgcacatcatgaccagttttgaagatgctgacacagaagagacagtaacttgtctccagatgacggtttaccatcctggccagttgcagtgtggaatatttcagtcaataagttttaacagagagaaactcccttccagcgaagtggtgaaatttggccgaaattccaacatctgtcattatacttttcaggacaaacaggtttcccgagttcagttttctctgcagctgtttaaaaaattcaacagctcagttctctcctttgaaataaaaaatatgagtaaaaagaccaatctgatcgtggacagcagagagctgggctacctaaataaaatggacctgccatacaggtgcatggtcagattcggagagtatcagtttctgatggagaaggaagatggcgagtcattggaattttttgagactcaatttattttatctccaagatcactcttgcaagaaaacaactggccaccacacaggcccataccggagtatggcacttactcgctctgctcctcccaaagcagttctccgacagaaatggatgaaaatgagtcatgaacacagaaagtctaagaggagaaatatgatggatgaagagctctgtagatgctgtatagacactaaataagagttgattagggtagtatattatagtcatctgttatgctgtgaaatttggaattcaaaattttgaagtctgtaaattgtgttagtcattaacttagtcacctgttgtattctggatctacacaaaattattttaagtgctcttattaatctgtgaggattaatatacaaaaagtatcctttgagatgaagtcgtgttctcaaaataaggttatattattttctttttctgcttgattttcatcttgtgttttgctttgtttttgtaaggaaccatctcttggtttggtcacatcagttcacaacagccatttgttttcaaggtcaaggctccaggcaggttgttactggtgtttgcagcctgtcagtacttgcagtactggaataggttctaggctagtgtctgcgcgtcactgtggttttagcatgggaggacttatttgagaaatactaccttacttttctatgatttctttttacagagttatagtgtgtttactcctaagatgacagttctctttgtctatattcagcatctaagacaaatatttaaacattttaaagaaccactgtgttaagtttaggattatttacttaccaaattagaagtttgacttttatgtgttatacacaatcttaaaatttcacgaattcacctttttaatagtatccatgtacataataaaatcaaagtttaattagccattttctttgaatttttttctaaataagggaaataactgttcttgggccactttacagagataaatgtatgtgaatgtttatgataaacgcttaaatatttctaaaatgttaacttcaaaaaagtctttttcagttcttaaataaaaatttttttatttaagatacttattcgacttatcttaactaaggtagctatgaatgttaagtagatgaggtaaccattcagttaagttaaattgtagcattgccaggtagtgaggctcactgtacaattttccngggtaaatgaaatttccngtagtaagaggtccntatttttgtaacagcc

SEQ ID NO: 356293 - DNA, 1782 bp, Homo Sapiens
  misc_feature (1533)..(1533): n is a, c, g, or t
  misc_feature (1568)..(1568): n is a, c, g, or t
  misc_feature (1762)..(1762): n is a, c, g, or t
gcagctggtaccggtccggaattcccgggatatgaggcctgaacagaaggaggctctggcaaagcgactgctggcccctgaactgtttggggaagtgcctgcctggccccaggagctgctgtgggcagtgctgcccctgctcccccacctccctctggagaactttttgcagctcagccctcaccagatccaggccctggaggatagctggccagcagcaggtctggggccagggcatgcccgccatgtgctgcgcacctggtaaaccagagtgtccaggatggtgaggagcaggtacgcaggtggcatatgaacttctgggtgtgttgcgctcatctggaggagcggtgctgagcccccgggagctgcgggtctgggcccctctcttctctcagctgggcctccgcttccttcaggagctgtcagagccccagcttagagccatgcttcctgtcctgcagggaactagtgttacacctgctcaggctgtcctgctgcttggacggctccttcctaggcacgatgcacagtttctctggaagaagatgcaagtacccaccaaccttaccctcaggaatctgcaggctctgggcaccctggcaggaggcatgtcctgtgagtttctgcagcagatcaactccatggtagacttccttgaagtggtgcacatgatctatcagctgcccactagagttcgagggagcctgagggcctgtatctgggcagagctacagcggaggatggcaatgccagaaccagaatggacaactgtagggccagaactgaacgggctggatagcaagctactcctggacttaccgatccagttgatggacagactatccaatgaatccattatgttggttggtggagctggtgcaaagagctccagagcagctgctggcactgacccccctccaccaggcagccctggcagagagggcactacaaaacctggctccaaaggagactccagtctcaggggaagtgctggagaccttaggccctttggttggattcctggggacagagagcacacgacagatccccctacagatcctgctgtcccatctcagtcagctgcaaggcttctgcctaggagagacatttgccacagagctgggatggctgctattgcaggagtctgttcttgggaaaccagagttgtggagccaggatgaagtagagcaagctggacgcctagtattcactctgtctactgaggcaatttccttgatccccagggaggccttgggtccagagaccctggagcggcttctagaaaagcagcagagctgggagcagagcagagttggacagctgtgtagggagccacagcttgctgccaagaaagcagccctggtagcaggggtggtgcgaccagctgctgaggatcttccagaacctgtgccaaattgtgcagatgtacgagggacattcccagcagcctggtctgcaacccagattgcagagatggagctctcagactttgaggactgcctgacattatttgcaggagacccaggacttggngcctgaggaactgcgggcagccatgggcaaagcanaacagtttgtggcgtccccccccggggatttcgtcctgagcagatcctgcagcttggtaggctcttaataggtctaggagatcgggaactacaggaactgatcctagtggacttgggagtgcgtgacccccttgggcaaatagatgcctggaagcaccctcagctccgcattgggggtctccagttttctacgnacggaggttcgcattgtaac

SEQ ID NO: 356294 - DNA, 1231 bp, Homo Sapiens
  misc_feature (35)..(35): n is a, c, g, or t
  misc_feature (48)..(48): n is a, c, g, or t
  misc_feature (62)..(98): n is a, c, g, or t
gacttccagtgaatgactacgactcactatagggncgaccggtgtaancgcggtggcggcgnnnnnnnnnnnnnnnnnnnnnnnnnnnnnnnnnnnnnatcaggccaaatcggccgagctcgaattcgtcgagagcgggtccggtttccggcgggagcgtgggccgccagactcgggagaggctccgtcttgtgcaagggtcctgtgggctggctgcactggcctctgcggtggtgcctgccagaatgccccacttggaaaacgtggtgctttgtcgcgagtctcaagtgtccatcttgcagtccttgtttggagagagacatcatttcagctttccatccatttttatttatggacatactgctagtggaaagacctatgtaacacaaacgttgttgaaaactttagagctcccacatgtgtttgtgaattgtgttgaatgctttacattgaggctgcttttggaacaaattttaaacaaattgaatcatcttagttcttcagaggatggatgttctactgaaataacctgtgaaacatttaatgactttgttcgcttgtttaaacaagtaaccacagctgaaaatcttaaagatcagactgtatatattgttctagataaagcagagtatctaagagatatggaagcaaatcttttgcctggatttcttagattacaagaattggctgacagaaatgtgactgttctctttctcagtgaaattgtttgggaaaagtttcgtccaaatactggatgctttgagccgtttgtcttatatttccctgattacagcataggcaaccttcaaaagatcctgtcccatgatcatcctccagagtattcagctgatttctatgctgcctacattaacattcttcttggagttttctacactgtttgtcgagatttgaaagagctcagacatctggcagtacttaattttcctaaatattgtggaccccggggttaaagggagaagcaggggaacgtggatactcgcaaaactgggggagaaatattgaaccctcatttgaaaaaaaggttatggcaaattgctttttctcaggggaaatatccccgccccccaaaggtggaaacccctacccacaagaattaccccgtattccggggccgacgcgaaaaagggccttcctaagtgggccgtattttgtgtggggggaaacctccctattatctacacccctaaaccatgctttgtccaaaaagggg

SEQ ID NO: 356295 - DNA, 1764 bp, Homo Sapiens
  misc_feature (131)..(131): n is a, c, g, or t
  misc_feature (220)..(220): n is a, c, g, or t
gtcctcatggggcccttcccctttaccctccacaagcccattgtctgtgtgttcttcccccaccttagtgtgcaaaagttactcctaaagaagaggaaggcttctcctgggctgtacacttgagctaaggnctatatggtggccccaggactcagggctcagattgggaagggtgcagtggggaatgcccatgggtaatgggggatcggggggtgttganaatgcacacactctcatagagagaaggtgaggaaaggaccacagcccatgagggatccctctcccgccgccaggcagaagaagcaaggatgtgaaagctaatggtgacagctaactggctcaccccatgttagctattcttgaaacagcgactttataattaaaatcccttcaggagggagtcatatggggaaggaggagggggaaacagagaaggggctggagggaagttgctgggaccttcttcagtgccgtgctgcctctttggccatagaaaatcacagcttccaaatgatcccctcacctacttacgggtgcctccctccctacctgcctacctgccttctgtgtgacccacagttttctcctaactccatccatgtgctgagatccccagcgtgggaggagccagggcagaacttggagcaggtaaatccctcccaatccatggggaactggttaccccggccacagacaaccttctcctgttgccctaatgctatgaatcagtattatttttgttctgcttgtgctgagaggtgaaaacagttggaagaactgcccccaaggcccccagctctgacatctgtagtctgaggaaattgtgctacacctttcaatgatgtctattggaagtcactgggtagcgcttgggtttaattcttccttctctatggatccccctaaagatttgtccaggacttgcaagaaaacagaaacactcaaaagaccagggacagggaacctgaattatgtgaacgctaatttatgatgggaagacagttgtttaaggaacttcccccaaggaaggccatggctctgtcagggaaatgttagaagctaatccaggctcctggttgaggtgaggccaaagagataacgcttgtgaaataattttctatcagcatccccattttctagatggagttctgagaggtaagtaacctgtgcaaggagagacccagccaagaatccatccctgccccccgtctcctcggattgtcatccctttcctaccccagagcttccttccctgggaagattcccacttgctcaggaattctatgcagacaacatctcctcttgactacaatcaaattacagagtcaagtcagaaatgcaaaaaggaaccattttaaaggattcttggttttgttttttaaccttcgtaagaaagtctgacctttccttttgatggagtcacaaaatcagatgatcagttttccccacccacaggagatctctgagtgttggggctgacaccatggaaacaaaggagcacctggctgtggactgaggaaggtgtgtcccaccctgtcattgagatgagacattgcacctgtacccctcccaccaagactacagccaccggctcctctggagttcctgccatacccactaccatcagcagcagaggtcctttgtcctgggagaaggacggttctgatgtacgggtaataccaacagaggaaaagaggcggaagcttactgccatgagttttcttatgattaaatgtgaaacacacatcaacaatcccgggaatt

SEQ ID NO: 356296 - DNA, 1625 bp, Homo Sapiens
  misc_feature (13)..(13): n is a, c, g, or t
  misc_feature (766)..(766): n is a, c, g, or t
  misc_feature (868)..(876): n is a, c, g, or t
  misc_feature (978)..(996): n is a, c, g, or t
  misc_feature (1216)..(1216): n is a, c, g, or t
  misc_feature (1218)..(1218): n is a, c, g, or t
  misc_feature (1220)..(1220): n is a, c, g, or t
  misc_feature (1240)..(1240): n is a, c, g, or t
  misc_feature (1246)..(1246): n is a, c, g, or t
cacagaaaacaanccaactatatttagtagttattaaaataacttaaaatacaatatagcaatacatgtgcttcatatttaacacattaaataactagacttattacgataatctctaaaaagtggtatgtaaatgatgttttcaaaagatctgcaacatctgtgacatgaaatgcatgcatctatgatttctattggtgacaaattcaccaccacggctaatactactacagtttattacccacattcataaataaaggaaacgctatgcttagatgaaaggttagtggaagtaaagatgtaatttttctccatccaaattcatagcacccctgaattctatctctatattcctgggtggatgggggttgtgtatcccaggctaagaatgactaggttggaggaaagtcaggtagaaacgccaggaacatggatatgcataaattctctgtttatattgtcgctactgaaggtaacacattagcagagaaaagaaggacacactcccccaaggaggtgaccaatgcccctaacaggagctgctactttttgtgccaggggttcctggacacgaagaccgggttcaccagagagggtgcagcacaggctcacagctaacactggggggcctgtcccaggcattcactcacatacagctctttcttcattccactttaaatttatcttcctggcatttggtccggtgcatttgtctcttctttcacctttctcttgaaagtaagtgaaaatactcgccatgaagggntgggttatatagttagattggggaacagtgcttaacctgcaatatgaggcacaactctgccttttgaagttatttatagaaggaatacaagctcatttaagnnnnnnnnntatcaagcatacatatgtgcctcaagtaaagaataaaaggctacctacctgtctagctactcagtctcactccccagccgcagccagtttggtgtgtgtatnnnnnnnnnnnnnnnnnnncctttaaaatcaccatatatattatgcaagtagcttttctcacttacacaactctgcatgttgatatattaaatcagcagcacacagtatgaatactgctcttcagcgccgttcacagtagcctcacgctgggggagccacctgttctaagatgcacccgacccctgcaccgtgcagcctggacgcatctcgaatactctgcccaagcttcttcccttgncntnttcgcttccaggcctttccntttttntttttataatttttgctccccccttgcaaaccattgccttgcctaatgattaagtatttagggagtccaggaaagcatctcgtggctgaagtttcgaatctgccaggtgtccgggagtcgctcggggacgcgcgagctccttgaagggctctgggagatgcgccgccgagagcggtacaagggggtccccggcatcacgcataaaagcgacgcgggcccgccaacacgctagagagtcggcctagcacccccggaggtgagccaccgcccctgccccgcggaaagtcccccggtcttcccaccgaattggctcggtggccgctaccaagtctccgccgcattcctgctctcccgggtgagtatggctcagcgagagacc

SEQ ID NO: 356297 - DNA, 881 bp, Homo Sapiens
  misc_feature (37)..(37): n is a, c, g, or t
  misc_feature (67)..(67): n is a, c, g, or t
  misc_feature (82)..(83): n is a, c, g, or t
  misc_feature (87)..(87): n is a, c, g, or t
  misc_feature (91)..(91): n is a, c, g, or t
  misc_feature (370)..(433): n is a, c, g, or t
  misc_feature (746)..(764): n is a, c, g, or t
ctcggagaagagcgcccccggcaggcccccgccgccncccccgcagtgatccgccaggcgcagggtntcggtgagtgcccanntttntttntggcgaagcgcagggtctcgatcttggtgagcttggcgtcctcggggaacgtggggagcacctcgcgcagcgcgtccagtgccgcgttgaggttgtgcatgcggtttcgctcgcggttgttggccttcagtctacgggtcttcttgatgcgctgcaccgtctcggccgtcttggcgcctcgggagacggcccgcgcccgggaagggcgccgtttgcaatcgtgtaccagacccagcagccgtgcgggccggcagccctccgcaccccgcagcaacgccnnnnnnnnnnnnnnnnnnnnnnnnnnnnnnnnnnnnnnnnnnnnnnnnnnnnnnnnnnnnnnnnggctcctcctcctcttcttcgtcggcgctggatgacagcggggtcagggccgccaaggcgggggaggccgatccgagcagcactaacacgtcctcttcctccttcaactccaaggtctcggatttgacgaacatcttagttggctcataactgtgcctcagcgttgctgtgactttggcctgtgccgggaatctccgcgcagctgcgagcgcagcgccgggtccttcgcccggcgtgaaagctgcaagcccggcgctactgtggcgcagctccgcgggggacctctgcgaccggcgagtttgccaagagcccnnnnnnnnnnnnnnnnnnnccgcccgggtctcgtgtgttgtggtggtggtgcgtgtctgtctgtcagtcagtccctggccgtgcggctcctggcacgcgactcccaggcactccagttaacgcgaagctgcttgtg

SEQ ID NO: 356298 - DNA, 1525 bp, Homo Sapiens
gacgccaagctacacagatcgagaccctgcgcttcgccccaactacatctgggcactcaccgagaccctgcgcctggcggatcactgcgggggcggcggcgggggcctgccgggggcgctcttctccgaggcagtgttgctgagcccgggaggcgccagcgccgccctgagcagcagcggagacagcccctcgcccgcctccacgtggagttgcaccaacagccccgcgccgtcctcctccgtgtcctccaattccacctccccctacagctgcactttatcgcccgccagcccggccgggtcagacatggactattggcagcccccacctcccgacaagcaccgctatgcacctcacctccccatagccagggattgtatctagagctgccatttctgctacccacgccaggccttagtgggttccctttcctgtccccagtcgagccctcctcccttcccctgcccctcctttccacgccctggaaaccatctcacttcacagggcaggtgtagcctttctgattcctcggttgtttcttgcatttcttggctttgggtatccttcattcagacgggctctgatttactgaaggtgtgatggagcttattgtcaaagccaagggtggcgttttgggggcgcttcttgagacgaaaaagaccctgggaagagatgatggtggcatatctaaagagtttgcagagcggactgacgctcctcccctttctctttaacgccgaaggacttggtgcagttcgtgtgaatctcacagggggaatgcaactggttcctgtgatctcttcacctttgcttctacatagagatgttaatgtcgagtagaaagaaatgtatcttagcatctgaatgattttgctggtaataatattatccacagatttgcaatggctggcatctgctttattcccattgctgtctgcaggctgtgggaatttcacccgtcaaaccaaacatccctcactgatgtgcactttgttctgtttcccagattcgtcacaatgcctattgtacctgtccttctctttcccttttcttccccacctcgccatctgtcccctatgatttataaggggaaaaaaacttgttttgttagaggggcaggttagaagtcattgtataatttgtaggctttgtaatgattgaacgcaagcgtggaaatttaggctgaactctctatcaaaaggaaaaatgtggaggaaaagggaaaaatcaggagggaggattgcctcatgtattatttatttcgaccttttaggggagaaggaactcccccattctttcaagagattaaaaataaatcaacagtctgaaaacctaagcagacacggagcattatccggatcagccacacacgtgttcccttctatttattataaagaaatttttcatgggaaaatatgtattttttgtatattctacagagtttattctagtatgtatttacatcttgaaaaacaagaaagttgttcttgtgattaaactataaataaactatctaattttcat

SEQ ID NO: 356299 - DNA, 1938 bp, Homo Sapiens
  misc_feature (48)..(48): n is a, c, g, or t
  misc_feature (336)..(422): n is a, c, g, or t
  misc_feature (1898)..(1898): n is a, c, g, or t
tctgagcaggggaaaaaaggccgggtatagtgacgcgcgcgtggctgncataaaaagttgggggggtaaggcttgcgggagtcggagtcgggtgcagatagtgatatctaggggaggcgggggggcgcaaaaggaaaaaggggtttcgtcaaagagtgcataaagggggagtggttggccaccgagggatttatgtggaacgggcccccgcggggcctggtgtataggaggaactccgataggggggccctctttttataaagaaaaggggggtaaggggggatagtggcgcccctccgaaaagaaggtatataggggaacgcccccttttataannnnnnnnnnnnnnnnnnnnnnnnnnnnnnnnnnnnnnnnnnnnnnnnnnnnnnnnnnnnnnnnnnnnnnnnnnnnnnnnnnnnnnnggtattaatggggtttggtttgtttgaattttcaattagttaatttcataagctacagcagaggcgtggaccctgccctctccacacttgaagagataagcccctgggatccaagtcccagcaaggttggtgccacccatcttggtgaaagatgctgttgttcctgtggaaaccatcaccagaggtaggaagggctttgagcccaaaaggaaacaagagggcgtgaatccaggccatcctcaggggagggtgggagcccatcccaggcagagaggcctaagcctcagtgtgggccaaggctcaaaggtgctggcacaggcttcccagggagaacagaaactcagcagtgaaagccgcagaggggaagaagcaggctgatgtcaacagcgtggggctctgtccctcaccccaaggagagggagtgtgccagatcccaggccaccaagcggggccagctccagcctgggcgatcgtcccagcagctgagagggaagctttaagcagaccagtgggtaggagaggagggagcatgcggcaggtggggcagccacacaaaggagagttcccagaaggccaaggtgtggtcaccctccacgcctcccgacttcctcctggagtggctgggcagcatgcagggcagcgtccagtaggcggcagtggcaggaagggagcgggcggccctcgcaggtccctcagttggcagggctgcattgcagaatctgctgtggggcaaagagcttcctggcagccacggcttcccctggctttcctggcactgggcagttctctttgttgtccggcccggcaggctggcctgaggccttcttgaagtagcagagccgacacacggagtggtacttgtctgctcccccaatcacctcgacctccttctctgtgccgagcctcttggtatagggggcttcccggaagcactccatgcacaccgccgtcagcttcaccacgctctcggccagcggcaccaggttcaggatggccccaaatggcttcctctggaaggtcccatccagtgcagccacaattacggtcttcccggcgttggccatggcctcgcagaactccacgatgtcagggaaaaactgcccctcgtcgatgcctatgacagccacgcccagggcctcctgggccacgtctcggagcaggcaggcgggcagcgcctccatggtgttccggtcatgtgtgcagaagctgctgctgtagcgagtgtctttggcatacttgatcaccaggcacttgtactgagcaatctggaagcgacggacgcgtctcatcaactctgtgctttttcctgagaacatcggcccgagaatcacctggatctgcccccgggtcttgctgggggagccaggcagcacagtgggcaggttaatgcagctcattgcgcctccgggaagttcacgaacccgagtactctccacctcgtgccgaattcgccacccaggcctcgctacgtagggnggtgagcgggcggtttgggccgtcgccggggaaaaaaaat

SEQ ID NO: 356300 - DNA, 1112 bp, Homo Sapiens
ttaggctaggtacgaggctgggtgttgaatcggcacgagggcgggacggccttggagagtactcgggttcgtgaacttcccggaggcgcaatgagctgcattaacctgcccactgtgctgcctggctcccccagcaagacccgggggcagatccaggtgattctcgggccgatgttctcaggaaaaagcacagagttgatgagacgcgtccgtcgcttccagattgctcagtacaagtgcctggtgatcaagtatgccaaagacactcgctacagcagcagcttctgcacacatgaccggaacaccatggaggcactgcccgcctgcctgctccgagacgtggcccaggaggccctgggcgtggctgtcataggcatcgacgaggggcagtttttccctgacatcgtggagttctgcgaggccatggccaacgccgggaagaccgtaattgtggctgcactggatgggaccttccagaggaagccatttggggccatcctgaacctggtgccgctggccgagagcgtggtgaagctgacggcggtgtgcatggagtgcttccgggaagccgcctataccaagaggctcggcacagagaaggaggtcgaggtgattgggggagcagacaagtaccactccgtgtgtcggctctgctacttcaagaaggcctcaggccagcctgccgggccggacaacaaagagaactgcccagtgccaggaaagccaggggaagccgtggctgccaggaagctctttgccccacagcagattctgcaatgcagccctgccaactgagggacctgcgagggccgcccgctcccttcctgccactgccgcctactggacgctgccctgcatgctgcccagccactccaggaggaagtcgggaggcgtgaagggtgaccacaccttgggccttctgggaactctcctttgtgggggctgccccacctgccgcatgcttccctcctcctcctacccactgggtctgctttaaagctttccctctcagcttgctggggacaatccgcccaaggcttggagctgggccccccccttggtggggcctggggatcttggcacacctccccttctcccttggggggggaagc

SEQ ID NO: 356301 - DNA, 1039 bp, Homo Sapiens
cggctaggtacgaggactgggtggcgaattcggcacgagggcgggacggcctggagagtactcgggttcgtgaacttcccggaggcgcaatgagctgcattaacctgcccactgtgctgcccggctcccccagcaagacccgggggcagatccaggtgattctcgggccgatgttctcaggaaaaagcacagagttgatgagacgcgtccgtcgcttccagattgctcagtacaagtgcctggtgatcaagtatgccaaagacactcgctacagcagcagcttctgcacacatgaccggaacaccatggaggcgctgcccgcctgcctgctccgagacgtggcccaggaggccctgggcgtggctgtcataggcatcgacgaggggcagtttttccctgacatcgtggagttctgcgaggccatggccaacgccgggaagaccgtaattgtggctgcactggatgggaccttccagaggaagccatttggggccatcctgaacctggtgccgctggccgagagcgtggtgaagctgacggcggtgtgcatggagtgcttccgggaagccgcctataccaagaggctcggcacagagaaggaggtcgaggtgattgggggagcagacaagtaccactccgtgtgtcggctctgctacttcaagaaggcctcaggccagcctgccgggccggacaacaaagagaactgcccagtgccaggaaagccaggggaagccgtggctgccaggaagctctttgccccacagcagattctgcaatgcagcccctgccaactgaggggaccctgcgagggcccgcccgctccccttcctggcactgccgcctactgggacgctggccctgcatgctggcccagccactcccaggaaggaatccgggaagccgttggagggtgacccacaccttggcctttctggggaactccccctttggggggggctgcccccacctggccggcatggcttccctccttcttcctaacccaagtgggtctggcttttaagccgtttcccttctccga

SEQ ID NO: 356302 - DNA, 1658 bp, Homo Sapiens
  misc_feature (133)..(133): n is a, c, g, or t
  misc_feature (267)..(267): n is a, c, g, or t
  misc_feature (755)..(756): n is a, c, g, or t
  misc_feature (1579)..(1579): n is a, c, g, or t
atggagaggagagcctcgtgtattttttcctacaggttctttttttacagttgacatttttatctgctcgtttttggaagtacaagggaagtgtggaaaagacaagtgattcggggctttgcaggcgcctggngtggctcccagtacgttgcccaccgcgctctgcttttaacgggagagtaggcgggtcctgaggagcacggggcgtgcgcgcacgtgctggcccttgccctgctctggcgtcgtctcctgggagcacacgtcagngggacctagtgaccctggggatggggctccaaagcgtgggggctgagctggggatgcagagtggcgtgtccttgcccttcgactcgttctggtccctctctaacactggggtgctggacaggaatggggcccggcccttcccctcacaccaagcagctgagcgacggtggagctgagctgtgatggctgcggacccgcgttgcaccggccctacctgagaggcttggggcctgcacacagctcggccctgtgcttccttgcagccagccatacgtcgtgtgccggcagtgtcctgagtacagaaggcaggcggcgcagctccccactgcccagcacccgagggcgagccaggagccccacaggccctgggggatgcaccctccacgtccgtcagcctgacgacagtccaggattacgtgtgccctctgcaaggaagccacgccctgtgcacctgctgcttccagcccatgcccgaccggagagcgganncgagcaggacccgcgtgtcgcccctcagcagtgtgcggtctgcctgcagcctttctgccacctgtactggggctgcacccggaccggctgctacggctgcctggccccgttttgtgaatctgtaatgaaaagaaatatgtttatcctcagtgtcgggcagacagtgctttcctgcgacatcattataaacagaattacctggcaaccagaggtttgacatggaaaaacatgttgaccgagagcctcgtggctctccagcggggagtgtttctgctgtctgattacagagtcacgggagacaccgttctgtgttactgctgtggcctgcgcagcttccgtgagctgacctatcagtatcggcagaacattcctgcttccgagttgccagtggccgtaacatcccgtcctgactgctactggggccgtaactgccgcactcaggtgaaagctcaccacgccatgaaattcaatcatatctgtgaacagacaaggttcaaaaactaagcatccagaggccctgagcagctttcagcactggaggtgaagagagcgtgtttttaaaatacagagacaagcacgtcaaggtgttttcacagccccctgagggaagggacgcagggtctccgacaggtgctctggggtgactcttctgtggagctttaccctctgagtgagaccctccccagagccccgggggccgcagcccgccctcctggtgagcgctgggcagggctcgtggtggcatcagcagcagagacgaagccttttctgtaacatgcggccgtcccgccgagaagggcagttttgctcttttgtacatttncgaaactacgttaaagcgaagtctgttttcaggaaagtttcaggggagagggcagtttatcaaaacatttgttcagaga

SEQ ID NO: 356303 - DNA, 1120 bp, Homo Sapiens
  misc_feature (9)..(9): n is a, c, g, or t
  misc_feature (16)..(17): n is a, c, g, or t
  misc_feature (22)..(22): n is a, c, g, or t
  misc_feature (33)..(33): n is a, c, g, or t
  misc_feature (43)..(43): n is a, c, g, or t
  misc_feature (62)..(62): n is a, c, g, or t
  misc_feature (68)..(68): n is a, c, g, or t
  misc_feature (73)..(75): n is a, c, g, or t
  misc_feature (88)..(88): n is a, c, g, or t
  misc_feature (100)..(101): n is a, c, g, or t
  misc_feature (109)..(109): n is a, c, g, or t
  misc_feature (155)..(155): n is a, c, g, or t
  misc_feature (177)..(177): n is a, c, g, or t
  misc_feature (179)..(179): n is a, c, g, or t
  misc_feature (785)..(785): n is a, c, g, or t
  misc_feature (790)..(790): n is a, c, g, or t
  misc_feature (803)..(803): n is a, c, g, or t
  misc_feature (809)..(809): n is a, c, g, or t
  misc_feature (821)..(821): n is a, c, g, or t
  misc_feature (825)..(825): n is a, c, g, or t
  misc_feature (831)..(831): n is a, c, g, or t
  misc_feature (839)..(839): n is a, c, g, or t
  misc_feature (842)..(842): n is a, c, g, or t
  misc_feature (858)..(858): n is a, c, g, or t
  misc_feature (860)..(860): n is a, c, g, or t
  misc_feature (864)..(864): n is a, c, g, or t
  misc_feature (920)..(922): n is a, c, g, or t
  misc_feature (942)..(942): n is a, c, g, or t
  misc_feature (952)..(952): n is a, c, g, or t
  misc_feature (973)..(973): n is a, c, g, or t
  misc_feature (978)..(979): n is a, c, g, or t
  misc_feature (986)..(986): n is a, c, g, or t
  misc_feature (1001)..(1001): n is a, c, g, or t
  misc_feature (1018)..(1019): n is a, c, g, or t
  misc_feature (1025)..(1026): n is a, c, g, or t
  misc_feature (1039)..(1039): n is a, c, g, or t
  misc_feature (1041)..(1041): n is a, c, g, or t
  misc_feature (1069)..(1069): n is a, c, g, or t
  misc_feature (1098)..(1098): n is a, c, g, or t
  misc_feature (1103)..(1103): n is a, c, g, or t
  misc_feature (1106)..(1106): n is a, c, g, or t
  misc_feature (1108)..(1108): n is a, c, g, or t
caagatacnttccctnncaagnagccacccctntcacctgctnttcagcccatcccgacggngggggnggcgnnnagacccgcgttcncccctcagcagnngcggtctnctgcagccttctgccacctgtactgggctgcacccggaccggctgnacggctgcctggccccgtttgngngctcaacctgggtgacaagtgtctggacggcgtgctgaacaacaacagctacgagtcagacatcctgaagaattacctggcaaccagaggttttgacatggaaaaacatgttgaccgagagcctcatggctctccagcggggagtgtttctgctgtctgattacagagtcacgggagacaccgttctgtgttactgctgtggcctgcgcagcttccgtgagctgacctatcagtatcggcagaacattcctgcttccgagttgccagtggccgtaacatcccgtcctgactgctactgggggccgtaactgccgcactcaggtgaaagctcaccacgccatgaaattcaatcatatctgtgaacagacaaggttcaaaaactaagcatccagaggccctgagcagctttcagcactggaggtgaagagagcgtgtttttaaaatacagagacaagcacgtcaaggtgttttcacagccccctgagggaagggacgcagggtctccgacaggtgctctggggtgactcttctgtggagctttaccctctgagtgagaccctccccagagccccgggggccgcagcccgcccccctggtgagcgctgngcagngcccgtggtggcntcagcngcagagacgaancctntctgtnacatgcgnccntcccgccgagaggggnantttngctcttttgtacattttccgaaactacagttaaagcggaagtctgttttcaggaannntttcaagggagaagggcaantttttttaanacattgtttcaggagaagggngcatnngtttacngcctacaggacgtanacaatatcctgctgctnngaaagnnacggggttttatntnttttttattttaataggtttggtgcttntcttctaataagatttaaatgtcacatantgtanacnantaatataattta

SEQ ID NO: 356304 - DNA, 1788 bp, Homo Sapiens
caggaggaagatggcggcgtccgcagctgccgctgagctccaggcttctgggggtccgcggcacccagtgtgtctgttggtgttgggaatggcgggatccgggaaaaccacttttgtacagaggctcacaggacacctgcatgcccaaggcactccaccgtatgtgatcaacctggatccagcagtacatgaagttccctttcctgccaatattgatattcgtgatactgtaaagtataaagaagtaatgaaacaatatggacttggacccaatggcggcatagtgacctcactcaatctctttgctaccagatttgatcaggtgatgaaatttattgagaaggcccagaacatgtccaaatatgtgttgattgacacacctggacagattgaggtattcacctggtcagcttctgggacaattatcactgaagcccttgcatcctcatttccaacagttgtcatctatgtaatggacacatcgagaagtaccaacccagtgaccttcatgtccaacatgctctatgcctgcagcatcttatacaaaaccaagctgcctttcattgtggtcatgaataaaactgacatcattgaccacagctttgcagtggaatggatgcaggattttgaggctttccaagatgccttgaatcaagagactacatacgtcagtaacctgactcgttcaatgagcctggtgttagatgagttttacagctcactcagggtggtgggtgtctctgctgttctgggtactggattagatgaactctttgtgcaagttaccagtgctgccgaagaatatgaaagggagtatcgtcctgaatatgaacgtctgaaaaaatcactggccaacgcagagagccaacagcagagagaacaactggaacgccttcgaaaagatatgggttctgtagccttggatgcagggactgccaaagacagcttatctcctgtgctgcacccttctgatttgatcctgactcgaggaaccttggatgaagaggatgaggaagcagacagcgatactgatgacattgaccacagagttacagaggaaagccatgaagagccagcattccagaattttatgcaagaatcgatggcacaatactggaagagaaacaataaataggagactttagcacacttcacttgtttctagaagtccagaattttggacctccacgtgaaagaactgttcttacctctgaactgggggctcccataagggataattttcctcagagtagcaaagtttctcttattagagaaatcttgtgactcagatgaagtcagggatagaagacccttggacctggcaggttaatgctgattattccttggcctttcccttgtatttatgcaaggaaggatatactgagctgatactcttccaagcctacaacttcaagttttatcatttgaactcaagtacttttgctgctgaggaatggaatcaaaagaacgtagtctcctggtgaccacctcagatctctattattaggctagatgtatagcctctactcccccagcttcttgctcttgaccctgcactgtaagttgcccttctattagcagccaaggaaaagggaaacatgagcttatccagaacggtggcagagtctccttggcaatcaaccaacgttgctatgaaatatgcctcacactgtatagctcattataggacgtcaggtttgttgaaaaaagtgggcaagacatgattaatgaatcagaatcctgtttcattggtgacttggataaagactttttaattttaactttgaa

SEQ ID NO: 356305 - DNA, 532 bp, Homo Sapiens
ctaggtagcgaggcctgggtggcgaattcggcacgaggaagatgccttgaatcaagagactacatacgtcagtaacctgactcgttcaatgagcctggtgttagatgagttttacagctcactcagggtggtgggtgtctctgctgttctgggtactggattagatgaactctttgtgcaagttaccagtgctgccgaagaatatgaaagggagtatcgtcctgaatatgaacgtctgaaaaaatcactggccaacgcagagagccaacagcagagagaacaactggaacgccttcgaaaagatatgggttctgtagccttggatgcagggactgccaaagacagcttatctcctgtgctgcacccttctgatttgatcctgactcgaggaaccttggatgaagaggatgaggaagcagacagcgatactgatgacattgaccacagagttacagaggaaagccatgaagagccagcattccagaattttatgcaagaatcgatggcacaatactggaagagaaacaataaa

SEQ ID NO: 356306 - DNA, 460 bp, Homo Sapiens
  misc_feature (15)..(15): n is a, c, g, or t
  misc_feature (27)..(27): n is a, c, g, or t
ggaaaactccccttncaaaatccctgngggcaagccactgggtaaacttgcaacaaaagagttccaccctaaatcccaagtacccccagaacagcaagagacaccccaccaacccctgaagtgaagctgtaaaaactcatcctaaacacccagcctcattgaacgagtccaggttactgacgtatgtagtccccttgattccaaggcatccttggaaagcctcaaaatcctgcatcccattcccactgcaaagctgtggtcaatgatgtcagttttattcatgaccacaatgaaaggcagcttggttttgtataagatgctgcaggcatagagcatgttggacatgaaggtcactgggttggtacttctcgatgtgtccattacatagatgacaactgttggaaatgaggatgcaagggcttcagtgataattgtcccagaagctgaccaggtgaatacc

SEQ ID NO: 356307 - DNA, 1588 bp, Homo Sapiens
  misc_feature (102)..(102): n is a, c, g, or t
  misc_feature (1361)..(1361): n is a, c, g, or t
  misc_feature (1437)..(1437): n is a, c, g, or t
  misc_feature (1533)..(1533): n is a, c, g, or t
tgtggctgtagggaatttgggggatattctggatcttagcaaagggtcaaggtcaactcttatatctcccgcacctcaactgacccaacttgaaagcatganagggagaataggggataataaaaattccaggggctaattttaatcataatccttccctccagttagcagcccaagtcctagaagacaagggtgttggcttcgggctggtagactctgagaaggatgcagctgtggccaagaaactaggcctaactgaagtggacagcatgtatgtattcaagggagatgaagtcattgagtacgatggcgagttttctgctgacaccatcgtggagtttctgcttgatgtcctagaggaccctgtggaattgattgaaggtgaacgagagctgcaggcgtttgagaatattgaggatgagatcaaactcattggctacttcaagagcaaagactcagagcattacaaagccttcgaggatgcagctgaggagtttcatccatacatccccttcttcgccaccttcgacagcaaggtggcaaagaagctgaccctgaagctgaatgagattgatttctacgaggccttcatggaagagcctgtgaccatcccagacaagcccaatagcgaagaggagattgtcaacttcgtggaggagcacaggagatcaaccctgaggaaactgaagccggagagtatgtatgagacctgggaggatgatatggatggaatccacattgtggccttcgcagaggaagctgatcctgatggtttcgagttcttagagactctcaaggctgtggcccaagataacactgaaaacccagatcttagcatcatctggattgaccctgatgacttccccctgctggtcccatactgggagaagacgtttgacatcgacttgtcagccccacaaataggagtcgtcaatgttactgatgcggatagcgtatggatggaaatggacgatgaggaggacctgccttctgctgaggagctggaggaactggctggaggatgtcctggagggcgagatcaacacagaggacgatgacgatgatgatgatgactagttgctatggcaaccatctttcagccccactggtcttttcatgctctctcctgccttcccttgtccttccctgagttcctccagggagactaggttattctctgccatagagctaatctggggtcaatatgctgggtgctgagacactgatccccctcatttgatgagcaaatgagctacttttccctagacaccaggccagctctctcttatctgacttctgtttcttatcccataacttacttgtatctattatgtgtctcttccatcactctccatactctntcttgtgattctcctctagccatatatatgggccccatctctgttctgttcccttcatctatgcacagctttcccncactctctctaatcctgtatctttctgactgtcctgtccttggccagaaggaagggagaatactgtgtttgggactgtatctcagcaatcacttgntaatgtattttgggtcaaatgaggaggcctcaataaagacatctggggcagcatg

SEQ ID NO: 356308 - DNA, 1937 bp, Homo Sapiens
  misc_feature (1672)..(1672): n is a, c, g, or t
  misc_feature (1685)..(1685): n is a, c, g, or t
  misc_feature (1737)..(1737): n is a, c, g, or t
  misc_feature (1744)..(1744): n is a, c, g, or t
  misc_feature (1753)..(1754): n is a, c, g, or t
  misc_feature (1756)..(1756): n is a, c, g, or t
  misc_feature (1805)..(1805): n is a, c, g, or t
  misc_feature (1817)..(1817): n is a, c, g, or t
  misc_feature (1865)..(1865): n is a, c, g, or t
  misc_feature (1891)..(1891): n is a, c, g, or t
cgcaggttctaactttggcctgggactctgcccctctacctcagcacagaatcgccccgggtcctactacagaatcaatccttgaacactgcctccacgtcgccggctcaatctgggcgagaacccagacttccaccgcagccccgcaatctgcagacctcagcggcagcgcaggtggcagacctgcctcctttgcctgtgagtcatggcagctcccatgaatggccaagtgtgtgtggtgactggtgcctccaggggtattggccgtggcattgccttgcagctctgcaaagcaggcgccacagtttacatcactggccgccatctggacacccttcgcgttgttgctcaggaggcacaatccctcgggggccaatgtgtgcctgtggtgtgcgattcaagccaggagagtgaagtgcgaagcctgtttgagcaagtggatcgggaacagcaagggcgtctagatgtgctggtcaacaatgcttatgcaggggtccagacgatcctgaacaccaggaataaggcattctgggaaacccctgcctccatgtgggatgatatcaacaacgtcggacctcagaggccactacttttgctcagtgtatggggcacggctgatggtaccagctggccaggggctcatcgtggtcatctcctccccaggaagcctgcacgtatactgttcaatgtcccctatggtgtgggcaaagcttgcggtgaggacccagtggcataagagctgaggaggtaaaagacagtgatgttacctatagctcaggaggtacaatccccagtggtcaaaatggtaaggctggctcctatcagctcctcctctgcctcatccatggacagttcctttgcttgtgctcctcttggttggctaaagtaggcatcacactggggagcgtgggcagctgagaccttggggctcctgggaaggacagggtgggtggagcattcacagtagaagcagagagggcagggcaggaaagtgacatggctaggtggctcttaccctgccttccgcctctccacagtgtgacaagctggctgctgactgtgcccacgagctgcggcgccatggggtcagctgtgtgtctctgtggccggggattgtgcagacagaactgctgaaatagcatatggcaaaggaggaggtcctgcaggatcctgtgttgaagcagtttcaaatcagccttctcatctgcggaaaccacagaattgagtggcaaatgtgtggtggctttggcaacaggtgaagtttgggggcagctggtaataagaaagggcatggaggatgtgtagtgcggtagcatccagtgcccagatctggctcgggagttggttgaggaacatgtcattcttttctctgctttgtgaggcccagagggggcagcattcccagtttgaggtctgagagccttaggagcaggctcctgggaagtgtggaaaaagtccaaggcccaagagaaagagctctccagggatcctgagctccagggctctcagcagtgccctgtccaactgggcccaaaccttgtcactccgcatactcccctgcctgccatctccacctgtctgtgtgcccgcagatcccaatatcctgagcctgagtggtaaggtgctgccatcctgtgaccttgctcgacgctatggccttcgggatgttttnggccgccccgtcnaagactatttgtctttgagctctgttctctcacacgtgtccggcctgggctngctgacnaccaaccanncnaccaccccccgtgtgcccaagtggattattgccctctacactagcaagntctaaccctccnggtctgacactacgtctctgcttgtcttctcatttggacttggtggtntgtcctgtctcagtgaaacattcttncctttcttgtttacccatacccttgatatgaagagaagccctctgc

SEQ ID NO: 356309 - DNA, 1355 bp, Homo Sapiens
  misc_feature (1077)..(1077): n is a, c, g, or t
  misc_feature (1108)..(1108): n is a, c, g, or t
  misc_feature (1110)..(1111): n is a, c, g, or t
  misc_feature (1116)..(1116): n is a, c, g, or t
  misc_feature (1132)..(1132): n is a, c, g, or t
  misc_feature (1149)..(1149): n is a, c, g, or t
  misc_feature (1212)..(1212): n is a, c, g, or t
  misc_feature (1214)..(1214): n is a, c, g, or t
  misc_feature (1229)..(1229): n is a, c, g, or t
  misc_feature (1275)..(1275): n is a, c, g, or t
  misc_feature (1286)..(1286): n is a, c, g, or t
  misc_feature (1297)..(1297): n is a, c, g, or t
  misc_feature (1310)..(1310): n is a, c, g, or t
  misc_feature (1316)..(1316): n is a, c, g, or t
  misc_feature (1327)..(1327): n is a, c, g, or t
  misc_feature (1354)..(1354): n is a, c, g, or t
ccccatccgcaggttctaactttggcctgggactctgcccctctacctcagcacagaatcgccccgggtcctactacagaatcaatccttgaacactgcctccacgtcgccggctcaatctgggcgagaacccagacttccaccgcagccccgcaatctgcagacctcagcggcagcgcaggtggcagacctgcctcctttgcctgtgagtcatggcagctcccatgaatggccaagtgtgtgtggtgactggtgcctccaggggtattggccgtggcattgccttgcagctctgcaaagcaggcgccacagtttacatcactggccgccatctggacacccttcgcgttgttgctcaggaggcacaatccctcgggggccaatgtgtgcctgtggtgtgcgattcaagccaggagagtgaagtgcgaagcctgtttgagcaagtggatcgggaacagcaagggcgtctagatgtgctggtcaacaatgcttatgcaggggtccagacgatcctgaacaccaggaataaggcattctgggaaacccctgcctccatgtgggatgatatcaacaacgtcggactcagaggccactacttttgctcagtgtatggggcacggctgatggtaccagctggccaggggctcatcgtggtcatctcctccccaggaagcctgcagtatatgttcaatgtcccctatggtgtgggcaaagctgcgtgtgacaagctggctgctgactgtgcccacgagctgcggcgccatggggtcagctgtgtgtctctgtggccggggattgtgcagacagaactgctgaaggagcatatggcaaaggaggaggtcctgcaggatcctgtgttgaagcagttcaaatcagccttctcatctgcggaaaccacagaattgagtggcaaatgtgtggtggctttggcaacagatcccaatatcctgagcctgagtggtaaggtgctgccatcctgtgaccttgctcgacgctatggccttcgggatgtggacggccgccccgtccaagactattcgtctttgagctctgttctctcacacgtgtccggcctgngctagctgacaacctacctgcccaccttccncnntgtgnccaagtggattattancctctacactagcaagntctaacccccctgctctgacactacgtctctgcttgtcttctcatttggacttggtggtttgncntgtctcagtgaaacngcagcgtgtcttgtttaggcatacccgtgatatgaagagaaggcgnctgctgtgtgnccgtggtgagntctggggtgcgcntaggtnccttctttgtnccttgtttttccttgtccttctttatnc

SEQ ID NO: 356310 - DNA, 955 bp, Homo Sapiens
aggctggaccggtccggattcccgggatgctggctcctctcagctcctcctctgcctcatccatggacagttcctttgcttgtgctcctcttggttggctagagtaggcatcacactggggagcgtgggcagctgagaccttggggctcctgggaaggacagggtgggtggagcattcacagtagaagcagagagggcagggcaggaaagtgacatggctaggtggctcttaccctgccttccgcctctccacagtgtgacaagctggctgctgactgtgcccacgagctgcggcgccatggggtcagctgtgtgtctctgtggccggggattgtgcagacagaactgctgaaggagcatatggcaaaggaggaggtcctgcaggatcctgtgttgaagcagttcaaatcagccttctcatctgcagaaaccacagaattgagtggcaaatgtgtggtggctttggcaacagatcccaatatcctgagcctgagtggtaaggtgctgccatcctgtgaccttgctcgacgctatggccttcgggatgtggacggccgccccgtccaagactatttgtctttgagctctgttctctcacacgtgtccggcctgggctggctggcctcctacctgccctccttcctccgtgtgcccaagtggattattgccctctacactagcaagttctaaccctcctggtctgacactacgtctctgcttgtcttctcatttggacttggtggttcgtcctgtctcagtgaaacagcagcctttcttgtttacccatacccttgatatgaagagaagccctctgctgtgtgtccgtggtgagttctggggtgcgcctaggtcccttctttgtgccttggttttccttgtccttctttttactttttgccttagtattgaaaaatgctcttggagctaataaaagtctcatttctctttcaatgtg

SEQ ID NO: 356311 - DNA, 373 bp, Homo Sapiens
  misc_feature (327)..(327): n is a, c, g, or t
  misc_feature (347)..(347): n is a, c, g, or t
  misc_feature (354)..(354): n is a, c, g, or t
gcagggcaggaaagtgacatggctaggtggctcttaccctgccttccgcctctccacagtgtgacaagctggctgctgactgtgcccacgagctgcggcgccatggggtcagctgtgtgtctctgtggccggggattgtgcagacagaactgctgaaggagcatatggcaaaggaggaggtcctgcaggatcctgtgttgaagcaggttggcaaggggagggcgaaggaagcagagaacaggggagtcggcctctgcatcctcaataacaagatcagatactcccactcaccaggtgcttactgtggcaggtgcagggctgagcatngggacacacattatttttcntttaatnctgtttaaggggagatacc

SEQ ID NO: 356312 - DNA, 463 bp, Homo Sapiens
  misc_feature (16)..(16): n is a, c, g, or t
  misc_feature (180)..(180): n is a, c, g, or t
cctgtgaaccttggtncgaaggctaaaggcctccgggaaggtggaaggccgcccccgtccaaaaactaaattgtcctttgaaactctgttcctcctcaaaacgtgtccgggcctgggctggctggcctccctacctgccctccttccctccgtgtgcccaagtggattattgccctctanactagcaagttctaaccctccctggtctgacactacgtctctgcttgtcttctcatttggacttggtggttcgtcctgtctcagtgaaacagcagcctttcttgtttacccatacccttgatatgaagagaagccctctgctgtgtgtccgtggtgagttctggggtgcgcctaggtcccttctttgtgccttggttttccttgtccttctttttactttttgccttagtattgaaaaatgctcttggagctaataaaagtctcatttctctttcaaaaaaaa

SEQ ID NO: 356313 - DNA, 1957 bp, Homo Sapiens
  misc_feature (35)..(35): n is a, c, g, or t
  misc_feature (76)..(76): n is a, c, g, or t
  misc_feature (1567)..(1567): n is a, c, g, or t
  misc_feature (1576)..(1576): n is a, c, g, or t
  misc_feature (1582)..(1582): n is a, c, g, or t
  misc_feature (1650)..(1650): n is a, c, g, or t
  misc_feature (1672)..(1672): n is a, c, g, or t
  misc_feature (1676)..(1676): n is a, c, g, or t
  misc_feature (1681)..(1682): n is a, c, g, or t
  misc_feature (1703)..(1703): n is a, c, g, or t
  misc_feature (1765)..(1766): n is a, c, g, or t
  misc_feature (1772)..(1773): n is a, c, g, or t
  misc_feature (1778)..(1779): n is a, c, g, or t
  misc_feature (1792)..(1792): n is a, c, g, or t
  misc_feature (1850)..(1850): n is a, c, g, or t
  misc_feature (1868)..(1868): n is a, c, g, or t
  misc_feature (1872)..(1872): n is a, c, g, or t
  misc_feature (1880)..(1880): n is a, c, g, or t
  misc_feature (1899)..(1899): n is a, c, g, or t
  misc_feature (1903)..(1903): n is a, c, g, or t
  misc_feature (1917)..(1917): n is a, c, g, or t
  misc_feature (1921)..(1922): n is a, c, g, or t
  misc_feature (1929)..(1929): n is a, c, g, or t
  misc_feature (1931)..(1931): n is a, c, g, or t
  misc_feature (1938)..(1938): n is a, c, g, or t
tggcaacttaaaatggcaaaaccccaactctcccngtccctccatccctctcctaaaaagtccagttgggaatctncattctggaaaagatggaatcgcatggagattctctagctgttaggtagacctaaataaaaagttctccaataggattcctcttttgagtaaatataagacctcttgtagctacaatgttttagagcatgtttcatcttcatttttaatatcctgaactgaatgatagtgttttttttgatgaagaactgatgtcagcctgccaggtactgtaatttattctatcatattattatattatatatcaagtaggacagtgaaaaatgtttccttgcaaacttgtagtccagtatcagttacttcctatttttatccttaaaagaccattgcaaatcagtgtaagggtttttccagtaattactcacagcactttgttaaagtttgcaatttcttcagccatttaataatatctttctgtgaagaaactttgctgagttaaccataaatgttcattcattgactgggtggggatgtgaatgggaatgttaggaaatgttgtgtgaattgaagttctgtattcattatagatgtagcccttatttaaaaaagtgaattccatactaaaactaggaatgaaagtgagagatttctaaactttttgcgaaagtgggtcattttttgtttgactataatagcaggaagaattatagcaatctgtcattttacctgaaacagacaagcctatgtattatgaatactttcaagcttccctttggaatatacaagacatgcgtttggagttacctttgtttttctatcgtaaatttagattctggaattggggtttggtggtgcaatgtgttgctcacaagtggccagaactcctattcctaaaaggattttgagatggaggaacacatatttaattcccctttatgccttggttcttgctcctctttccacgttggataacaattttttggttgttttgtttaagttggtgctctgaagcttaatctcagtaccctttactctgaattgtcaaattttgataaaacgtgccattttctttggtaagagaaagcaggtcttaatgtctgccagaacacaatttatatgccttattggcttcattaaacttttagaaaactttagcatttgttacttttttccattgcatttactttcaaatgcacctaatgaattcgtcacccagtcgcaacttttcccttctctgtcccattgctttctcctttccccgacgcacagaataaacatgaagctcagcagtagaagcgtaatgatttccctcaggaaaaacttctgacagctaggtttttcaagggtttccctgtgctagctgagatgcaaaacaaatcatggaagattgcatacctgtgtggtattttaaaaacaagttgactttttcagtttcttgaacggttaagggtggatttaaaaactagacagtttagttttggggaacagaagctctcttcgtcttaagccagattctctgattcttttagacgtcatagctccttagttctgntcctgtcgncctaanttggcatgggcaagttgaagttcatccttagactgcagcgttctgagcatggctgaagtattaaaatntttcatatttttttagagcaanattnatggnnagcatttggctgaatctaaanacctgcagtcagattcttcaatgtggtttacccaactggagtagtgataaacaccttaatcnntaaaannaatannaacaaaaaaaccntggggcttgtctgcagttttgttttggtcatcacatctgaataactctttgatgcaancaatgatgttaggctttnaaanagaatagnttctaaatgtttttttctnaggntccggactcataanccgnnaaatttngnttgggcngagattccttcacagtgaa

SEQ ID NO: 356314 - DNA, 1257 bp, Homo Sapiens
  misc_feature (50)..(50): n is a, c, g, or t
  misc_feature (122)..(122): n is a, c, g, or t
  misc_feature (129)..(129): n is a, c, g, or t
  misc_feature (769)..(781): n is a, c, g, or t
  misc_feature (1218)..(1218): n is a, c, g, or t
  misc_feature (1232)..(1232): n is a, c, g, or t
cctggaatctcatcccatcaacccaacagcacaacacacggtttgacagncagctgggtgctcgggctgctcgttctctcaaatgctgcccccacttaaaacatcacacacctcaaatattncaaaggnaggctagaagctggcctatggggtaaggtcatctaaaccatcaaagcgacaacttttccagaaggggtagcaggtaccataaacacttataactttaaacaaggggttgctctggaagaacctttctagtcactttattccacaaatccagaatgtatctctgaagattcccatcctcaccatgactaaatacctcagtcaccaatctaatgaatgaagcaccaggttacaacatactacataaagtaaaatgcaatgagattaatctgctgacgtagtcaccactagaggtagtagccaggccaaaaacgcaatcattctgttcataattttctaaacttatggccccatttcaaaatcatctcttggcgtcttgcactggcctctgaggctgactagccctctgggttggatgttggccatccctctcactataaaggaagttagccagttttcactgttgaatggaaatcttcaggcccaaagccacaattattcgagtttaatgagttccagtagcccttagaaaaaaaacatttagaaagctaattcttttttaaaagcctaaacttcatttgattgcatcaaaaagttattcagatgtgatgaccaaaacaaaactgcagacaagccccatggnnnnnnnnnnnnnattcattttatgattaaggtgtttatcactactccagttgggtaaaccacattgaagaatctgactgcaggtctttagattcagccaaatgctttccatcaattttgctctaaaaaatatgaaacattttaatacttcagccatgctcaggaacgctgacagtctaagggatggaacttcaacttgacccatgccaagttaggggcggacagggagcaggaactaagggagctatggacggttctaaaaggaatcaggaggaatctgggctttaaggacggaggaggaggcttctgtttccccccaaaacttaaactggtctaggttttttaaatccaccctttaacccgtttcagggaactggaaaaggtccaacttggtttttttaaaattaccacacgggtttgcccatctttccctggatttggttttgggcntctcgggttgggcncggggggaaacccttggaaaaacct

SEQ ID NO: 356315 - DNA, 457 bp, Homo Sapiens
  misc_feature (47)..(47): n is a, c, g, or t
  misc_feature (66)..(66): n is a, c, g, or t
cccaccgaaccccccatccccggatcctaaatttacggatgggaaanaacaaagggtaactccccnaacgcatgtcctggtataacccccaaagggaagcctggaaagtaattccataataccataggcttgtcctgtttccaggtaaaatgacagattgcctataattccttccctgcctattatagtcaaacaaaaaatgaccccactttccgcaaaagtttagaaatctctcactttcattccctagttttagtatggaattcacttttttaaataagggctacatctataatgaatacagaacttcaattcacacaacatttctaacattccattcacatcccacccagtcaatgaatgaacatttatggttaactcagcaaagtttcttcacagaaagatattattaaatggctgaagaaattgcaaactttaacaaagtgctgtgagtaat

SEQ ID NO: 356316 - DNA, 453 bp, Homo Sapiens
  misc_feature (20)..(20): n is a, c, g, or t
  misc_feature (43)..(43): n is a, c, g, or t
aacctcctgacagcccaggntttccaagggtcccccctggccnagccgagatgcaaaaccaaatccatggaagattgccaaaccctgtggggtattttaaaaaacaagttgacctttttcagttccttgaaacggttaagggtggatttaaaaacctagacagtttagttttggggaacagaagctctcttcgtcttaagcccagattctctgaatcttttagacgtcatagctccttagttctgctcctgtcgccctaacttggcatgggcaagttgaagttcatccttagactgcagcgttctgagcatggctgaagtattaaaatgtttaatattttttagagcaaaattgatggaaagcatttggctgaatctaaagacctgcagtcagattcttcaatgtggtttacccaactggagtagtgataaacaccttaatcataaaatgaat

SEQ ID NO: 356317 - DNA, 1698 bp, Homo Sapiens
  misc_feature (21)..(21): n is a, c, g, or t
  misc_feature (28)..(28): n is a, c, g, or t
  misc_feature (39)..(39): n is a, c, g, or t
  misc_feature (59)..(59): n is a, c, g, or t
  misc_feature (82)..(82): n is a, c, g, or t
  misc_feature (251)..(251): n is a, c, g, or t
  misc_feature (262)..(262): n is a, c, g, or t
  misc_feature (276)..(276): n is a, c, g, or t
  misc_feature (324)..(324): n is a, c, g, or t
  misc_feature (378)..(380): n is a, c, g, or t
  misc_feature (551)..(551): n is a, c, g, or t
  misc_feature (1336)..(1336): n is a, c, g, or t
  misc_feature (1404)..(1404): n is a, c, g, or t
  misc_feature (1416)..(1416): n is a, c, g, or t
  misc_feature (1454)..(1454): n is a, c, g, or t
  misc_feature (1465)..(1465): n is a, c, g, or t
  misc_feature (1518)..(1519): n is a, c, g, or t
gaatgctgaggtaagcgaganccctgcngacagcatctncgagccacagcccagcaggncaggtcggaccacagcccacttngtccaaccctctgtttcattactgaaaccagccctgaggggaagtcttttgctagtgccttcagaatcggcctgaaacccaggcctcctcgtcgccatgtccctgagctctcttgagatcacccctcatgggtgtgtttccctgttggtaaaatgagggtctgggacgngacagtcttcncggtcatttctgtnctcccatttggtgattgtgtgactgcggctggctggcttagcagaggngggaggcaatgtgccctcctggacggcctggcccctccttggtgctctctggtnnncccgcccatcctgcttctgcacctgcccttcccctcccttcagctggtgtggagtctaaggagaagcagagtatggagactaggaaaataccagagaacaccgacttaggaaaggtctcttagcagagtctaaaagagagggttgtagtaggggcagaagaaggcggagcnaggctggctgggattccactcattaagagaagggggaaatgctcctgtaccgcagcaggaggtactgaggttagattcagaggaagtttcttgccggcaaagggggctgttaagcacaacaatgaaagagcgcacgacaaggaggagcagttatccctagagatagtcactaaggacactttcacatgtctgtggcatgatacggacggtgaggtgccttcctcccctcaaaatcttgaccaaaggggctgattctggagtctctgccccctccccacctgcacatcctcagtgggaagagcagggcccggcttggtcctaacagggcaggaaagctgatggaaaagaggcccgtggtcctcagccccagcccatagcacgggggcacagctctggttaagcagtgcctagcagtggggctggaactggtttcccgggaaggagggagaccctagagaaagtaccgacagtccctggtcccgccgcgaaccccgccatgggaggtggccttctcctggggctgtgaagaggacacagcgggtgtggcccgaatacaggtgtccaagagcaccgggagatgccaacctctaaaacgagtgcaaggatggcttcaaagtctccgacaagctgaaggagtatctggaatatacagctccacagaggcaccctaccagtgcacccacatacgtccaagtgcgcgcccactcactggcctccgtcccccgccgaccaacaccaccgcggcagaggcccgggaaactcctggagatcccgctgcccccggnctccccgcgcccgtccgcccacgcaggcctcccgggcctctctccggaacgccgggtgcaccggcccngaaggggaggcntgggtgaggctgacgcgcggcggctcgaggtgcccttncacggggcagnagaccccgtaccccgggacgggaacggtccgccccaccgggcactcccatcgnngtgctgacccaggacgaagcaagtaaccacatcctccaccgggttcccagtttgggctttgagtcccaaacgcgggcccccgcccttctggaaaagcccggccggaaacattaccctttggaagaagctgcaagctggccgccaggaccacccagatgagcggtgaaaaggtggtgggg

SEQ ID NO: 356318 - DNA, 1856 bp, Homo Sapiens
  misc_feature (1782)..(1782): n is a, c, g, or t
  misc_feature (1790)..(1790): n is a, c, g, or t
  misc_feature (1794)..(1794): n is a, c, g, or t
  misc_feature (1800)..(1800): n is a, c, g, or t
  misc_feature (1811)..(1811): n is a, c, g, or t
ggtccggaattcccgcggatcccaaaatgaccctaactgggttgtacgccatcagggtaaagaactcgtccagactgtcaactgtgatcctggactcgctgtaggttatgatgagtttaatgctgtggacttcagtggcaccttcttcatcaacaccgaaagggacgatgactatgctggatttgtctttggctaccagtccagcagccgcttttatgttgtgatgtggaagcaagtcacccagtcctactgggacaccaaccccacgagggctcagggatactcgggcctttctgtgaaagttgtaaactccaccacagggcctggcgagcacctgcggaacgccctgtggcacacaggaaacacccctggccaggtgcgcaccctgtggcatgaccctcgtcacataggctggaaagatttcaccgcctacagatggcgtctcagccacaggccaaagacgggtttcattagagtggtgatgtatgaagggaagaaaatcatggctgactcaggacccatctatgataaaacctatgctggtggtagactagggttgtttgtcttctctcaagaaatggtgttcttctctgacctgaaatacgaatgtagagatccctaatcatcaaattgttgattgaaagactgatcataaaccaatgctggtattgcaccttctggaactatgggcttgagaaaacccccaggatcacttctccttggcttccttcttttctgtgcttgcatcagtgtggactcctagaacgtgcgacctgcctcaagaaaatgcagttttcaaaaacagactcagcattcagcctccaatgaataagacatcttccaagcatataaacaattgctttggtttccttttgaaaaagcatctacttgcttcagttgggaaggtgcccattccactctgcctttgtcacagagcagggtgctattgtgaggccatctctgagcagtggactcaaaagcattttcaggcatgtcagagaagggaggactcactagaattagcaaacaaaaccaccctgacatcctccttcaggaacacggggagcagaggccaaagcactaaggggagggcgcatacccgagacgattgtatgaagaaaatatggaggaactgttacatgttcggtactaagtcattttcaggggattgaaagactattgctggatttcatgatgctgactggcgttagctgattaacccatgtaaataggcacttaaatagaagcaggaaagggagacaaagactggcttctggacttcctccctgatccccacccttactcatcacctgcagtggccagaattagggaatcagaatcaaaccagtgtaaggcagtgctggctgccattgcctggtcacattgaaattggtggcttcattctagatgtagcttgtgcagatgtagcaggaaaataggaaaacctaccatctcagtgagcaccagctgcctcccaaaggaggggcagccgtgcttatatttttatggttacaatggcacaaaattattatcaacctaactaaaacattccttttctcttttttcctgaattatcatggagttttctaattctctcttttggaatgtagattttttttaaatgctttacgatgtaaaatatttattttttacttattctggaagatctggctgaaggattattcatggaacaggaagaagcgtaaagactatccatgtcatctttgttgagagtcttcgtgactgtaagattgtaaatacagattatttattaactctganaaaaaaanacancataanctcttccttcntaaccctttcctcaaccaaccccttttccttatacatcaaaaaat

SEQ ID NO: 356319 - DNA, 966 bp, Homo Sapiens
  misc_feature (21)..(21): n is a, c, g, or t
  misc_feature (35)..(35): n is a, c, g, or t
  misc_feature (46)..(47): n is a, c, g, or t
  misc_feature (49)..(50): n is a, c, g, or t
  misc_feature (53)..(53): n is a, c, g, or t
  misc_feature (57)..(59): n is a, c, g, or t
  misc_feature (65)..(65): n is a, c, g, or t
  misc_feature (70)..(70): n is a, c, g, or t
  misc_feature (78)..(78): n is a, c, g, or t
  misc_feature (83)..(83): n is a, c, g, or t
  misc_feature (95)..(95): n is a, c, g, or t
  misc_feature (97)..(97): n is a, c, g, or t
  misc_feature (106)..(106): n is a, c, g, or t
  misc_feature (114)..(114): n is a, c, g, or t
  misc_feature (118)..(121): n is a, c, g, or t
  misc_feature (145)..(145): n is a, c, g, or t
  misc_feature (149)..(155): n is a, c, g, or t
  misc_feature (166)..(166): n is a, c, g, or t
  misc_feature (171)..(171): n is a, c, g, or t
  misc_feature (190)..(191): n is a, c, g, or t
  misc_feature (206)..(206): n is a, c, g, or t
  misc_feature (240)..(240): n is a, c, g, or t
  misc_feature (245)..(245): n is a, c, g, or t
  misc_feature (253)..(280): n is a, c, g, or t
  misc_feature (282)..(282): n is a, c, g, or t
  misc_feature (289)..(289): n is a, c, g, or t
  misc_feature (293)..(293): n is a, c, g, or t
  misc_feature (295)..(295): n is a, c, g, or t
  misc_feature (298)..(298): n is a, c, g, or t
  misc_feature (302)..(302): n is a, c, g, or t
  misc_feature (305)..(306): n is a, c, g, or t
  misc_feature (314)..(314): n is a, c, g, or t
  misc_feature (321)..(321): n is a, c, g, or t
  misc_feature (332)..(332): n is a, c, g, or t
  misc_feature (338)..(340): n is a, c, g, or t
  misc_feature (346)..(346): n is a, c, g, or t
  misc_feature (354)..(354): n is a, c, g, or t
  misc_feature (359)..(359): n is a, c, g, or t
  misc_feature (366)..(367): n is a, c, g, or t
  misc_feature (373)..(373): n is a, c, g, or t
  misc_feature (376)..(376): n is a, c, g, or t
  misc_feature (382)..(382): n is a, c, g, or t
  misc_feature (384)..(386): n is a, c, g, or t
  misc_feature (397)..(398): n is a, c, g, or t
  misc_feature (401)..(401): n is a, c, g, or t
  misc_feature (403)..(403): n is a, c, g, or t
  misc_feature (405)..(405): n is a, c, g, or t
  misc_feature (429)..(429): n is a, c, g, or t
  misc_feature (444)..(446): n is a, c, g, or t
  misc_feature (450)..(450): n is a, c, g, or t
  misc_feature (454)..(454): n is a, c, g, or t
  misc_feature (463)..(463): n is a, c, g, or t
  misc_feature (476)..(478): n is a, c, g, or t
  misc_feature (490)..(491): n is a, c, g, or t
  misc_feature (494)..(494): n is a, c, g, or t
  misc_feature (496)..(496): n is a, c, g, or t
  misc_feature (498)..(498): n is a, c, g, or t
  misc_feature (503)..(503): n is a, c, g, or t
  misc_feature (507)..(507): n is a, c, g, or t
  misc_feature (521)..(521): n is a, c, g, or t
  misc_feature (542)..(542): n is a, c, g, or t
  misc_feature (545)..(545): n is a, c, g, or t
  misc_feature (547)..(548): n is a, c, g, or t
  misc_feature (582)..(582): n is a, c, g, or t
  misc_feature (585)..(585): n is a, c, g, or t
  misc_feature (587)..(587): n is a, c, g, or t
  misc_feature (589)..(589): n is a, c, g, or t
  misc_feature (594)..(594): n is a, c, g, or t
  misc_feature (597)..(598): n is a, c, g, or t
  misc_feature (601)..(601): n is a, c, g, or t
  misc_feature (636)..(637): n is a, c, g, or t
  misc_feature (662)..(663): n is a, c, g, or t
  misc_feature (877)..(877): n is a, c, g, or t
  misc_feature (881)..(881): n is a, c, g, or t
  misc_feature (905)..(905): n is a, c, g, or t
  misc_feature (907)..(907): n is a, c, g, or t
  misc_feature (911)..(912): n is a, c, g, or t
  misc_feature (916)..(917): n is a, c, g, or t
  misc_feature (922)..(922): n is a, c, g, or t
  misc_feature (928)..(928): n is a, c, g, or t
  misc_feature (937)..(937): n is a, c, g, or t
  misc_feature (939)..(939): n is a, c, g, or t
  misc_feature (942)..(942): n is a, c, g, or t
  misc_feature (953)..(953): n is a, c, g, or t
  misc_feature (960)..(960): n is a, c, g, or t
  misc_feature (962)..(962): n is a, c, g, or t
attgaataaagcagctttgangcttatcaggcacngcccaacaaannannccnaaannnatcggntatgngctttttngcctngggctgcggcangngctctgtcnggggagcngtgnnnntttcatagttttaattctgaagcnattnnnnnnntttttactggnatccngtgcatttgcttttaaaanngggtaacaaaaatgnatattaacaaaaatccgggacaacaattttttcnggcancaaagacnnnnnnnnnnnnnnnnnnnnnnnnnnnncntttgggnctgngntgncacnttnntgaaaatnaagactngcgtggggcgnggcatnnngccttnggcagganggggnggggganntggggngtngaggcngnnncatctatttgnnggngngncatccaatattaggtacatatttnagcatactgaggggnnnttgngggncggtgttcnaaactccattttnnngtggggggggtnnggngntnggggnggtnaaacactttcgggnactttctatggcagggttggntcngnncgtacatgagctgacattctcccgggggggcgcnggngngnggggngcnnggnggctacatatcgttcatttgttacaaaatgaaatnntccacagtgcgatgtgtctgggtcnncgtgcacagcaacatccagagctaaacaggctggaccaaccttctcaggccaggttcttctgcctctctctcctccgctctccagagtcccaactttcagctggtaaagcttcagaaagcattaacaagcaccatggttaaaggcctctttgtccctgcacgcagagatttttgcatttctttttctctttgtgttgtatgtggttgtggcttnaatnaaaccaagaaaaaagaaaagaagngntagnnctcnnctttnggacgngtggcatanangcntaggcgcatgncttcccnanttct

SEQ ID NO: 356320 - DNA, 1304 bp, Homo Sapiens
  misc_feature (645)..(656): n is a, c, g, or t
  misc_feature (808)..(826): n is a, c, g, or t
gccctttaccatgtgcttgtaatgcttctgagcttaccagctaaagttgggctctgagagcggagagagagaggcagaagaccactggcatgagaaggtttggtcaagcctggttaagcctggatgttgctgcgcacggtgcacccacacacatcgcacctgtggattatttcatttcgtaacaaaatgaacgatatgtagcagaaaggcacgtcactcacaaagggacgctttgggagaatgtcagttcatgtatgttcagaagaaattctgtcatagaaagtgccagaaagtgtttaacttgtcaaaaaacaaaaacccagcaacagaaaaatggagtttggaaaacaggacttaaaatgacattcagtatataaaatatgtacataatattggatgactaactatcaaatagatggatttgtatcaataccaaatagcttctgttttgttttgctgaaggctaaattcacagcgctatgcaattcttaattttcattaagttgttatttcagttttaaatgtaccttcagaataagcttccccaccccagtttttgttgcttgaaaatattgttgtcccggatttttgttaatattcatttttgttatccttttttaaaagtaaatgtacaggatgccagtnnnnnnnnnnnntggcttcagaattaaaactatgaaatattttacagtttttcttgtacagagtacttggctgttagcccaaggttaaaaagttcataacagattttttttggactgttttgttgggcagtgcctgataagcttcaaagctgctttattcaatnnnnnnnnnnnnnnnnnnngatatatgaatatgacaaagtattgctgagtccaacaatgttgttttaagactcttaaaatacggtacctggcaatgtttatttcataaagaattgtgaacttcttgaatctagggagggggaatgtagtgaagggatgtatcaagtggggtggtgggagggggaggcaaggttatatgcactttctcatgatttacagagaagtgaataactgcaaagtgaagttgcttcttctacttcagtcttctctcactttgatttgctagttgttatcaattaatgacaattacaaacctactgtatctctaatacagtgtgactggtcaggtatttcagttcttaggaaggaagtgccaagtttgtttttgggttcctggaacagcgctcacctttgtttagaacactggtttaaagggataatcatctctgtcacattagactatccatcatgaccagcaaatactcattttaggaaaaa

SEQ ID NO: 356321 - DNA, 658 bp, Homo Sapiens
  misc_feature (393)..(422): n is a, c, g, or t
  misc_feature (479)..(479): n is a, c, g, or t
  misc_feature (481)..(482): n is a, c, g, or t
  misc_feature (535)..(597): n is a, c, g, or t
  misc_feature (613)..(613): n is a, c, g, or t
  misc_feature (616)..(616): n is a, c, g, or t
tcaatgacacagtttaaagacctctatattcacaattatatccagagcataattttccatggccatagtttgagccacagagaaagccaatgaaatagattcctacttttatttaatgccaagagttttcactagccccaaactttttattggcagcagatatcctaggaggggtgtttgggaaatatctagctattttaatagatagatacctttttgcttgatgataagtttttgcttgctcatattttttgtcttgatcctgagaatgcaagttaaggaattaataggaggttcttagtgaccagatgttgtaatgggctatacagtccagcaggcagtatgcacctagaaatttctcccttttttaggctgggcatggtggctcacacnnnnnnnnnnnnnnnnnnnnnnnnnnnnnntgagacgggaagatggcttgaactcaggagttcgagactagcctgggcaacgtggantnntccgtctctaccaaaaaatatataaaaattagccgggcgttgtggcttgtacnnnnnnnnnnnnnnnnnnnnnnnnnnnnnnnnnnnnnnnnnnnnnnnnnnnnnnnnnnnnnnntgcagtgagccaaganttnccactgcacaccggcctgggtgacagcatgagaacctgtctc

SEQ ID NO: 356322 - DNA, 438 bp, Homo Sapiens
ggtagagacggagtctcatcacgttgcccaggctagtctctgtggctcaaactatggccatggaaaattatgctctggatataattgtgaatatagaggtctttaaactgtgtcattgacactattcctatatcacataaagttttatgttacaatttatactgcactggagaagtagctaaagggactatttgccaggaagcttctagttaaataatttctacaaatttgtaaaataggagttgtctacacttaaactggagaattctacagcataaatggcatttctattattagtaaacctggcaaatctgtgtgagctctttattaattaggatatattccatatccattctcactcatatttttagaaaaatcattcttgagtttattttttttctttaagagacaggatctcattctgttgcccagtgtgga

SEQ ID NO: 356323 - DNA, 1728 bp, Homo Sapiens
ttcaggatggataaactcctcttaggaatggggcaacaaacagctgcagacaaaaatatactctgtaacaacccaacatgctagaagattttccagtttaaaagacacaaaatcctaaatgtcaaaactgcagaggaactcaagaggccactgtccaaagtctgtcacagtcctccatatggcaaagatgaagaaaattggcaatctttttaggggtaccaaggatctcagtttgtacggtctttataaatgcagagcaagatgtggctttcctgcccccatttcacctcaaggcatcttcagcaaccccacatggcttccctctgtgcgcatgaaataacttgaggccagggtctctcagctttaaagccttggaatcctatgcattgtttgtttgtgtgtagatgtgcagtttgaggggtagcttctctaaggtgtcaaactccacaaaagttcagaatcatgtcactggatcctgagtccatctccacagaccagggtgccgctcaggtcagttgctgtggtaactgcagcagatggtccctttagcgatggagtccaaggacatcatggccaagacccagagttttatatcaactgaggaaagtgaagaccagccagagaggctgcagtttagggaagccagaggctcctcccccaccacgatgccaggaaggactatccccagggtgacggaaagaaagcactggactccagcagtatgtccagctgattcaggtgtgctaggttcccagcagaggagggtaagggaggagatccaggggccctggcttagtcatcgtatctggtacacctttctcccccggagaaaattcttgcaaaaaggagaggatcctacacagaccaaaaatgctggtgtcagggcttttacaaagtacctctggtgctgtagaacctgtagcaaggtgctcttggcaggcacccggtatagttctgccctgtcctcatcctcaaagtagaccttgatggcctggagtaaagcctcattctgattcctctccttcttttctttcaagttggctttcctcacatccctctgttcaattcgcttcagcttgtctgctttagccctcatttccagaagcttcttctctttggcatctatttgcagtccctcatcacaccagttcacggcctcggcaaagtgtttcagttccagatggcataaggcacctcttattattgctttgaggtggcagggttttagctttctggcagctgtcacatcattgagagcagaacgaaaattgcccagatagtactgtgctgctgcccggttggtataaaggacagcattcaaatcaggatctgcacatttcttctttaagccttcagtgtatgaaattacagctttcttgtagtctttttctttaaagtaatcattgccctcatctttataggtcttggcctgttcttctggagaacgctcctcatcaaaaataattgactggagacaagccaagtcaggattctccctgggatcaatttctgatggcgctctcgtcataaatagggggaccttttcaaattccttctcccactggtcctcatgaaagccgccacggtaaggctggctctggaacttttccaggaacgagtccatgacgtcgtctgaggtgggatcctgcccaggttgttccatagctgatgccctgccttccagcccgggtcccagcgatcccatacatcccagaccagtaccagcct

SEQ ID NO: 356324 - DNA, 953 bp, Homo Sapiens
agcgggcttcacggcgctgggacccgggctggaaggcaggcatcagctatggaacaacctgggcaggatcccacctcagacgacgtcatggactcgttcctggaaaagttccagagccagccttaccgtggcggctttcatgaggaccagtgggagaaggaatttgaaaaggtccccctatttatgacgagagcgccatcagaaattgatcccagggagaatcctgacttggcttgtctccagtcaattatttttgatgaggagcgttctccagaagaacaggccaagacatataaagatgagggcaatgattactttaaagaaaaagactacaagaaagctgtaatttcatacactgaaggcttaaagaagaaatgtgcagatcctgatttgaatgctgtcctttataccaaccgggcagcagcacagtactatctgggcaattttcgttctgctctcaatgatgtgacagctgccagaaagctaaaaccctgccacctcaaagcaataataagaggtgccttatgccatctggaactgaaacactttgccgaggccgtgaactggtgtgatgagggactgcaaatagatgccaaagagaagaagcttctggaaatgagggctaaagcagacaagctgaagcgaaattgaaccagagggatgtgagggaaagccaacttgaaagaaaagaacgagaggaatcacgaatgaggctttactccaggccatcaagggctaggaatatcaggctctcagaagctgctgtgacgattgaagatttcggctccagaaggtctaaggggagcctttcgggggttggctcagacctggggaacccccactggaggcccgggtgagtctatattgcccgggcaggtttgcttggcctgtggccctttctgtgcccgagttttccccgtcggaattaacgctgggtttccatgggagccccg

SEQ ID NO: 356325 - DNA, 2659 bp, Homo Sapiens
  misc_feature (22)..(22): n is a, c, g, or t
  misc_feature (36)..(36): n is a, c, g, or t
  misc_feature (184)..(184): n is a, c, g, or t
  misc_feature (573)..(582): n is a, c, g, or t
  misc_feature (739)..(786): n is a, c, g, or t
cggcgcggctccatatgtttcntctctctatataanaaggggtgatcttatgtgtagagagaatatagtagtgtgtttgtgtgtgtttgccacagggcgcgatactcccctcgggtggtgggagtgtatctcttcacagcacacgtcgtgtgtatagtattataatagaggtgtgtgggcccanaataaagtcggagaacgaatgtctgtgtgtacggcgccccgccggtttgtttctctcgcacgtggggcgaaatatatgtttatttgtccgccaagggcgacacaaatggtgttcttatattcctccccccgggcgaatttcaaaggtttattccaaacccgcgtttggtgggggggcgtcttcccacgttccgggcagaaaatcgcttttatttaatatttacaccacctctatttcccatatgaatgggccaacggccgggggggcttaaatttttatattcgaagcctccccttgggcacccccgtttgataaaatcccggtaatgaccctccgaaactcccatcgggaatttgtttcaaaaaagcttgggtttcccccgggggggnnnnnnnnnngggggaaatcccaagcccttttttcatggcccaggatttcttttagggaaccagcttatggcccaagtttcccttttccttttggggcgccccgccgccccaacagaaaggtgtttagaaaaatgttttgagggggcggaggcggccgaccaaggcnnnnnnnnnnnnnnnnnnnnnnnnnnnnnnnnnnnnnnnnnnnnnnnncctggttgtggtttggttgtttggttgttcctgaatctgctttatttctctgcataaggaaccctgaacaggcaattcaaattaaaacaaaataaatatatgaatattcatgtaaaactgtcctttctaatgaacaattatacacaatgtacaatttcatgttcactgggtggatttacaaaaatgtaccattcccaactaaaaatgcaccaaaatggtttcatgcaaacttatcaaaagtgaccaaaaatatggagggaaaaacctgactgagagcacttcgtttttgttgtttttgtacaatcacagaaaaataaaaacatctaatttctttgttacatttagagtaactaaatgtggccattgtttataatgttggtttatgttcttataacatctatgtagttaccataaaagtatatcaacatcaaatcagaagtgagcattattgagggagagaagggagggtgagagcacccgcacggtcagtagtcagtgtcggagccctcggcgttgtccacgtttctcgagagcatgtagttgtccatgtcgattgagcggcagttgttgatggcatagcgcaggcgctcggccatgaccagctggctggagtacgggggcagcctcagctggaagaagcaggtctgtgaggtaggcagactgtcgtaaggcctatcaaccttcatgatttgaaatctctgagaaatgtcagcagtgttggctggtagtcgagatcttcctgacacaaacctcatgaaaagcacccgctcctcattggagaactcttccagcgtgtgccagaaccactgcaccagctgatgctgctcatccacctcacggtaccgcaccactttcttcaagacttccacagagatctcgggcatcccacacaccatctgctccagttgttttgctgtgaggagggacagcagcggcacaggaacaatccaggacatcccttctcggactgcagccacctgtctgtccatctcatgaagtcgatattcaatggccctctccacatattccttcctgttggaaaatgtgagtgggatactatttccaccagggattataggaaccattttgccatcagcactctggccaacaaaagaatcaagaggaatcatctcatggaaactctcctcggtaatcccactgtcttcaatgtgaagaatgctgttgagagtctgcacgtagagcagatccacctcctccaggtcctctagggtgagtgggacacagcacagctgcttccacaccagaggggccaagtggaggtccagaggcttctttgtgcgaatggcaacccccattaaaattcctaaaaacttaaactgcattaagtgttcatcgaggcaggcagaagggttaaaaaggaacctgtccctattgtaacccacttctgcggtggcattgggagagggtataagaaggtcaacaataccagtttcaagttcctggcacatctctgtgatggtgtcatcaaacactcctccagcatcatcagccccttctccaaccagcttaaccttccacgctcgggaaggcaggcggaggtctgaagcattcagcttaactacttgtctcgctatttggacaaaaataggcttacacttccgtcctctggttgatatcctctttacagttatctgaggtccatagtttttgccttgaaccatggtttttcctatggagcgcaccattggcagagtgtagactcttggggctaacaaaggccgaagttgtccctgtacaatgccccaagttccagcattataatgggatgtgctgttctggttgttggggctaaggttcagcagtctccaggatgagtacatgaggtcagagaagtggtagagcagccggagcc

SEQ ID NO: 356326 - DNA, 1685 bp, Homo Sapiens
  misc_feature (72)..(82): n is a, c, g, or t
  misc_feature (556)..(556): n is a, c, g, or t
  misc_feature (1014)..(1015): n is a, c, g, or t
  misc_feature (1017)..(1021): n is a, c, g, or t
  misc_feature (1024)..(1045): n is a, c, g, or t
agtaaatgaggtttgggggattttaaattcgggccaaggaacccttataaaattcacagttcttgagggtcnnnnnnnnnnntctttagggagcagcccatggaaggctccttgccttttgaccagggccaccttttccaaggctacctttgggccctaagctgttaaaaaagctcttctgccaacggaactgcaggcctagggaaacatgctcagtcaagcacatgtggtgacccatgttcaagatgcagtctgatgccaggtatatggttagggaaaaagaaagaagggtaaactgagctagcccctggggcggaggtactcctgcagggctggaggaacaggttcttagaagatgattcaccttggaggaagctggggaaagtggttagggagggagaggaggaagactgagaaatctctgcatccccagaactcagcaacccagctcttttatcatgaggagaggtagccatgcttgactcatggaacaggtggaggaaaggggttgcaggttgaccagcattcttcaatctagtttaccaccagcttggcntagaattttattgaacgcaacttgctagttatgacagagaggaccagggtgagaactaatgctcaagagagcaagattctgtaatcctcttgccctctcacatcacaaattctgatatgccaaacatttggcccaatgagaatgactgatagacttgctgatgtgcatgtggggggatgaggtgtgtatatgcctttctcctgactggccattcagtgttcaggctgtcattcaaattggataggagaaagttggtgaggaaggaatggagagagcaggatccctggactccctggtccccaaactccttgactgtcacttgtaattgtatataatttttgtgtttcttgctccatttcctcatgctgtcatccttaaagtccatctgggaaggggaaaatgctgaacaccattgtatagtttcttcaactgtcccagccatgttgtacatagatatnncnnnnnatnnnnnnnnnnnnnnnnnnnnnnattttgtacgttttcttcatctccgatcttctcaaattctgtactttttttcttttctgtctgagctgccttctctatcattcagcttgagtcctcaagactactggtcacaatgagtctgatttttaggaaggaataggaggagcagggaaatcagaaaaactgttggtctcactctgtctctctacctggtcatcttcaaggctaagaaaacaaacaagctacattctgtatttgccagtttccacagcatgaagtacatagcttccttagcaaggagtggtcattccaaaatccaaatgcaaattgctttgattaaacctagattattaaatccattcagaacagcatgtgtgtggtctggttctggcctccacacagtcaccacctcatctctgtgctacctcagtctttgcaagtagctgtggccatgcctctgaaacagcctgctctgagccaggcagcttacccacctggtaacctccagttattttgatcttatctaaagaattatttttctatgtttgttatccatggatatcccagaaaggcagataacgttgtttcgtggataggaaaagactgacattctattgtttgatttttttgcagctcccttatggataggactgaacatcca

SEQ ID NO: 356327 - DNA, 441 bp, Homo Sapiens
  misc_feature (27)..(27): n is a, c, g, or t
  misc_feature (47)..(47): n is a, c, g, or t
  misc_feature (58)..(58): n is a, c, g, or t
  misc_feature (96)..(96): n is a, c, g, or t
  misc_feature (103)..(103): n is a, c, g, or t
  misc_feature (110)..(110): n is a, c, g, or t
  misc_feature (155)..(155): n is a, c, g, or t
aaaaactaaagcccctaaaagagctangaatcctgtaaaccctcctngcccctcctcnacaaccactaaatcctgaaaatgcccaaaacatttggncccaatnagaaatnaactgataagacttgcctgaatgtgccatgtggggggaatgaagntgtgtaatatgccctttccccctgactggcccattcagtgttcaggctgtcattcaaattggataggagaaagttggtgaggaaggaatggagagagcaggatccctggactccctggtccccaaactccttgactgtcacttgtaattgtatataatttttgtgtttcttgctccatttcctcatgctgtcatccttaaagtccatctgggaaggggaaaatgctgaacaccattgtatagtttcttcaactgtcccagccatgttgtacatagatatgtcatgg

SEQ ID NO: 356328 - DNA, 535 bp, Homo Sapiens
gcggccgcctttgcccgaagcccggggacgaaccgacggaccgaccgcctggcgcacggacgcgggcgctcgctttgtgttcggggctagcgtcggcgaggcttgagcttgcagcgcgcggcttccctgctttctcgcggccaccccgtgcggtgtccctgagctcctgctccccgccgggctgctccgagcaacggtgcttcggagctccaaactcgggctgccggggcaagtgtcttcatgaacccagaggatgtccgggaagcactacaagggtcctgaagtcagttgttgcatcaaatacttcatatttggcttcaatgtcatattttggtttttgggaataacatttcttggaattggactgtgggcatggaatgaaaaaggagttctgtccaacatctcttccatcaccgatctcggcggctttgacccagtttggctcttccttgtggggggaggaaggatgttcattttgggatttgcaaggtgcattggagcgctacgggaaaacactctccttctcaacgttttt

SEQ ID NO: 356329 - DNA, 672 bp, Homo Sapiens
agcgagcggcgtctccaccagcatctgccgcggccgcctttgcccgaagcccggggacgaaccgacggaccgaccgcctggcgcacggacgcgggcgctcgctttgtgttcggggctagcgtcggcgaggcttgagcttgcagcgcgcggcttccctgctttctcgcggccaccccggctccggcggcctcggcgcgcgaggggctggaggtgcgggagccgctctccgccggtcggtccccgcgcggctgagcccaggccgccagcgccgcggccccgtgcggtgtccctgagctcctgctccccgccgggctgctccgagcaacggtgcttcggagctccaaactcgggctgccggggcaagtgtcttcatgaacccagaggatgtccgggaagcactacaagggtcctgaagtcagttgttgcatcaaatacttcatatttggcttcaatgtcatattttggtttttgggaataacatttcttggaattggactgtgggcatggaatgaaaaaggagttctgtccaacatctcttccatcaccgatctcggcggctttgacccagtttggctcttccttgtggtgggaggagtgatgtacattatgggatttgcagggtgcattggagcgctacaggataacactctccttctcaagttattatctgtg

SEQ ID NO: 356330 - DNA, 2481 bp, Homo Sapiens
  misc_feature (1151)..(1197): n is a, c, g, or t
  misc_feature (1561)..(1562): n is a, c, g, or t
  misc_feature (1704)..(1704): n is a, c, g, or t
  misc_feature (1836)..(1836): n is a, c, g, or t
  misc_feature (1841)..(1841): n is a, c, g, or t
ccagaggtgcatttttcttatttccatatagtaaagttgagcttttacagtgcataatgtgacatttggaatgcttatcaactgcatgtaaacattaataacctgcactttttgtcttaaggtttgttgagctgttttgttcactgtactttaactgtgatatggaaaagactgcattctctgtgctgttactaattaggaaagagaattgctttgattttgtctcttgtttactatagcttcttaaagttaagccttgtactacaggttgttggagtactcctagatcactgtttcatagtagccagcaataagtagtgcaagtcaacaaaaacacagcaaacttaggcaaagtgtcctttctttgagatgcgagttctttcatgaggttttctttagggccagagttacctaaagtgaagcctttcttatctatagacttcagattctgcttggaatcccaccggctcaagaagcacatgtattgtgcaattaattgtctttacactaaaacagtttaatacaatctaactacgattttgaaaccagtgtctgatttatggtcagtgggtttaaaaagaaatccacatgcagatcttttaagacttaaaaagtgatcatagaaaagactaagtgactgtaaagatgctctttttttaagcatctcactttacctccccaagcaccctcccaaaccttgtcttccctcttctgttgcatcctttccctacccttccctcccaggtgctcggtactttacctagtttctatatatcagtgttttatgttggaatttttccttgtttttattttactagttggtaaaccctgtttatgctgaaacaaataaggaaatggtatatttgaccatatgtgttattcatagaagacagtatgatcaaatgtgccaaaaacaagcaaacaaaacttaattcctgagaagtatgccttatttttattgatctgctttgtcttacaattaaggtccaagagcttggttaaactgtattatttgcctaagtataaaagaaaacttgaactgcattgcaatattgacgttctttaaaatgagagacactgtcaagtaatttaatccagagatcagccaccagatttgaaatgcttatgtatgtgtgtgtgtttggagttgnnnnnnnnnnnnnnnnnnnnnnnnnnnnnnnnnnnnnnnnnnnnnnngtgcctcctatttatcatgctgatgttagaagcagcagtcatccagccacagagggagctaaagttaactaaccagaactgtagaaatcattatacatgcctttgacaacaaaggaagttcataagaaaagccatgtcggcttttcctctactagatacagattggaggtagatgaatatttgccaaatggaaaaaaagacaatgctagtcagaaaagacaaactgttttccagcttctcaaaaagccatggagagtagaaaccaaaaccaacagggaaataaaaaaccttgaaagtctcactttctagttgacccatgcagggggtgaaatttgattccaagcggaaagtatattatgttttnncaggccttaacatctagagagagtggataacttccaatttgatttttcaggtaatagagaaagctgctagtaattttaacccctgcctaaagaagacatatacttcatttgggagcaaatacttattgccttgaaaagtagnactgtaatagcctatgataattagttgtagaataacctttatccctttcaaactatgcaaattattaaataagtgtaaattaggattcaattaaagatagttgattatattgcaatcagatggtatttacanacttnactggagtatatacaaatatattagtctaagttttgtatgctaacagaaagatataatttagctacctattctaaaaatggtgaatattattaatattgtataataggagtgggaagactgcctccttttttgaagagagagattaaggattttatataattgtttttcatcaaattttaatatttttgtcaaatttttaggtatttaattatgtaaaacagtttgctttgtactggcatacagaaaatagggtattgattttaaactttttgaagccaagtgatcaagtacatttgtaataaaagtcaatggatctatatcagttgtactcactgttttcatttcttattaatatagggatgctgtactttttcttaaggaaaactgaattaaatttgggtggaagggagggggaaaagataaatccgttgataatgagaatctgggtgggtatcatggcccaagcactttatatcattttttaagtcagttaagatttgatatattttaaaagatactatgtcaactttttttcttcctattttcttatgtaacttgacgtttggggggattatctcattcatttttgtttgtgtgcttttaacattttgtgttttggccctgtgtaaaagtatggta

SEQ ID NO: 356331 - DNA, 2723 bp, Homo Sapiens
  misc_feature (2249)..(2504): n is a, c, g, or t
  misc_feature (2542)..(2542): n is a, c, g, or t
taaatgtgagggagaggtggatttaaagaggccagaccttaaccaaagatgctgagatacagcattctgtcccccctgccctagaaactccataaatgctgtcacaaccctatcatcgctgatgctttctgcatgtcagcagtccaggaggatgctttttgtctctctttgcctccactttacaaaagataatatgatagaggcaacgtttataacagtcacatttaattataatgtacatcaaaggcagaatttcagaatggtttcttaaatttccttgggaaccgtttccacatatcagttatagacaaaggccatgggactatgctaaaccaataaaaccttattagcaaatctttagattctgacttagccagagcatctgagtgttcaagtacagttttacagtggctaaggttgtctcttgatcttttttctccgttgtgtgatcacagatgctatttctgttttattggtgattatacgagacttctaatacataaatgaacgggtattggtgcctctttattttaaaaaatttgaagaaaagagccacctcatattcatagggtgtgtattttttgagtgtgagcatttaattgaaaataagaaagctatgaagtaaatgttaacttctctgtagcagctaatgcatagagacactaaaacccacaccacattttgtgggaaatgaggatcctgatcctcttttgtcctctccaggtagtctcgcaggttatgcagcttaagttcagtcttctttatgctgcgattgatttccacctcagtggcttagcctttgggacagtggatactgcaacagccaagaactcttggttatccgcacaagctgctggtagactacattagccctctggttttccagctcaacctctgataaagtggactgagagccacgctgctcagtctgtttcgtcagccgactcaggttattttcagggaaggcatggaggcatagtttggttagtttcatcactaggatgtataaggtgacgacacaaaccaaatacctttctttcatcacttaactatacgtactttatctctggtaacactagaatgctgtggtcttgagggaatgttagcaaggaacacatagaagatttggtgtttcataagcctgtctaggtgtggcaggttttgtgtggtacactgatgtttaccataagcaggtacaagcttcatgaaccgttcttaatgaactataattgaatagataccaaaaatagaatgacaaatgtattttaatagcagatgaggcagttttaggatgaattttccactgttgattttacttcaagacatagcaagagaaacaaaattttgttttcaagacatttccactgcagtttcaagctgtagtgggcatatgcttcatttacttccaaagaggcaaaagcagctggaattggcttacagcacatgctttgtttcatgttatgggtgaggacctacatacactcttactttagcagtcacttaaccttctccagcaaggcagttgtgcggttcactaagaattagtgcctgatctttgttttgggaaggggccggaatgaactgtgttggggcgggaagggaagcaaaagaaaatgggagtgtgactgactgtgcatgtgtctgaagttcaccattgcccccacctgcacctagcaaggaacaggtgtttgatgtattttgctcatgactgcagtatgcatgtatttttttccttctctgtgttttctaaacttacactaaaggattcatcaaatcatcttgttcagatggctcaggattgtatttattttgcttaccccgtgctcttgggttctatagtatttctataattatgtaacgagaatagtgttgcactgtaatctatcatatagagctatatgtatggaaaattttgatcaattttttaagaaatgtatcctgtttgcaaaggcacagtaaagttgcatcttatagactataggcaataaagctaacaataaaccttatttaacacaaaccacatccatatcctctgttcatttgattttggaaaaagtagcatatccagtagtttcagggaattcattttaactttaagaattctgatatatttaatttataaatttcggactgatataatagagttttggaaaactataagaaatgctttgttaatgtgtgtattcctatgtaaaacacatggcttttcctgtgtatatttttaaaaattaaagaaatgcacatttaannnnnnnnnnnnnnnnnnnnnnnnnnnnnnnnnnnnnnnnnnnnnnnnnnnnnnnnnnnnnnnnnnnnnnnnnnnnnnnnnnnnnnnnnnnnnnnnnnnnnnnnnnnnnnnnnnnnnnnnnnnnnnnnnnnnnnnnnnnnnnnnnnnnnnnnnnnnnnnnnnnnnnnnnnnnnnnnnnnnnnnnnnnnnnnnnnnnnnnnnnnnnnnnnnnnnnnnnnnnnnnnnnnnnnnnnnnnnnnnnnnnnnnnnnnnnnnncgcgtaaatttttgtaaatagctcatttttaaccatangccgaatcgcaaaatcccttataatcaaagaatagaccggataaggtgagtgttgtccaacttggacatgaagtcactattatgaaacgtgactcacgtcaaatgccgggtcaagtgcctaaacactaatcgaacctaatgagcccccattaaacttgacggaaagcgcaacgtggagaat

SEQ ID NO: 356332 - DNA, 450 bp, Homo Sapiens
tgccttacccccggcccctgggtcccaatagtattccctaaaattatgtaacgagaaatagtgttgccacctgtaaccctatccatatagagcctatatgtatggaaaattttgatcaattttttaagaaatgtatccctgtttgcaaaggccacagtaaagttgccatccttatagactataggcaataaagctaacaataaaccttatttaacacaaaccacatcccatatcctctgttcatttgattttggaaaaagtagcatatccagtagtttcagggaattcattttaactttaagaattctgatatatttaatttataaatttcggactgatataatagagttttggaaaactataagaaatgctttgttaatgtgtgtattcctatgtaaaacacatggcttttcctgtgtatatttttaaaaattaaagaaatgcacattt

SEQ ID NO: 356333 - DNA, 1065 bp, Homo Sapiens
  misc_feature (17)..(17): n is a, c, g, or t
  misc_feature (23)..(23): n is a, c, g, or t
  misc_feature (38)..(38): n is a, c, g, or t
  misc_feature (41)..(41): n is a, c, g, or t
  misc_feature (46)..(46): n is a, c, g, or t
  misc_feature (55)..(55): n is a, c, g, or t
  misc_feature (62)..(62): n is a, c, g, or t
  misc_feature (69)..(70): n is a, c, g, or t
  misc_feature (76)..(76): n is a, c, g, or t
  misc_feature (84)..(85): n is a, c, g, or t
  misc_feature (215)..(215): n is a, c, g, or t
  misc_feature (1027)..(1027): n is a, c, g, or t
tccccagagcactgggncaaagntgcccactcccaganttnttctncgagtgatntccattnatctacnncaccanttcaccanngcagcagcagcagagccgtggggtgagctgcagcctccatcctgtccaggccctgctccagcccctcacagccaccctcgcctgatgaggagaagccatcctggtcaagtgacggctccagtcctgcctntagccccagacaacagtgggaacccagaaggcccggaatctgttccccggagggtttcaggtgaccacagacacccagaaggagcctgaccgggcctcttgcactgactgagacgactcctcaggggcagtattgcctcctgtgaggggagggaaaaaggacggcataggtaattggtttgaagtccgacttaaaacgatgggaacagtggtgggaattaggggtaatgaaaggtggtcatctctgaaatctagacccctggactgcttgccaaaagccgtctcctcacacaggtaccctggcttcggcaaccacaggagattgaagggtggagtagaaaaacacaaggagtcattgttaaaggccccatagatgacaggcccaggtgctttagttgggcaggacctgggagtcagtgaggaactcgccccgagaacagagaaaaggtaggcaaggagaggagatgctgatggcatctggaaacaagtcttagagatggtctgcacccagagggaataaggggagacatccccaactggaatgtgtcctggagcagctgcctgggaagaagtcctcgagtttcctcaaggtgggggacagaggtcaaggatgaggccgagctaaatggaagggcgacagtgaggcaggtgggctttaaggctgtggattcgtcatgctggcggctgccagcagcactttcaggttccttggggcttgtaggggatggggacttgtcagtggaaagacgggagggatgatgtttttggacttcagtacgggtgtgatgtcccaggaagtgggtgtggctcccncatcctgtataaataagcagtaaagctgctcatggctg

SEQ ID NO: 356334 - DNA, 1259 bp, Homo Sapiens
  misc_feature (607)..(625): n is a, c, g, or t
tacagacctttacaacataaaatcttcttcaacccatttttcccaggacccctgtgataggccagattccacccacacccaaggagacttttaggatactcaagattactctttatccgagacccgctagtcccctatctgaaagtgcactgacctggggggttctggtttagcttcttagggggatatggctcctctcctgaccaccaaggctctctcttaactcacctttgcgtagaatgatgtgatgtgaggtacacttaaaaattgtgtgttccccagcccctccctctctattggtgggatttttaatgagaccctaagatgagtagcctgagtaaataaaaaatatattatcgttccccccactgggctttggctgaaaaagcactccgcctccctgatcagatatggctttattaatgagccactatacgctttcacaggcattgagttcagttccctgagacttccgtgcaagaggcctcctggagtcggggctcctttctcccatccctgggaattgggacttttgacagaaatgagaaggcttgttctagggagagagaccctgccttctgcagtatactctgaaacattgaagtgnnnnnnnnnnnnnnnnnnngagctgaggtttgtgaattggtggtgttaaataacaattaggtcaataattccctttatgaaaatccttttaacaaattacatccattggtaattagcgcctatgagaatctcggcctagggaagccctgatgaaaagtggatccagacatagacctggtgtggggagctgagtctctcacttttcaaggaaaacctctttccctgctcaactccacttgggagagggtaaagccaaggccctgggtcaatatctgcaactcctgttgccttgaccttgaccaagggcactttgcctttcaccccctgagcctccattttttcccccaggtggctttctgggttactgaggaggctgtgggttttcaggatgtgttgctggctcggcagcttcaggcatacttggcactaagagcataaataaaagatgagcgctttcctctgctcgccccaaggcttccccaaaagagctggtgccttcttctcttgcctgtcttcctgtccaagccccgagatggtgcccaggcatgttacagagagaagtagcttgagaggggtgagaaactgtctgaaataattccatccttccctggagacttggcgtgaattttatctaatcaccatggcaacagaga

SEQ ID NO: 356335 - DNA, 1525 bp, Homo Sapiens
  misc_feature (1019)..(1056): n is a, c, g, or t
ccaaaaggggtggggatcacgggcaggaagccgcacggcgtggcctcagggaggatgttatagcgagggtgagaaaggggcaaaacaatcttttaaggaaacccaaatgaaaaaataataaggttctaaaaggaaataaagtttgccaagttgcagggaggggaatccaaaatatgagccatcgcagactattttcaaaggtttaataccctttaaagtagcatcaacaaatattaacttcttagagataaatctgacaaaacatgtgaaagacctatacaacaaaaaatatgaaattttgctgagagaaattaaagaaggcctaaagagagatcacttctatcatagattgaaagactcaacattgttaagatgtaaattttcccgttaatctacacattcacagcaatcccaaccacaaatccagcagaatttttgggagaaactgacaaactgatgctaaaactcatattgaaataaaaagggcctagaatagccaaaacaactcttgaaaataaagttgaaggattaacactacctgatttcaagaattattataaagtttatgtaatcaaaagaggtattggcataaagcagacaaacagatcaatgcaacagaatataaactccaggtggggaaacccccacatatatggacaactgacttttgacaaagtcccaaaggcactgcagtgtgaagaaagatagccttttcaactactggtgcttgaaaataataaactcagatgtatacctccatatcatatataaaaatttacataaatcatcagtataaatataaaccctgaaactatgaaacttcctgaagaaaatgcagaaaaaatatttaaaagcataaagaacaaatggataaactgaacttcattgaaatgaaaaacttctcttcaaaactcactgttataaaaaagacaagtcaaagagcaagaaaaaatctttgcaaacataaatatgaaaaagatttgtatccagaataaaggatattaatagtatcagtaacnnnnnnnnnnnnnnnnnnnnnnnnnnnnnnnnnnnnnnttcaacggttgaacaaagaagatacatggatggcaataagctcatgaaaagatgctcaatgtcattagagaaatgcaaattgtaaccataatgaggaatcagtacacacctattagaaggtctaaaattaaaaagactaaccatactaagtgttggtgaggatatggaggaactgaaacttccatacactgctggtaggaatgttgaacaatataaccactttggaaaagtttggcagtttcttaaaaagttaaaacatacaacctatgatatgatcagccatttcatttgcaggcatttacccagaagcaaaggaatatacatccatataaagacatttatgtgatagccagacatagtggcacacatctatattcctacctacttgggaggctgaggtaggaggactacatgagttcaggagctcaaagccaccaaatgtccatcaactaataaatggattaggcag

SEQ ID NO: 356336 - DNA, 694 bp, Homo Sapiens
  misc_feature (10)..(10): n is a, c, g, or t
  misc_feature (24)..(24): n is a, c, g, or t
  misc_feature (33)..(33): n is a, c, g, or t
  misc_feature (48)..(48): n is a, c, g, or t
  misc_feature (60)..(60): n is a, c, g, or t
  misc_feature (124)..(125): n is a, c, g, or t
  misc_feature (154)..(154): n is a, c, g, or t
acaaaaacantgttaaattctcgntcaccaagngctacaggcacgtcncggtgggcacgnaaaccccatcctcttgttggggtggctaagcccgtggcagagggcacctttaggccacccaccnntgggtcgtgagcccaggaccccacagtanggcctcatcgaaaggctctttagcccctggtggccagagactcctgccctctccaagtctgttctcccctcttcctgggctcgtggctacccagcctgaactccatttccaatactcctttgccaccaggtatggctgtgtgattaaagtcagagaagtgagttgggccacttttgggcctggattttaggacttaggtgtggcccttccacacccctttcccagtccataggctgcacctcacgctgtcccctgccagcctgggacaggcttcttgccaggagaaagaaacttgctgggaaccacagtgcaggatgggcactccgtgatggccccagccagcctcctccgcggccctgcctgccctgtcttgtgactgttttacgtctggatggcggggatgtggccagcttgagtgagatgtgctgtaggtgtgacacgaagctggatttggaaaacagcatgcaaaataatgcaatcaagctttatgttgattacatcttaaatcacattgtggatgttaaataaaaatatgagaag

SEQ ID NO: 356337 - DNA, 888 bp, Homo Sapiens
agatacaagcagaagaaggagttggagcataggttgtctgcaatgaaatctgctgtggaaagtggtcaagcagatgatgagcgtgttcgtgaatattatcttcttcaccttcagaggtggattgatatcagcttagaagagattgagagcattgaccaggaaataaagatcctgagagaaagagactcttcaagagaggcatcaacttctaactcatctcgccaggagaggcctccagtgaaacccttcattctcactcggaacatggctcaagccaaagtatttggagctggttatccaagtctgccaactatgacggtgagtgactggtatgagcaacatcggaaatatggagcattaccggatcagggaatagccaaggcagcaccagaggaattcagaaaagcagctcagcaacaggaagaacaagaagaaaaggaggaagaggatgatgaacaaacactccacagagcccgggagtgggatgactggaaggacacccatcctaggggctatgggaaccgacagaacatgggctgatcttcccacaacaccacaggactgcagggtgcacaactcccctgccaaggaaaaccatgcagtcctcccctccctggtctcctgcttcagctctgtacaacgagggcaaagatgctaaatcttgctttgcattcagtaaagtgtcaagtgattaagtgtgtatttgtaccctagatgatatgaaccagcagtcttgttttggcatcatcctcatcatgttgtattccagcttcttaagtggaaggaaaagagtgctgagaaatggctctgtataatctatggctatccgaattctctgaaaaaataataaaagtcccctctattatatgagcctgtacagaaaaaaaa

SEQ ID NO: 356338 - DNA, 1155 bp, Homo Sapiens
  misc_feature (47)..(83): n is a, c, g, or t
  misc_feature (1055)..(1055): n is a, c, g, or t
  misc_feature (1073)..(1074): n is a, c, g, or t
  misc_feature (1090)..(1090): n is a, c, g, or t
agatgtatagatcactataggggaacggagctcacgcggggcggcgnnnnnnnnnnnnnnnnnnnnnnnnnnnnnnnnnnnnnatcaggccaaatcggccgagctcgaattcgtcgagagcggctctctccccaagatggctgctgaggacgagttacagctgccgcggctccccgagctgttcgaaactggtagacagttactggacgaagtagaagtggcgactgaacccgccggttcccggatagtccaggagaaggtgttcaagggcttggacctccttgagaaggctgccgaaatgttatcgcagctcgacttgttcagccgaaatgaagatttggaagagattgcttccaccgacctgaagtaccttttggtgccagcgtttcaaggagccctcaccatgaaacaagtcaaccccagcaagcgtctagatcatttgcagcgggctcgagaacactttataaactacttaactcagtgccattgctatcatgtggcagagtttgagctgcccaaaaccatgaacaactctgctgaaaatcacactgccaattcctccatggcttatcctagtctcgttgctatggcatctcaaagacaggctaaaatacagagatacaagcagaagaaggagttggagcataggttgtctgcaatgaaatctgctgtggaaagtggtcaagcagatgatgagcgtgttcgtgaatattatcttcttcaccttcagaggtggattgatatcagcttagaagagattgagagcattgaccaggaaataaagatcctgagagaaagagactcttcaagagaggcatcaacttctaactcatctcgccaggagaggcctccagtgaaacccttcattctcactcggaacatggctcaagccaaagtatttggagctggttatccaagtctgccaactatgacggtgagtgactggtatgagcaacatcggaaatatggagcattaccggatcagggaatagccaaggcagcaccaagaggaattcagaaaagcagcttcagcaacgggaagaaacagaagaaanaggagagaaagaggatgnnatgacaacactcaccnaaaaccccgggaaatgggggaattgactgggaagggaccaccccatcccttaggggggttaatgg

SEQ ID NO: 356339 - DNA, 882 bp, Homo Sapiens
  misc_feature (728)..(728): n is a, c, g, or t
  misc_feature (799)..(799): n is a, c, g, or t
gggaagccgcttcatgtcagtatctttgagtcgaaggacggctgtcaccaatgaggttgaagcttggtatgtcagaaggcaacggtgctgaaattgggttcatgggcgggtacgtgggcttggtggcaatctccaggagcttctgcttggctcttcgctccgcctcgcgtgcttcctgcaggtcctgcttcagctgatctgcctctttggccctcctctctgactcctcagccatcttcagtgccagcacctcggcttccagcaccttctgctccatcaggcgcttctcctcctccgtgcgaatcgctgtggccttgatgcgctgcatttcctgctcagcctctgcggccttctgggccagaagttttgcctcctcctcggtgatctgggccttttcagccaacaggtcagctgtctcctcagaccgcatcagtgcttcgttggccattgttgcttcttctttcatctgcagcagcctcctctccaactcatccctcgtgcgttcagcctcctccctcatctgcttctctcgagcgaggcgctgccgctccatctgctttctagccttctcctccctggcctgggctttcatctgctgaacttccaaagaatcggctttccttctcctcataaatagatcatggttcccgatacatagctggagaatcagcttattaacacgaagctttgaggagttaaacttgaagacatcaattttcttatccagngggttaatagtaaaactccttgcactgtacgagatgtttcggaattcattccccggaaaggagatcttggnggtcaatctgttctcagggtcataatgtgaagccccaggcatcccttccagcagaagctctgggcccttttatttccgatgga

SEQ ID NO: 356340 - DNA, 1194 bp, Homo Sapiens
  misc_feature (407)..(421): n is a, c, g, or t
  misc_feature (440)..(675): n is a, c, g, or t
  misc_feature (684)..(684): n is a, c, g, or t
ggacacaaagaagcacacagagctggtcaagaactactgaacacaaaacctaaaaaaagcacagaacaaaacaggcgtaagcaaacaagcacaacagtctacaaaagattataaactggataaacactgatgtacctcatctcaactattttaaaacagaacaaatgagataaaagaactttaatgctgaattttgatgttaattgaaagctagcttgttgaaaactctgttcactgctatctcaggacggggtaagctgatgtccccagaagactaccaaaatgcaggcaccttcccaggggaggcttactggcacccaaacaggtagaggtctctggaaatacttttggaagctgaagaacgctctgatatggaatgtaacattttgcaggcagaggtgtactcnnnnnnnnnnnnnnngagacagagtctcggtctnnnnnnnnnnnnnnnnnnnnnnnnnnnnnnnnnnnnnnnnnnnnnnnnnnnnnnnnnnnnnnnnnnnnnnnnnnnnnnnnnnnnnnnnnnnnnnnnnnnnnnnnnnnnnnnnnnnnnnnnnnnnnnnnnnnnnnnnnnnnnnnnnnnnnnnnnnnnnnnnnnnnnnnnnnnnnnnnnnnnnnnnnnnnnnnnnnnnnnnnnnnnnnnnnnnnnnnnnnnnnnnnnnnnnnnnnnnngtgttattnaccgcgcccggccccaagaggcatactcttatagctcatgaagacttgaaggaggtgaggagcctctgccctgggaatcctctcatgcactttcaaggttttaactgtcttcaaaactgttagaaggagcctagatctctccttagcttttcatttatattttcaagagtctgagacattttcacagctatttcttataggcaagtcaaattcaacatttaaagacctaatttaatcacccaatcacccaatatagaaaatatgagttatctttgattcctcctgattagacttgtcagtcctacgtttgacattccaagctccttaattctactttcctatggcactgccttagtttaagccgctcatttcttccagctccaccaccaccaggagcacttctccagcgggtctccttgcttccactgttactgcgtcctactttgttctaacgccaccctggttagccagtgatcccttaaaattaggacagattatgccaccctctgt

SEQ ID NO: 356341 - DNA, 2260 bp, Homo Sapiens
  misc_feature (197)..(315): n is a, c, g, or t
  misc_feature (417)..(523): n is a, c, g, or t
  misc_feature (611)..(771): n is a, c, g, or t
  misc_feature (1699)..(1699): n is a, c, g, or t
  misc_feature (1770)..(1770): n is a, c, g, or t
  misc_feature (1839)..(1839): n is a, c, g, or t
  misc_feature (1848)..(1848): n is a, c, g, or t
  misc_feature (1947)..(1947): n is a, c, g, or t
  misc_feature (1956)..(1956): n is a, c, g, or t
  misc_feature (1962)..(1962): n is a, c, g, or t
  misc_feature (1978)..(1978): n is a, c, g, or t
  misc_feature (2020)..(2020): n is a, c, g, or t
  misc_feature (2030)..(2031): n is a, c, g, or t
  misc_feature (2033)..(2034): n is a, c, g, or t
  misc_feature (2037)..(2037): n is a, c, g, or t
  misc_feature (2039)..(2039): n is a, c, g, or t
  misc_feature (2041)..(2042): n is a, c, g, or t
  misc_feature (2044)..(2044): n is a, c, g, or t
  misc_feature (2053)..(2053): n is a, c, g, or t
  misc_feature (2068)..(2070): n is a, c, g, or t
  misc_feature (2085)..(2086): n is a, c, g, or t
  misc_feature (2129)..(2132): n is a, c, g, or t
  misc_feature (2134)..(2190): n is a, c, g, or t
  misc_feature (2211)..(2211): n is a, c, g, or t
  misc_feature (2218)..(2218): n is a, c, g, or t
  misc_feature (2229)..(2229): n is a, c, g, or t
  misc_feature (2231)..(2232): n is a, c, g, or t
  misc_feature (2252)..(2252): n is a, c, g, or t
  misc_feature (2254)..(2254): n is a, c, g, or t
gaagtcccttaccctcttctaccctagatctgatggacctcctgggatttcctggggaaatgaaatgagtctaacacctttgaccacctgctggatattatatcagcacttacttaagtaagctgtggaagagctgaaagcagtattcagagtctgacagttctctgcaattggcctagataaactcattgtgaaannnnnnnnnnnnnnnnnnnnnnnnnnnnnnnnnnnnnnnnnnnnnnnnnnnnnnnnnnnnnnnnnnnnnnnnnnnnnnnnnnnnnnnnnnnnnnnnnnnnnnnnnnnnnnnnnnnnnnngcaggggacaggagtagtggatagattcattttgtaaagaaatattaaaatattctttttaatttgatagttaatataagcttaagaatcttttaaaactcnnnnnnnnnnnnnnnnnnnnnnnnnnnnnnnnnnnnnnnnnnnnnnnnnnnnnnnnnnnnnnnnnnnnnnnnnnnnnnnnnnnnnnnnnnnnnnnnnnnnnnnnnnnactggtgacagtgtgaagcaacaagaactgctgatgcaaattggctcaaccgcttgggaaaatgtttgacagtatctactaaagttgnnnnnnnnnnnnnnnnnnnnnnnnnnnnnnnnnnnnnnnnnnnnnnnnnnnnnnnnnnnnnnnnnnnnnnnnnnnnnnnnnnnnnnnnnnnnnnnnnnnnnnnnnnnnnnnnnnnnnnnnnnnnnnnnnnnnnnnnnnnnnnnnnnnnnnnnnnnnnnnnntgacactctatagcaaggaaatgagctaacttgctacacttataatgatttgaaggaatctcacaaacataatgttgaacaaaagcaaccagccaacaaaagatgtgctgtaggattcccagttacagagttcaaaaacaagcaaaacatatctttgagcagaatggaatgggggagttcacaaagggagttatggtgtgctggtggtcttgtttttcttgaccaggatggggataactgatcgtttttgagctgtactctatggagtatgcattttttatttatcttatacttcaattaaagtttttctttcttagtgaataaagcaaaaatcagcatgaggctggtgaaacagacagttctgcagaatgagagaagaacaatgtcctgaagcatttagaaagaaggactttgttcttccagtgcttatagaacaaaaaatattagaaaatatctgcttttgctccccctatggtgcagcagggtattatgatggcaagagggcaggaaaataagagtgagaaaagaaagggagaagctaaattaatatttgagtcagaaatagtaaatagtcatagcactaaagaaaattgaatccatgatgaacagtgaatactgaactacttttcagaatcctgtgggttctcatgagtccacaaagcgaagatggagggaagttcccccactttttgttcattatccagatcagaactgctttcatcaaatgttatatattgtgctttaaaagctttcttttaaaggattctctgcagcttaaataaagttaggatgaacaaaaagcaccagagcaaaagataaaaagcaccctccgacaaatatagtaagagaaaaggtgcagatcaaaaaggctgattacagagatttatcccttgactaaatagaagttcccaataaacaataactcgtnttaatagaagaaacatggttgatctaaaaaattttaaaagtcacaagactgaagatcctcttctacacatnttaaatgccatctggaatggagcaatgtctgtagttttgtagcccaagatttctctactcatccaaatngtaaaggtnacaggcattctgtgatatacaatgtactgctcatttgccctttctggaaaaaaattaatcaccacactcccaaaatgaatcaaaattaagaataaaagnagcaggaangaaagnccagtcggtgagtatngaaatcctcactgaaactattagaataatgaaggtaattgtnaatcccattnncnnccnananntntattatatnacttatctatccccnnncttcccagtgggaannataaccctaggttaagttaatgaaggccaagaaggaatggcannnnannnnnnnnnnnnnnnnnnnnnnnnnnnnnnnnnnnnnnnnnnnnnnnnnnnnnnnnntttttaaattcattttttttntactttnataataaaatntnnagataaagatttttttgaanantgttaa

SEQ ID NO: 356342 - DNA, 1871 bp, Homo Sapiens
  misc_feature (12)..(12): n is a, c, g, or t
  misc_feature (90)..(90): n is a, c, g, or t
  misc_feature (1819)..(1819): n is a, c, g, or t
ggatgccccgcnggacccagaggcggggcgtcggcccggggaccgctgctcctccggggcgtggctgcaggaggctggaggagccccgcnggacccagaggcggggcgtcggcccggggaccgctgctcctccggggcgtggctgctgccgagcatctcccagctcagccgagcccgtgcccaggccacgctttgttccagccgccgcctcctctaccctacggcgtccggagccatccctcgcctgctcgctctctcctttcgcccactccctgcatctgggcctgcatcacctttgccaaccgctcccccgatcctgccgacactcctcccccaaacttctgaccggcacccttgcctggtacccttctctccattcctccccctccatcttctttccccgacccctctcgggtccctcttttcccaaaacccgggtctctccgcgtggccccgcctccaggccggggatgtcccccgcggccccgcgcccatggtcctgacgctgcttctctccgcctacaagctgtgtcgcttcttcgccatgtcgggcccacggccgggcgccgagcggctggcggtgcctgggccagatgggggcggtggcacgggcccatggtgggctgcgggtggccgcgggccccgcgaagtgtcgccgggggcaggcaccgaggtgcaggacgccctggagcgcgcgctgccggagctgcagcaggccttgtccgcgctgaagcaggcgggcggcgcgcgggccgtgggcgccggcctggccgaggtcttccaactggtggaggaggcctggctgctgccggccgtgggccgcgaggtagcccagggtctgtgcgacgccatccgcctcgatggcggcctcgacctgctgttgcggctgctgcaggcgccggagttggagacgcgtgtgcaggccgcgcgcctgctggagcagatcctggtggctgagaaccggtgagcgcgccaggccggggttgggagagcgccgcgtggtgtggacagttaagcgcctgcgttcccgtgtgccttgcgccgtgcctttgcctccctcacctctctgactgcctgcactacatctctgttaggggtcagcctgtctgtttcacagataaggaaactgagccttgggaaagtttagtgacttgctcagtggatcacagtgaactaagatttgctcccagggctagtggggtgaggaatggagttacaggacaggagtccgtccctggctctatggatggagatggcatcctattgccaattctccctctcccccgccccccaagcccacagctctccttcccaccggcttgggttcccgtctatgacaccttctctcgccatcatcccatccctctcccaatgagagaagaagggaaacacaacgctcagaaaagagggagggagacctctcctttccctcctccccaggctgtaaggcgtgctggcctgaggctgcttactcccttcttgccgccccaatccaacttctgctccatccttcattctggttcttgcaacaggccagacatgatctcattctgcagctgctgatgggaaacagttttctgctgggaggcatgggtgggggaagaggacaccggggtgcagagcccggcggggaccaggcagagtgtgtgttctctcccttcaccccacttagcaccaagatgccgcaagagggtcaaacagaggcctggttgccactcttgcatggtctcttgggatctctcctggagtatgaagacctccaaggactcactttccctcccttctgatgccagagcagaccaagctgtcacactccatnctcatgctgaagtctcagctctcaagctttaaaaaagtttttgggaagagtc

SEQ ID NO: 356343 - DNA, 1138 bp, Homo Sapiens
  misc_feature (15)..(15): n is a, c, g, or t
  misc_feature (20)..(20): n is a, c, g, or t
  misc_feature (22)..(23): n is a, c, g, or t
  misc_feature (31)..(31): n is a, c, g, or t
  misc_feature (40)..(41): n is a, c, g, or t
  misc_feature (57)..(57): n is a, c, g, or t
  misc_feature (59)..(59): n is a, c, g, or t
  misc_feature (65)..(65): n is a, c, g, or t
  misc_feature (77)..(77): n is a, c, g, or t
  misc_feature (143)..(143): n is a, c, g, or t
  misc_feature (154)..(154): n is a, c, g, or t
  misc_feature (287)..(344): n is a, c, g, or t
  misc_feature (450)..(490): n is a, c, g, or t
  misc_feature (1125)..(1125): n is a, c, g, or t
  misc_feature (1128)..(1128): n is a, c, g, or t
ggccgcgagtagccngggtntnncgacccanccccccggnngcgcctcgacctgctntnccgctnctgcaggcgccngagttggagacgcgtgtgcaggccgcgcgcctgctggagcagatcctggtggctgagaaccggtgngcgcgccaggnccggggttgggagagcgccgcgtggtgtggacagttaagcgcctgcgttcccgtgtgccttgcgccgtgcctttgcctccctcacctctctgactgcctgcactacatctctgttaggggtcagcctgtctgnnnnnnnnnnnnnnnnnnnnnnnnnnnnnnnnnnnnnnnnnnnnnnnnnnnnnnnnnngtgaactaagatttgctcccagggctagtggggtgaggaatggagttacaggacaggagtccgtccctggctctatggatggagatggcatcctattgccaattcnnnnnnnnnnnnnnnnnnnnnnnnnnnnnnnnnnnnnnnnnccggcttgggttcccgtctatgacaccttctctcgccatcatcccatccctctcccaatgagagaagaagggaaacacaacgctcagaaaagagggagggagacctctcctttccctcctccccaggctgtaaggcgtgctggcctgaggctgcttactcccttcttgccgccccaatccaacttctgctccatccttcattctggttcttgcaacaggccagacatgatctcattctgcagctgctgatgggaaacagttttctgctgggaggcatgggtgggggaaaaggacaccggggtgcaaagcccggcggggaccaggcaaagtgtgtgttctctcccttcaccccacttagcaccaaaatgccgcaaaagggtcaaacaaaggcctggttgccactcttgcatgtctcttgggatctctcctggagtatgaaaacccccaaggactcactttccctcccttctgatgccaaagcagaccaagctgtcacactccagtctcatgctgaagtctccagcttctcaagcttaaaaaagtttttggaaaagtcactttcagctcatgcagctctcacaagtgtgaaaggagtgggttgggggggttttccctgccattttcgaaaagaaaanaantacctggtga

SEQ ID NO: 356344 - DNA, 1372 bp, Homo Sapiens
  misc_feature (488)..(488): n is a, c, g, or t
  misc_feature (707)..(707): n is a, c, g, or t
  misc_feature (753)..(784): n is a, c, g, or t
  misc_feature (891)..(891): n is a, c, g, or t
  misc_feature (939)..(939): n is a, c, g, or t
  misc_feature (991)..(991): n is a, c, g, or t
  misc_feature (1082)..(1082): n is a, c, g, or t
  misc_feature (1130)..(1130): n is a, c, g, or t
  misc_feature (1142)..(1142): n is a, c, g, or t
  misc_feature (1147)..(1147): n is a, c, g, or t
  misc_feature (1175)..(1175): n is a, c, g, or t
  misc_feature (1202)..(1202): n is a, c, g, or t
  misc_feature (1216)..(1216): n is a, c, g, or t
  misc_feature (1300)..(1300): n is a, c, g, or t
  misc_feature (1311)..(1311): n is a, c, g, or t
  misc_feature (1326)..(1326): n is a, c, g, or t
  misc_feature (1332)..(1332): n is a, c, g, or t
  misc_feature (1353)..(1355): n is a, c, g, or t
  misc_feature (1365)..(1365): n is a, c, g, or t
cccatacctggatttaaagggcacctaataaattgcaaacagtaaaacacaatggatcactgtggtgactccacttccagattgggctaccgggttgaaaaaaagacaagcgtcccggtcccatcaccgaatgatctcccgatcttcctgaaagaaatggcatgagaatccaatatcgtggtaaaacaactgggttaaccaaatcagcaagaggtactaaaggctatgatgtacaaatgagccattatgaagcctaagccagcaagaggcactgaatgcctataatgcacaaatgagacatccctgcctgccaaagatcagacacctgtctgtccctccaggatctacccttcacaggacatcatccaataggaaagccccagcttgaaccagcaacgctccccgcagatccctgcccgccactcccagcaaaggtcttcatgaaggctcttccacaaggactgcttgttactgggatgtgccccaantcacgtgggtactgggtgggggtgaggagggaaaaaaagaggacccagctgcaggcctcgtagtcctcgtccccaggccttgctcgtggtcaccctgtgggtgcacacaggctgcaatgtgttcatacctatgcctgcacaatcaggcattgtgtgggggggcccccaggccacctcccttcacagacttcacactcccccagccctgcctggcctatncctgccacaataaagatgccaattaggacaaggtttcccccaattnnnnnnnnnnnnnnnnnnnnnnnnnnnnnnnncttcagagcaaagatgactctgctttaacaatacctgagtctgggcctgcttctggggcccttccccaccagtactgcctgggtatttaacccttagcacaatgcanatattcaaaaagctcagccaccactgcttcagaggaacaccctggccntcaggcatcctcctgtccctaagccagcaagaggtactgaatacctatgatntccagggcactagactctgaaggggagcagtggacgaagcggggctgtataactgaataggattccaggtcctgcccacaaaaacgtgggntttcttagggaagaaatgaacagaaatacaaacaataaaagatccagnccgggcacattnactcncacctgtaatcctagcactctgggaggntaaggcaaaaagatcacttgaggcganaaattggggaccancctggccagcatggtgaaaccacatatctactaaaaatacaaaaattatcacaggcatggtagcgcatttctataatctcagcnaatcaggaggntgagatacaagaatnacttgnacccaaaaggcaaaggctgcnnngaaccaagtnaatgcaa

SEQ ID NO: 356345 - DNA, 926 bp, Homo Sapiens
  misc_feature (532)..(532): n is a, c, g, or t
  misc_feature (560)..(560): n is a, c, g, or t
  misc_feature (569)..(569): n is a, c, g, or t
  misc_feature (573)..(573): n is a, c, g, or t
  misc_feature (577)..(577): n is a, c, g, or t
  misc_feature (579)..(580): n is a, c, g, or t
  misc_feature (583)..(583): n is a, c, g, or t
  misc_feature (594)..(594): n is a, c, g, or t
  misc_feature (607)..(607): n is a, c, g, or t
  misc_feature (610)..(610): n is a, c, g, or t
  misc_feature (613)..(613): n is a, c, g, or t
  misc_feature (616)..(616): n is a, c, g, or t
  misc_feature (618)..(618): n is a, c, g, or t
  misc_feature (760)..(760): n is a, c, g, or t
  misc_feature (769)..(769): n is a, c, g, or t
  misc_feature (773)..(774): n is a, c, g, or t
  misc_feature (777)..(777): n is a, c, g, or t
  misc_feature (779)..(779): n is a, c, g, or t
  misc_feature (830)..(830): n is a, c, g, or t
  misc_feature (835)..(836): n is a, c, g, or t
  misc_feature (840)..(841): n is a, c, g, or t
  misc_feature (851)..(851): n is a, c, g, or t
  misc_feature (860)..(860): n is a, c, g, or t
  misc_feature (870)..(871): n is a, c, g, or t
  misc_feature (880)..(880): n is a, c, g, or t
  misc_feature (883)..(883): n is a, c, g, or t
  misc_feature (889)..(889): n is a, c, g, or t
  misc_feature (919)..(919): n is a, c, g, or t
  misc_feature (921)..(921): n is a, c, g, or t
cttttcaggtacagttccctgctttttaaaataacatttcaagtcagcatagtgtggtggttaagataagccaggggcttcggaatcgttgatccttggcttcatattctggttctgtcacttcctattaatagctgtgtgcccttggatgagtcacttcacctctccaagcctttgtctgtttatctctaaaacaggactagtaatttctatattgtagggttattttaatcagaatgagctatgtgcatactcaaactacagttgtgggcaaactgtaactttaaaatgattcaggatcataacttcagttatttttctgtgctgttacgtagcagctttccagttttcttcctaactctcaagctaccagctctagttttattgttagggtgtttaatatttgaattcttcaacatagaataccatgtgtttaggaaaaataaaagtgtgactgtatttggtatgttgtatttttagttacctggtaggagatgaattgtttgtggtcatggaataccttgctgggggntcactcactgatgtggtaacagaaacgngcatggatnaagnacananngcngctatatgcanagaggtaggtttnccnccntcntnatatgttatggtgatatgtggttagcaagaagtgaacaaaaggaaatttttctgcacaggtaattgttattgtgggaggtgctttctctgtatacattctctgcaaattactccatctccatgccatttcatcctacacagnagtatcagncctnnccntnaggtataagataatttgggaatgaattatggacctttgaagatccagattnacaannaaannctggtagagnaatgatatnaattaccaannaaacaaganaantttganaataaaagagtatatatcattagaaaaacnanactca

SEQ ID NO: 356346 - DNA, 1398 bp, Homo Sapiens
gccaacactggggaagcctactctaaaaaagtgttccatgggaagtccacacagctctaattctgaatgacctgtattgttggtccaagcagggatacatcaaagagactggtggtttattagcattacccagaaggtcagtgtcaccactcgggaaggagatatgaagtccccacttccaagttcttaccccagagagagaggctgctgctctgcttgtggatttactactcatctacccagacatgctactccctccccacaaagtctcccgtcagcttctcaagcagactctgctgcagcttgtctcagccacacatgcggagttttacctgccatcacctcaggggactggaagaactcatctgggtgcacatagcccgtctgcggaaggaggcaccacagcactcggagcaggctgagaccaccccaaagcaccctgactgtcatcttcagatccagttgttgccaacacaccgggcccaaaacctggaatgatgtcccagctgctacagatgctacgctggatccacagatctgcatccgcgcggcctccgggctgcgccttcagcgctggcggcgtcctgcccggcgagggccagggtcccaggaggccccggaggcggcgggaccgcagggcggaggggaggccgtggaagcggccgggcgcccctcagcagcccggagactggggccgccgccgccggcgcaggccggcccgggagggaggaagaccgcccgggccgggcccccgctgtacgtccccgcgctcccgcccggcctggccccgcggtcccggagcgagctggggccgcgctggggagggtcctgggggcgccgccgtccctcgggccgggcaacgccgggcggggaccggtctcgccccgccgcgctcgggctccctccccggcggcccctcctcggcgaacagcctttcggcgcggggggctgttaaaccagacaccccaggccacactcctctcgttcgaaatgaccatttcggggttctccgtggcggggagctccgccgccgccgtcccccttccacgcgcgggaggtcggcgagggcagggcggggacccggagtgcggcccccggtcctgcttcgtggcccgaaacgcctcgcaatggagccactcatgacaggggactcagcgcacggggcgcgtgctgagcccccgaatgatcggcgcgcgtgaggggttccccggtcgcggttggcccggtagcctgtcatccccagtagtcctgtcaggaataggaagcttggaggagcctgcgcgaacgtctgcacccccccgagctacgctcccccgatcgctcccctgtgcgtcccactccctccggctgtaacccgctcgtccgcgacgcaacccgactcacctgctgtccgcgacg

SEQ ID NO: 356347 - DNA, 752 bp, Homo Sapiens
tggccccacgcgcacgtatcgcgcggggtcatactcaaagccatctagcacccaccctcgcccatatcccctcaaacacccaggcaacgcccttctcctttgttgccgccaaagcctgcctgtactcttgatgactggagctcaagcaacggtcttaaactatcagtatgaccccacatgcccatcacatctgaaaggcctcaaggcctttgggcgacacggtatgggccaggcaaccagcctcatgatgtgtcccacaccgcctaacagatgagtgagtgtcccaggtctgggttcccttacccctctcttgaatctacagaagagaagtttcatgatctcagatcacagccctatggaagctcttgccaaacactggggaagcctaactctaataaaagtgttcccatgggaagtccaacacagctctcattctgaatgacctgtattgttggtccaagcagggatacatcaaagagactggtggtttattagcattacccagaaggtcagtgtcaccactcgggaaggaggatatgaagtccccacttccaagttcttaccccagagagagaggctgctgctctgcttgtggatttactactcatctacccagacatgctactccctccccacaaagtctcccgtcagcttctcaagcagactctgctgcagcttgtctcagccacacatgcggagttttacctgccatcaccaaggggacggaagaactcaatgggtgctctaggccg

SEQ ID NO: 356348 - DNA, 1445 bp, Homo Sapiens
  misc_feature (402)..(448): n is a, c, g, or t
  misc_feature (504)..(504): n is a, c, g, or t
  misc_feature (546)..(546): n is a, c, g, or t
  misc_feature (563)..(563): n is a, c, g, or t
ccgggatccgcgggcctctggtccgctgccgtgttcggccccgcccgtcacgtctagctggggctcgcccggcgccttcctggacgcagacgtatgagtcccaactccacccagtccggcctggcctctgtccccgggtgaccgcggaatgggggggcgggagctagcgagcaggccctcaagcgcgtctggccgcctcctttgtcttgatgcccacgtctggttaggacccctgctgtccattttattaaaggagctgtagaaagcggcctggggcccagcgacctgcccagggcggacgaggaggcgcgactggcccgatgccgcagtctctgcccagtgtgctcaggtgggagggcggggacatgaatcgagccacagagtgccctgggcacggaactnnnnnnnnnnnnnnnnnnnnnnnnnnnnnnnnnnnnnnnnnnnnnnngccaccgaagcccgtgccactcgccagctcctgcgagacgagcctttcgagcgcantcaggcatttggttcagggtcctactgccggagtcgtctgangcctccatccgtctgtngtcacgaaaaaggttttggggggactaataagcacttcctgaatgcacatttgctccacgcccctgctgtagggagagggtctgcagacacttcaacaaatagaatcctaggaccttacctgtgagtacaagagctggaatcttcccaccaacttcttaaaattcaatcctatacttggtccatttagcttagactggaaatttcccaaggcagtttgttttgcaatcttttgcatgattttagctctgtatagtttagtgaatgtttatggtactgaataaaacagtctaaaaacgttgggtacatgttgctgttttatttagttcaaccaaagtttataaaagtaggacataatacgttttccacttaagagtgagacagcctttattatgaaacggtaaattgttaggaatactagtcctattcaagtttcaaggcttattcctaataaaatactcaaactgtggttaaaatttatgttaatggtggtttgccgcagtaaaatatcagcgtctttttcaacaatacattgttggctaaaattaaccggacctggtctgtacatctgaagtataaaatatctttattaaacatacccattagtggcatacctagtcaaaaagtaagcagaatttcacatgcaaattgtatacaatctgtaaaaattgtattccataagaatgtgacagttgagtacggtttttggggggcttttttggtgtaccataataatgtcatctggtttcttttctgaacatccagtcaccatactgtccggcttgtaactttagtagatcgtagattgtattattttggtatccccaacagctcttgtacagtgccttgctcatagaaggtacttagctgtttagtaaatgccg

SEQ ID NO: 356349 - DNA, 935 bp, Homo Sapiens
  misc_feature (411)..(453): n is a, c, g, or t
cttacaggtcaggcttgctccccacaggaccaggctggcaggggccagtggctcagaccaggtaggggcaggatggaggctaagccctgtaacaacctgctgttaccaactgaagagccccaagctctccatggcccacagcaggcacaggtctgagctctatgtccttgaccttggtccatttggttttctgtctagccaggtccaggtagcccacttgcatcagggctgctgggttggaggggctaaggaggagtgcagaggggaccttgggagcctgggcttgaaggacagttgccctccaggaggttcctcacacacaactccagaggcgccatttacactgtagtctgtacaacctgtggttccacgtgcatgttcggcacctgtctgtgcctctggcaccaggtnnnnnnnnnnnnnnnnnnnnnnnnnnnnnnnnnnnnnnnnnnncaggtttagtttggggaggaagcaaagggttttgttttggaggtcactctttggggcccctttctgggggttccccatcagccctcatttcttataataccctgatcccagactccaaagccctggtcctttcctgatgtctcctcccttgtcttattgtccccctaccctaaatgcccccctgccataacttggggagggcagttttgtaaaataggagactccctttaagaaagaatgctgtcctagatgtacttgggcatctcatccttcattattctctgcattccttccggggggagcctgtcctcagaggggacaacctgtgacaccctgagtccaaacccttgtgcctcccagttcttccaagtgtctaactagtcttcgctgcagcgtcagccaaagctggcccctgaaccactgtgtgcccatttcctagggaaggggaaggagaataaacagaatatttattacaaaaaaaa

SEQ ID NO: 356350 - DNA, 1057 bp, Homo Sapiens
  misc_feature (316)..(377): n is a, c, g, or t
  misc_feature (395)..(409): n is a, c, g, or t
  misc_feature (412)..(476): n is a, c, g, or t
  misc_feature (527)..(536): n is a, c, g, or t
  misc_feature (625)..(625): n is a, c, g, or t
  misc_feature (810)..(810): n is a, c, g, or t
  misc_feature (862)..(862): n is a, c, g, or t
  misc_feature (954)..(954): n is a, c, g, or t
  misc_feature (962)..(962): n is a, c, g, or t
  misc_feature (1006)..(1006): n is a, c, g, or t
  misc_feature (1022)..(1022): n is a, c, g, or t
  misc_feature (1028)..(1028): n is a, c, g, or t
acagtgcatttggattcaggtgccaaaggggcattattaaggaattatttaaaaacaatgtgtctagtttaaaaaagtggttttcagtattgtgacaatacaacgtttttacaaggttgttttctaccaccatattttaaagatatttttatgaccgtgtatactcacactttgcttgtattttaaaaggaggatatatttgcacttatgtatacttttacagtttgccaaaatattttgctgtaaaattttttttcaataaaatgtatataaccccccccacccaatcctccactacccattccccctccgcttnnnnnnnnnnnnnnnnnnnnnnnnnnnnnnnnnnnnnnnnnnnnnnnnnnnnnnnnnnnnnngtttcccctccttctttnnnnnnnnnnnnnnnttnnnnnnnnnnnnnnnnnnnnnnnnnnnnnnnnnnnnnnnnnnnnnnnnnnnnnnnnnnnnnnnnnttctccagatcttccctctattcaccttccccgttgcgggcgccgcgccgnnnnnnnnnngtttatatcccctaccattcgcgcccctttctgtcctgttcccctcaccacactttccccgttctctcccctgtcttccgcttgcgctncctctccccctcaaccaacaccaatactccccccgtgggggcacaccccgtcccgttttgttttagcaaaccttctttcccactttgttgtacccccttgccctaacatccctacccgcgttgtctactccacatataccacctgcgccctcattcccgctccgccgatctcgctatccgcactntctattattatctcgcacgcgtcttcactccggtttggcctatcacctcgantcgcccctatatcgcgcctgtatgccctaatatctccgcattcacctcgtctctccctcgcgccttctgacgattgacgaggcagccgcgcntctctctnatatcaccacgcctctgtagtcgagcataacctagcccacatcnccgtttgtaggtcggnatgctngtctcgattcgcgcgctcgctgcttctcg

SEQ ID NO: 356351 - DNA, 1049 bp, Homo Sapiens
  misc_feature (5)..(5): n is a, c, g, or t
  misc_feature (26)..(26): n is a, c, g, or t
ttgtnaaatggtgttcagtgaatgcnactcctcagcagatgcctcagacagaaaaagcggtcgaagattccttagaagcatcggtcggagtaaaaaggaacggaggcctgtgcgcccacacacggtcgagaaacctgtgcccagcagctctggtggagatgcccacgttccccatggctcccaggtcattaggaagctggtcatggaacccaccttcaagccctggcagatgaagactcacttcctgatgcccttcccggtgaattacgtgggtgaatgcatccgaactgtcccctacacggacccaggatcaggccacaaattccagaaaaagccggtgcttatggtggaggcgcaaaactcagccacaaatgggattttcaccctttactcttacagggacccaaatacaatagagacgctccagtcttttgggaaggctgtcgactgggctaagtctggaaaattcacacagcaagacatcgacgaagccaaactttctgtcttctcaaccgtagatgctcctgtcgctccttcagacaaaggaatggaccacttcttgtacggcctctcggatgagatgaagcaggcccacagagagcagctctttgctgtcagccacgacaagctcctggccgtgagcgataggtacctcggcactgggaaaagcacacacggcctggccatcctcggacccgagaacccgaaaattgccaaggacccatcctggatcatccgatgagcagccgtggcgctcgactgcacaggagcccgagacaatacacctccgagctgaatatgaaaagtcagaaatgctactgctttttccaagaatattatgtcattgagtgtcgccaaagcccttgactggcgagtcaaaaactcagatctatcttaagagtgaccaggaagaggttcattgaaataatcatgcatgaagcgccaaagatgcaccatgtagaattttcactttgtactggcaggctcgttttacctcattctagaatatttaagaatctaaaaataaagggcaactctgacttaaaaaa

SEQ ID NO: 356352 - DNA, 1195 bp, Homo Sapiens
gaggccctatgtgcccctcttctgcagcgtcctcaccaagctgggctgcggccttcttgactaccgggagcaggctcagcagatagaattgaagaccggagggatgagtgcttctccccacgtgctccccgacgactcacacatggacacctacgagcagggtgtgcttttctcctctctctgcctggatcgaaacctgccagacatgatgcagctatggagtgaaatatttaacaacccgtgctttgaagaagaagagcacttcaaggtgctggtgaagatgaccgcccaggagctcgccaatggaattcctgactctgggcacctgtacgcatccatcagggcaggccggaccctcacgcccgcaggggacctgcaggagaccttcagcgggatggatcaggtgcggctgatgaagaggattgcagaaatgacagatatcaaacccatcctgaggaagctcccacgtatcaagaaacacttgttaaatggtgataatatgaggtgttcagtgaatgcgactcctcagcagatgcctcagacagaaaaagcggtcgaagacttccttagaagcatcggtcggagtaaaaaggaacggaggcctgtgcgcccacacacggtcgagaaacctgtgcccagcagctctggtggagatgcccacgttccccatggctcccaggtcattaggaagctggtcatggaacccaccttcaagccctggcagatgaagactcacttcctgatgcccttcccggtgaattacgtgggtgaatgcatccgaactgtcccctacacggacccagatcatgccagtcttaaaatccttgcacgtttgatgactgccaaattcttgcatacagaaattcgagaaaaaggcggtgcttatggtggaggcgcaaaactcagccacaatgggattttcaccctttactcttacagggacccaaatacaatagagacgctccagtcttttgggaaggctgtcgactgggctaagtctggaaaattcacacagcaagacatcgacgaagccaaactttctgtcttctcaaccgtagatgctcctgtcgctccctcagacaaaggaatggaccacttcttgtacggcctctcggatgagatgaaacaggcccacagagagcagctctttgctgtcagccacgacaagcttcctggcccgtgaagcgataaggta

SEQ ID NO: 356353 - DNA, 489 bp, Homo Sapiens
  misc_feature (21)..(21): n is a, c, g, or t
tcctccctcccaccctaaaanaccccggaacactgcccatgggttggccccactgggtcctcaggtcaagttaaaacaaatgaacaggaagcaactcctcctcgccccggatgttcaggaaagcgtgtttagggtgtcaagacgtggaaatcgtaatcacaagcaaggaatggcaggaccagaagctggtgctacctgcccatgcatgccgggaacttggaaaacagcaacgtcatctgtgagcctgtgggttgagattctcactgttatactcaaaatacctttgtctgaaggagcgacaggagcatctacggttgagaagacagaaagtttggcttcgtcgatgtcttgctgtgtgaattttccagacttagcccagtcgacagccttcccaaaagactggagcgtctctattgtatttgggtccctgtaagagtaaagggtgaaaatcccattgtggctgagttttgcgcctccaccataacaccg

SEQ ID NO: 356354 - DNA, 901 bp, Homo Sapiens
  misc_feature (194)..(370): n is a, c, g, or t
  misc_feature (387)..(434): n is a, c, g, or t
  misc_feature (457)..(476): n is a, c, g, or t
ccagaggttcggtaaaaggaaatttaatgtctaaaaaaaataacgaggggggattataatgccaagtatcaatgcaatccaaaaagcatttgcggcaaaaacttgactgccaagccctgtagttaagtgcccgcagttgaaaaaagataatggctttgaaattggcccaaaacagggcaggcacggtggctcannnnnnnnnnnnnnnnnnnnnnnnnnnnnnnnnnnnnnnnnnnnnnnnnnnnnnnnnnnnnnnnnnnnnnnnnnnnnnnnnnnnnnnnnnnnnnnnnnnnnnnnnnnnnnnnnnnnnnnnnnnnnnnnnnnnnnnnnnnnnnnnnnnnnnnnnnnnnnnnnnnnnnnnnnnnnnnnngcgtgaacccgggcccnnnnnnnnnnnnnnnnnnnnnnnnnnnnnnnnnnnnnnnnnnnnnnnncgacagagcgagacaccgtctcnnnnnnnnnnnnnnnnnnnnttgtgcaaagcataggtaaatatttttctttattaagcttctcactgagaagccctctttattttggtaaatgtcactctgtttgttaggagatgtctgcttttccatgaaatgaaatagtggctaaagccctgaaagaggcaagactacaatgggctgaaacagttggtatagcaaccccagagaagtgcttcattttctttttatagtagaagcaggtccatgtcttttgtggtttcctgcacatctttggagtagttatgacttctcagtttttccccccttaaactgcattgcctattcttttttcctgacatgctatcaggtatcagtgtgttgaatacataatgcttgtgtatcagacttacgttactgtcatcaccattaaaagaattgcagaccttgtgccccatgaccttcaaaaa

SEQ ID NO: 356355 - DNA, 3040 bp, Homo Sapiens
  misc_feature (503)..(529): n is a, c, g, or t
  misc_feature (1127)..(1176): n is a, c, g, or t
  misc_feature (2119)..(2119): n is a, c, g, or t
  misc_feature (2201)..(2201): n is a, c, g, or t
cctcttttggatttgatgacttgtctgaaactgaagttctctctggaatgactggacctctttcactgcagcgtcaggaatctcttgcaaagcaagcatggtgaacttccaagatgctgggccacttcaaaagcatcctcttgacaattccactaggaccaacaccaataccaccgagccctcgttgctgcctcttcagcgcagaatagcccaccaagtccacgtttccctagtcccaaggtcggatggctccgctcggtctccagccctgcctgtactgctggcttcaagtttcctccgagaggcgggcgtgcacagctgcagtggcggcggcagcggccaccaagcgcccggcggcgcttcgccacccacctttcctcagcccccggcgctgcagtctccgcccgccggggagggcgcgctcagcggaacaggagtcgagggtggggcgccgagaggagggaatcccgggtcgcaccgctacagttctcgcagtggcaaannnnnnnnnnnnnnnnnnnnnnnnnnnagcagcaggtggagcgagctacagcgtttggcctgaaacccactgctgcagccacccgggctggagttggcccgttgggtggagccagtgctcgccccggtccgacccccggtttccgggacacttgggttgcggaggccggctggccggagtcacggttggggacgggcgcgcctcggagcgcacggctgcgctggaagccgcgtctggggcgcaggaccaacggggacctacctcctcccggctacctaaagactcccttctctcgggaaagagcgctgccccggctctgggatttgggaggagctcggaggccgctcgggcacctcgctggacacctatccgtttgcgccccggaggcacgagagggtcccgagcggagcgctcgtctctcctcagcggtctaagggagaaaagcacacagctcttcctggggcgaatgggacctcctccctaggacctccgtggagtcgtcgcatcgcttgtcgtgttggtctcgaggggctcacagcttggcactaatttgcaggtgttcgctgctgatttggtttcttcttcgatttgcggacggttccctccagcgactctcgacacacannnnnnnnnnnnnnnnnnnnnnnnnnnnnnnnnnnnnnnnnnnnnnnnnnaatccagcgcttattcgctgaccctcgagtcgcttcgctagctgtgcgccctcctgggcactagcctggagaggagcgtgcagacgcggctccttggagggagtgcggtcctctagggaggcatcgggctcctaggggcttcttggcgtgtgtggtgggattggggtccgccggccatggccttcactttcgctgcgttctgctacatgctgtctctggtgctgtgcgctgcgctcatcttcttcgccatctggcacataattgcctttgatgagttaaggacagattttaagagccccatagaccagtgcaatcctgttcatgcgagggaacggttgaggaacatcgagcgcatctgcttccttctgcgaaagctggtgctgccagaatactccatccatagcctcttctgcattatgttcctgtgtgcgcaagagtggctcacgctggggctgaatgtccctctacttttctatcacttctggaggtatttccactgtccagcagatagctcagaactagcctacgacccaccggtggtcatgaatgccgacactttgagttactgtcagaaggaggcctggtgtaagctggccttctatctcctctccttcttctactacctttactgcatgatctacactttagtgagctcttaacgcaaagaccatgcacatcatcagagactgagatgggagaggcctgagacggagaggtgcatttctgctggtgactggaggagggaccagaatgaggatacgtgagaaatagacccggcaggcagtcagactgaatgggagctggaatcacgcagcagctgggagccgagttaaccctgcgtgtctgtgtcaccctgtttgtcaatctttggcattcgaattccacacacggggtcctagagcccttctgagcatcagtggtgtgggggagtaggtgacgaaancactagacctctcctgagagagaattgctgcttcctgaatccacttcattgaacagcaccttgcaagttcaaatgagttccntgggagcggaggctggaaggccacaaggtgcttgctaaggaacagaatgacccagagtcaaggccaagtctgcagggacctgttgaaagcctcgagaatgtcttggctgcccaagactcttgttgcctttcttccaagccatggccatgccctttttctcaaatgggaggggctggagggtgtgtgggatttgtcttcagctgcaaccagccttgagcctgctgggctattctcagctgaggaggggtgaatataggaaaaatgcatttttgaaacgttggcaacatgatcaaggtgttagttctccaccacacaagttgtattcttcttttgccacctcaaaccatcacagagtctttaaatgcaaatcaattggtcaatgctagtcaaagctatgttctaacaaaaaccccagacagctcagagctcagaaaatcctgtggagtggctgctctgtaccgtgggcatccggcagccaggaagtgagacaacataattataactttgttttatgatgctgcatcatttgtactgtttaggtcgacgtgaggacatcatcttatttagaattttccgtttggcattctcttttgggtgggagttatgctgggggttgtaaataatgacaaggctgagatttttatgatgtttaaattgggcacaatgattttgaccttattccccaaacttcttttcttttctactgtttaacatacacaggctatttatacacgtccccagctcccatctgaaacctgtgactcaggtttatgaatggtgtttgtgtagcaacacattgtgtgctatgtttattaaaatgcagcgacaaaaaaaagaaa

SEQ ID NO: 356356 - DNA, 1613 bp, Homo Sapiens
gggaggtccgggattggccggagcgcccgccgctcacggtcaggggttgccggatcccgtccgcgggcgatgctgctgcggagggtggtcgagggaggccgggcggtagccgccgcggtccgtggctcggcaagtaccaggacgggtcttggcagcgccgaagggcacgtccgagaggccgctgtccgggggcccgcacgtaccgggaggagccccggcccctccacccgcatgtggggacggagccgggaggatcgcgcgctggccgccgccgaaggacccctcgctcctctcctccatcggctcttaccgagtccccgccccggaatctgtggaggggccgcttagccttgggagaggaagcagcccggtgaacggccactttcctgtttctcagtatctgccgagcgcctgtgtgcgagccctcctgggctctggggactggccgtggacatggagcggatgatgcccctcgcaggactagttaaataagtgaagttggtagcgtgtcagtccgtgatcctgggtagatagagcagggcagcgacggaagactgcctataggacattcacgctgggatgagaggggcctgagaggcctgggctttgtgacagggaaacttggataaagggtggtgcgattcttccggttggtccctcagaggtggtggggcttggttatactggtagaggtgctgggctggccaggagcttacagggttacacctctcgcatactggtgtccacagagcagccatcttagctggaggtgtcgagtgcctcccccaccccccaccatgtgcttgagtgcacacccggcgccaggccctgatcctggcacttcttgtgaatcacaccgtgtcatacccatgacttccattgcacagtggggaaactgagtctagagaggtgaaataacatgtctaaagtcacaggaagtgaaaaagctgaggacatggagccagttgcccaatgacaggagagctgaaatgtcctcactgctgggggtagaccgggcctcaccagcttcctggagagtcacatgtttgtctgcatcctcagggggctcgccggttctccagcccggactgctgccagaggcttcctggaggtggcagctttcttcaaaggcaccatcccggagcgcaagcccctgatgggcgcagaaaattcgggacagaccacgtagaggtgggctcccaagcaggtgcggacggcaccaggccgcccaaggcatcgctgccacctgagctccagccgcccacaaactgctgcatgagtggctgccccaactgcgtgtgggtggagtacgcggacaggctgctgcagcacttccaggacggtggggagcgggccctggctgccctggaggagcacgtggctgatgagaacctcaaggccttcctcaggatggagatccggctgcacaccaggtgcggaggctgagccatccctgctggactccctaccgcaggacggagtccaggacgcagccgcagcctccttccttcacaccccctcacagactccttgtgtccaacgggaataggaagaattagttactgacttcacctgagaaaaaaataaattctctatggtggtttcaaaaaaaa

SEQ ID NO: 356357 - DNA, 1257 bp, Homo Sapiens
  misc_feature (1031)..(1031): n is a, c, g, or t
aggtaaagcttttttcaagagccccttatagcccctgtttccggaagtttcccaaaaatgtataaatattgatgggaagatgcgggccatgggaatcgttccttcgtgaaatccctcgccaattttcttttcaacttaattaatagttccggatcatcctgaacatggggtcctgtttcttgttcaaagctttctcaacgtgattcaggactacacctgggaggacaccagcgatgaaaaaatccgcatctacacctgcgtcctgcatctcctctccgccatgagccaggaaacgtacctttaccacatagacaaagtggactccaacgacagcctctacgggggagactccaagttcctggcagaaaacaacaagctgtgtgagacggtgatggctcagatcctagagcatctgaaaaccctggccaaggacgaggccctgaagcgccagagctcgttgggcctttccttctttaacagcatcttggcccatggggacctacgcaacaacaagctcaaccagctctccgtcaacctgtggcacctggcacagaggcacggctgtgcagacaccaggaccatggtgaaaacgctagaatacatcaagaagcaaagcaaacaaccagacatgactcatctgacggagctggccctcagactccctctgcaaacaaggacctgacccccgggcccatccccaggctcagggactctggtgccaaatccagaaagatctgctctgctgccctgaactcttacggcaatttaggtttctcatttttcttttctttttacatatgtacaaattgttttaagctttggcctctatccaggttattctgacaatgaagaaatgggagttgtcagagcattaaaatgcaatcttcactaagaagcagtctctgtgttggctttgcacaagtggccttcggtctactcagccccatctgatgggcctttttaccaagagagaaacaagaatggaagtaacatctttcctcctcgggaaagggggttggttttttcacaancttaacaaatacggggcttttcaccagtggcgcggcccccttccaagtggcgccgggttccccacccgattctcttgccccaagcctgggcacttgaaaagggtaaggcccgccccccaaagtcgtgggacaggggcgtcccggaaccctccgcagggggggacggtggatttaagcggcggaaaataggcccgcgcccggcccaaagctgagtgtgcgtcacaca

SEQ ID NO: 356358 - DNA, 1290 bp, Homo Sapiens
  misc_feature (657)..(658): n is a, c, g, or t
  misc_feature (1163)..(1163): n is a, c, g, or t
acaaccttaatataggcacagatttattacatgctatagaaagtactaaacataaagaaaaaatgatacattaacatagattaaaattaagaactagatttttcagatactgctagtgagactatacattggtacatacaactgttttggaaaagtatttggcagtatctactgaagctgaataatatgacccagcaatcctgcccctgggtatatactcaacagaaatgcataaatatgttccctaaaagacatatactagaatgttcatagcagcctgtcagcagtagaatgggtaaataaatatcggtatattcacataatcaagtatacacagcaatgaataataaacaactacacacaatattaatgaagctcacaaacatagttttgagcagaagaagcctgacatagaagaatacacacagtgtgattccattatttaaaagtacaaaagcaggtgaaattaatctatggtgttagaagtaaccctttttagggtagtgactggaagttggggggctccggtggcttctggaatgctataatttctgttcttaatccacgaggtggttacacaggtatgtttaattttgaagattcatcaagatagttctctctatatatatatgtgtaattttctgtattaatattgtnntttaataaagtttttaaagaacgtatgttgtatctttcagaactaaaagaacagaagcagagcatgcaacttcagattagcaaagagggggaaaagcataataaaatataatccatccaaaagtgaatatctataagaagtggggagctattttatagagggtaatcaaggaacatccctctgataagatgcaatttgaacagagacctaaaagaagtcaggaagtggaccctattgatacctggagaaagcaagcatcttagcagaagaaaaagtccccgaggtgaaagcatgtgtgggcatatgcatggactggcaaggaatccaggatggcttgaggcaaaccatggtatgaacttggatctattctgagagaaatgggaagcctttgaagactttagaactgagaaacagcataatctgatttatgttttaatacagtcatttggctgctatctggaggataataaactgtgggggatgcaagtgttcaggaagccaagtnagagaatggtgaattggactaagtggtagcagtggagatgatgagaaaagatatattttgaagattcaactcacagaattttctgatgggttgaatgaagagcgttaaagaaagaggagtcaaggat

SEQ ID NO: 356359 - DNA, 913 bp, Homo Sapiens
  misc_feature (419)..(430): n is a, c, g, or t
  misc_feature (613)..(613): n is a, c, g, or t
tcatctttcagtgcactttaatcgaaattccatcatcagaagagttctcgtagcatacaatgtcaggatgggcatgtcgacttggtcctacaaatggaatatccacagatttgcacttcaaacatgtatgaaaaataaaatatataatatttagctttataaatttccccacttagtcactttatctttaaaataaattactactcccgtccaatacagtgagtagcttggagtcactcagacaatctctagccaaatgatctctgttttcttgaggagttctgtagggaaatacttgatgaagacagtccagtgcttacaagaatcaacatgaatttaaaacgagcacactcttcacagtggggcggaacatcagaaaatgggagccttcttctaatggctgttcttttctgttgggnnnnnnnnnnnncaaatcctccaaaccacaccggatggttgtaaaaagctgcaacggaacctttggcaccagatgagaagagaggccttttaatgccatagctagtgatgattcagtcaaagcatcagtctaaggaaggatgatgggggaagggaccggagatcacagcccttctcctttctgagcccccctccnccccgatgtcccctttctggagacacagacagcccctctgctttggggaaggcggggctttgtctgggcaggctgggcgttcttcagacgggaagattcacaatgtatagaacacaaagggaggagggcccttttgcaaatcggggggtaaacccgcttgtttgcgaactttattaacccagcggtgttgcccttcaatgccacaagggcaattggccccttccagcgggaacgtttgttcactcctgtaaaaggggaccatcacaaaagtggtgtgccggggaaaacccaagggaacct

SEQ ID NO: 356360 - DNA, 405 bp, Homo Sapiens
  misc_feature (79)..(141): n is a, c, g, or t
cttctgaggaatggacctagtgtaacacacttgaatatgtgtgatgccaaactttttaaaatacaatataaattatgcnnnnnnnnnnnnnnnnnnnnnnnnnnnnnnnnnnnnnnnnnnnnnnnnnnnnnnnnnnnnnnnttaaattaacactttggcatgaacattaatgcaggtttttgatgaatataataaatgtatggaattcaattgaatttgcatggtcttcggaattttttctgtgtgtataaatttagctgctattaacagaagagagaactttctgtgagtagccatgtgtgttgatcagatacagtttttctgagatcttcaattaatctcactttaaaaatgaccaaaacatgtctttcttgaattaactttgaataaaagtttgtatattag

SEQ ID NO: 356361 - DNA, 849 bp, Homo Sapiens
caaagaccttgaaatgtttgcaagacatgcgaaaagaaccacaattaacactgaagatgtgaagctcttagccaggaggagtaattcactgctaaaatacatcacagacaaaagtgaagagattgctcagattaacctagaacgaaaagcacagaagaaaaagaagtcagaggatggaagcaaaaattcaaggcagccagcagaggctggagtggtggaaagtgagaattaaagtccctcgccgcttggaaagtgcagccttctacagcatatgcaggaagcggcaggaataaggaaaagcagcctcctgactttcctcgcttggtggtttgagtggacctcccaggccagtgccgggcccctcataggagaggaagctcgggaggtggccaggcggcaggaaggcgcacccccccagcaatccgcgcgccgggacagaatgccctgcaggaacttcttctggaagaccttctcctcctgcaaataaaacctcacccatgaatgctcacgcaagtgtaatgacagacctgaataaaatgtattaagcagcagtgatctttcctctcctccttcccaagtcatttgaaaagtgtttgttatttaaattccaataatgcccaatactgacgtgtcttgagtaatttggaacccaaagtgaagatctttgataaagatttttttgtggttcgactggactgtgctgagtgcgggcactgggcttttcttctgatgttcattatggtgctgggaagctccgtctttgatttaaaataaaatagctaaaggctacacaattaagagttcagaataacatcctatttcagtttaataagttaaattaaatgccta

SEQ ID NO: 356362 - DNA, 842 bp, Homo Sapiens
  misc_feature (531)..(548): n is a, c, g, or t
cggaggtggagagatgggcctccgcattctccatctctttacttaattggggtcttaggaacttcactaatttttgtgtcacttttgcttaatgccctttatctaaaaggatgggctacttagagatccctgctagtttgaagtctgaccgtgaacttctgtgtttcatcaaaactttaaataataccaaacattttggtgacttgcttctgccctttctgcagacatgcgaaaagaaccacaattaacactgaagatgtgaagctcttagccaggaggagtaattcactgctaaaatacatcacagacaaaagtgaagagattgctcagattaacctagaacgaaaagcacagaagaaaaagaagtcagaggatggaagcaaaaattcaaggcagccagcagaggctggagtggtggaaagtgagaattaaagtccctcgccgcttggaaagtgcagccttctacaggtagagccacctagaaatgcatatggctgcaaaggaaactttgaagggttaaatagagatttnnnnnnnnnnnnnnnnnnggctgggctagggtgctttttgtgctgaattctccacattgttaactgccaaagctagttttagagaatgagaaagtcttaagcaaaatactcccaggtctcactccagaacataaaaatggtgtgtgatcgaatggtatatattagaaattacatctgttgtaattaaaattgtgtgagcaattaaacatggttgactttttcaagcaaaaatcagttcatcttttgatgtaattttctaggctaaatggcaatctctgaaagatgaataaagctatatttatttagcttttc

SEQ ID NO: 356363 - DNA, 676 bp, Homo Sapiens
caggaaggaagagcagcagcagggtgggagagaagctccagtcagcccacaagatgccattgtcccccggcctcctgctgctgctgctctccggggccacggccaccgctgccctgcccctggagggtggccccaccggccgagacagcgagcatatgcaggaagcggcaggaataaggaaaagcagcctcctgactttcctcgcttggtggtttgagtggacctcccaggccagtgccgggcccctcataggagaggaagctcgggaggtggccaggcggcaggaaggcgcacccccccagcaatccgcgcgccgggacagaatgccctgcaggaacttcttctggaagaccttctcctcctgcaaataaaacctcacccatgaatgctcacgcaagtgtaatgacagacctgaataaaatgtattaagcagcagtgatctttcctctcctccttcccaagtcatttgaaaagtgtttgttatttaaattccaataatgcccaatactgacgtgtcttgagtaatttggaacccaaagtgaagatctttgataaagatttttttgtggttcgactggactgtgctgagtgcgggcactgggcttttcttctgatgttcattatggtgctgggaagctctgtctttgatttaaaataaaatagctaaaggctacac

SEQ ID NO: 356364 - DNA, 1151 bp, Homo Sapiens
cggtccggaattcccgggatgcggttctaggggagcgtgcgggcgccggggtccggcggcgagaggccaccttctggccttgcgatgaatcctcggtttccccttctcagatggggttttcgtgagggtacaacgtcggcattagacattccaggtgacgcccgtacgcggtgggcggttcgggccggagctctggaacgctggccctggaggcgtcgacccctcgttactgatgcagggacgcggtgcggaccaatcaggccaaaagctcgtccctaagatgggggttcaaatctctgccccgccaacttgtgatcgtatcgactcggcccagacgcaattttcttctctgcaaaatcgtcataagaataatcacttgtcagggtagctgcgggcatcccattcgttcctttcatcagcgccgggcatatggggcgtcagaggctgagaacgttgccgtgaagaggcttaaaagcaagacccggagtggcgaccttaaagaggacggactgaagaaacgcgggaatgagctccagacgcgggagtttcctctctacaaagttacactgcagcagctgtctaccctgccccttgtcttttgagaagttccaaccttcagaaaagttgcaagaacacgacatgcgagaagaaccaccattagcactgaagatgtgaagctcgtagccaggaggagtaattccctgcctgaatcgtccccggacacggtgaaaaaatggttcaattcacctacaacggacagccccgaagaagaagaagtctgaggaaggcagacaaaatttcagtgccccctggaaaggcctggctggtgggaaagccccaaatttacttccccccccggctgggaacgggccggccctactacaggtgaatgcccccgcgggaacgccccacgggctggcccacgcaaacgctgactgggcttgcgtgagggggtttctccgacgtgtgcggcgtaagcggcgcggcccgtcggggcgcttcctagtgagcgccacccctcgccccctcagcgacagccccacgagcgtgccccttgcgtcagatcagatcggaaacgaactacttctaactcagccaatacaaacgcacccgccgctcgctcatccctctacgagctgctgagcgaggct

SEQ ID NO: 356365 - DNA, 956 bp, Homo Sapiens
  misc_feature (51)..(87): n is a, c, g, or t
aatgtatagactcactatagggcgaccggagctcaacgcggtggcggccgnnnnnnnnnnnnnnnnnnnnnnnnnnnnnnnnnnnnnatcaggccaaatcggccgagctcgaattcgtcgagagcggggcgggaccctggcctgcgctggctggggaggaagcggttctaggggagcgtgcgggcgccggggtccggcgacgagaggccaccttctggccttgcgatgaatcctcggtttccccttctcagatggggttttcgtgagggtacaacgtcggcattagacattccaggtgacgcccgtacgcggtgggcggttcgggccggagctctggaacgctggccctggaggcgtcgacccctcgttactgatgcagggacgcggtgcggaccagtcaggcccagagctcgtccttagatgtgggttcgaatctctgccccgccaacttgtgatcgtatcgactcggcccagacgcaattttcttctctgcaaaatcgtcataagaataatcacttgtcagggtagctgcgggcatcccattcgttcctttcatcagcgccgggcatatggggcgtcagaggctgagaacgttgccgtgaagaggcttaaaagcaagacccggagtggcgaccttaaagaggacggactgaagaaacgcgggaatgagctccagacgcgggagtttcctctctacaaagttacactgcagcagctgtctaccctgccccttgtcttttgagaagttcaaaccttcagaaaagttgcaagaacacgaggctaaaggcagcagttcactatactgtggggttgtctttgcgaggaagttgcattggacaaagagatgcagttcagcaaacagaccattgccggcatttcggagctgacctttccgacagtgtggcaaattttgccaaagaccttgcaatggtttgcaggacattgcgaaagaacca

SEQ ID NO: 356366 - DNA, 1587 bp, Homo Sapiens
  misc_feature (53)..(90): n is a, c, g, or t
gatgtatacgactactatagggcgaactggagttctaccgcggtggcggccgnnnnnnnnnnnnnnnnnnnnnnnnnnnnnnnnnnnnnnatcaggccaaatcggccgagctcgaattcgtcgagagcggagttttctgtcactggacgccaaggagttttcggtggctcagctgggtaaccggggatcaccatggcggcctcattggtggggaagaagatcgtgtttgtaacggggaacgccaagaagctggaggaggtcgttcagattctaggagataagtttccatgcactttggtggcacagaaaattgacctgccggagtaccagggggagccggatgagatttccatacagaaatgtcaggaggcagttcgccaggtacaggggcccgtgctggttgaggacacttgtctgtgcttcaatgcccttggagggctccccggcccctacataaagtggtttctggagaagttaaagcctgaaggtctccaccagctcctggccgggttcgaggacaagtcagcctatgcgctctgcacgtttgcactcagcaccggggacccaagccagcccgtgcgcctgttcaggggccggacctcgggccggatcgtggcacccagaggctgccaggactttggctgggacccctgctttcagcctgatggatatgagcagacgtacgcagagatgcctaaggcggagaagaacgctgtctcccatcgcttccgggccctgctggagctgcaggaatactttggcagtttggcagcttgacttctgcagctggaggaggcccctcaggccggggatctggggagggctagcccaaaacctcccgcatcgggcaggcaccccctgaagtacttccttcagggtttcccctttgtgagggtgtcgagtagcctcaccggcctgtctggaggagcagctggctctgctctgagaaactctggcaagtggacgccattctcttgcccttaggattcactgctctctcctacagccgccaggcctggggtcctgaaaggaccttgggtggtaaagctgtacttggtgggagtgagggcgtggggaggaaccatgcaaatcgccttccatggtttttaaatgcagtaaataacatttctggatgagacttgtttccaaaataaaccagctatatctgttttgaaaacacaaaaagcaacgcacagcacacacgcccacacacggcggcaaaaacaaggagacccagcaactccgagacacaaaagaagacaaaaagaggcgcgcgcaaaaagtaaaccacacaggggaggccacaaatagcagagcacaccgacatagaaacagggcgcaccaatgcaggagcgcgatacaacgccgacgagcagggcgcgagaaacaaacacgacgaggcggagagaacacggtgccgcacggagagctggggagagccccccacacgcgagcggcggacacataagggagccccacaccacagagaggaagaccaccgaggacacaaacacaccgaacaggacgtgcaagacacacgacgcatcgccgccggcgcgagaggaggcagagagacgacacagaaat

SEQ ID NO: 356367 - DNA, 938 bp, Homo Sapiens
tgacatacggtctaggtagcgaggcctgggtggctgaattcggcacgaggctggacgccaaggagttttcggtggctcagctgggtaaccggggatcaccatggcggcctcaatggtggggaagaagatcgtgtttgtaacggggaacgccaagaagctggaggaggtcgttcagattctaggagataagtttccatgcactttggtggcacagaaaattgacctgccggagtaccagggggagccggatgagatttccatacagaaatgtcaggaggcagttcgccaggtacaggggcccgtgctggttgaggacacttgtctgtgcttcaatgcccttggagggctccccggcccctacataaagtggtttctggagaagttaaagcctgaaggtctccaccagctcctggccgggttcgaggacaagtcagcctatgcgctctgcacgtttgcactcagcaccggggacccaagccagcccgtgcgcctgttcaggggccggaactcgggccggatcgtggcacccagaggctgcaggacttttggctgggacccctggctttcagcctgatggatatgagcagacgtacgcagagaatgcctaaggcggagaagaacgctgtctcccatcgcttccgggccctgctggagctgcaggagtactttggacagttgggcagcttgacttctgcagctggaggaggcccctcaggccggggatctggggagggctagcccaaaacttccgatcgggcagggacccctggaatacttccttcaggtttaccccttagtgagggtgtcgagtagactcacgggctgtctcgaggaggcagtggctctgtctgcgaaatctggcaagtggagccatactttgccttagattactgtctctctaccagcgcaggctggggcctgaaggacctgggtggtaa

SEQ ID NO: 356368 - DNA, 966 bp, Homo Sapiens
  misc_feature (609)..(609): n is a, c, g, or t
gggtggcgaattcggcacgaggcggggatcccatggcggcctcattggtggggaagaagatcgtgtttgtaacggggaacgccaagaagctggaggaggtcgttcagattctaggagataagtttccatgcactttggtggcacagaaaattgaccgtacaggggcccgtgctggttgaggacacttgtctgtgcttcaatgcccttggagggctccccggcccctacataaagtggtttctggagaagttaaagcctgaaggtctccaccagctcctggccgggttcgaggacaagtcagcctatgcgctctgcacgtttgcactcagcaccggggacccaagccagcccgtgcgcctgttcaggggccggacctcgggccggatcgtggcacccagaggctgccaggactttggctgggacccctgctttcagcctgatggatatgagcagacgtacgcatagatgcctaaggcggagaagaacgctgtctcccatcgcttccggggcctgctggagctgcacgagtactttggcagtttggcagcttgaactttctgcagctgggaagaaggccccctcaggcccggggaatctgggggagggctnagccccaaaaacctcccgcatccgggcaggcacccccccaaagtacttccttcaagggtttcccccttttggtgaagggtgcccaagtaacctcaccggcctgtctggaggagcagctggctctgctctgagaaactctggcaagtggacgccattctcttgcccttaggattcactgctctctcctacagccgccaggcctgggtcctgaaaggaccttgggtggtaaagctgtacttggtgggagtgagggcgtggggaggaaccatgcaaatcgccttccatggtttttaaatgcagtaaataacatttctggatgagacttgtttccaaaataaaccagctatatctgttttg

SEQ ID NO: 356369 - DNA, 848 bp, Homo Sapiens
  misc_feature (490)..(490): n is a, c, g, or t
  misc_feature (721)..(722): n is a, c, g, or t
  misc_feature (785)..(785): n is a, c, g, or t
  misc_feature (797)..(797): n is a, c, g, or t
  misc_feature (813)..(813): n is a, c, g, or t
actgacctaatataatgccagcgttggtaaccattgacatagttaagaatcgcagtacttagaatttgtatttacaactagaagtgttaaaacaacattcctcatatagaaataatttaggcatatttgtatatgtgttattggtcagaatgatttatttacataacccatttctgctgttcagcagtataacaattgaataacaatttcattaaaatgtttacatatttaatcacaaaacagtttaatcattttatgatgttgctactactccataatttcaaaataattaaaactaatatgaagtggccacatggccacatggtcctagagacatatagttaataccttgtgttaaatataaatgcaccaagtaaatccgatataatatgcattcataataaatgtaggtgaacccacaaggctgatagaactcagaaataaactcaacatacaataatactgcttgagccagaaatacctgaagttnttatatttccaatttatatgtagtagatgcttaaagtggaaaatagtcgtatgatgacttattaagcaatgaagtcagcacagtttctatttggacagaaaaatctgactttatatttcttttctctctctacgtctgatagctggtgtgaattttatcttgctttgcatcactgccatagctgttcgcatttatcagcagaaaagggttatataaaaagaagtgaggcannaaggtcagaggaatggtagacagtgctgaggctgttcctggaaaaggtggagccttaatattncaaaatgccagncaatggaaaatccagnaaaggagtaccttccttcctgaattgggcagccta

SEQ ID NO: 356370 - DNA, 1076 bp, Homo Sapiens
tggaccggtccggaattttcgggatcaggatactgcactggcaggtgcgcagggcttcacaggctgcctctctgcagtgcagctcagccacgtggcccctctgaaggcagctctgcaccccagccacccagaccctgtcactgttacaggacacgtgactgagtccagctgtatggcccagcctggcactgatgccacatcaagggaaaggacacactcgtttgcagatcattctggaacaatagatgacagagagccccttgctaatgcaatcaaaagtgactctgcagtaattggaggtctgatagctgttgtgatttttatcttgctttgcatcactgccatagctgttcgcatttatcagcagaaaaggttatataaaagaagtgaggcaaaaaggtcagagaatgtagacagtgctgaggctgttctgaaaagtgagcttaatatacaaaatgcagtcaatgaaaatcagaaagagtacttcttctgattggcagctatgatttaacataaaattatgatagtttgttttaatagccaggggttctcaatggaaaaacgaatgctcttacactgaatgtacaggcagtgggcttgcagcactgccatcttgccatgtacaggcttggggtggctccaggaagcctcatccagtgatatatttctcatagcattcattctatggaacaagaaattagatattgctgttaattttcaactgttctggtatgatctaaaacaagtttaacctgcttaaatggctacagtttttacatgtgaaaactgtagccttggtctcttaaccatgtaatacataagttttgttagaggtaaaaattaaatttggactataatgtccttgctttatttgagaacatttgctgtgtttgcttttgtctcctcgtggtgttattcatagacctggaaatgcttctcagatcctgtgtggccggtgtttgcatcttcagtggccacaagcataataaagcccctttgcctttctctgtattatattcaatacaatacatcaatagtcttgaaaaatgttttgctgtctttgctttgtttgtatt

SEQ ID NO: 356371 - DNA, 1630 bp, Homo Sapiens
  misc_feature (1441)..(1546): n is a, c, g, or t
  misc_feature (1548)..(1560): n is a, c, g, or t
  misc_feature (1568)..(1568): n is a, c, g, or t
agatcatacagctggaaagtgggcaagtgcacatggatggagagagggatggaaaccacttccataatacagcctggtctgcaccttcttcacccatagtcctccagttctgtattcttggtcctgtattcagtatctcaacacagaccttgcttcccacctgagctcatgctgcatcttctctagcccaggaggtgccctctgggagtttacatccagcccttacatgtctctcttagccagagtagtagcagaaaaatagctagcctcaggagcatgtcctctgagctaggcccagagcgccctgctctggagggaaaggtttggatggtttctaaatttgggggctgctgtaaaagccacaaactctcttgtgatgacgtaccttctgtgtggggcctaagacttgatgttctgctatttgatcaagctttatataaatttgtgggcttcaatttaacctttggctaaattggttgttttctgaacatttcaggaggcttcaagaatgttcaggaagccaaggctacatgaagcccccctaggctgggagggctgcctctttgcatgaagctccatggtttcctttctgcacaatagtaggaacctctgagcacttcctcttcattctctacctatccatatccctaagacaggcagaccctcttgcacggtggctatcatgtttttacgttctaaatcttgggggtctttcaaactctccatggtccttcttatcgtgatcaaaaccctgtctgaattcctctgctgctggcattggctggctctggcttcctgcaaaaacgcttacctgtctctgtacccatctaaaaggtaagtttcctgctcctgagtgtggagaaggaggagcaactccttcacatgttccagacactgcctggacctaggttcccccaaatgaacacgcacacacaaacagcaggtgacagcagtatttacccagagagaattggaggaggtgaggggaccatctctgaaaaagagaagggaaattcagggtgaagatatttgcatgtgaagtctgacttcctggagtttgagggggtcctctatacatgtgttccctccgtctccaaggccacctcctctcagctttctccattgcatccccttcccatattctctctcctttcatccctgtgccactcccaaagcccctgcactttccggagcaacgtatcagtccccaaaccccactcatgtcatgtggatggcacagcttccagtggggctgtgcctctagcgatctccccagacctggcgtcaccactgtggataagaaagatgggacacccagtgccatggtggaggccatcatgccgcagaggagggtggcagaagcttctcaagcaggaatgcattaagttttgttttgtcttttaaaaacctcacccagaggccaggcatggtggctcatccnnnnnnnnnnnnnnnnnnnnnnnnnnnnnnnnnnnnnnnnnnnnnnnnnnnnnnnnnnnnnnnnnnnnnnnnnnnnnnnnnnnnnnnnnnnnnnnnnnnnnnnnnncnnnnnnnnnnnnnttaaccangcttggttgcaagcactgcggtcccagctactagggaagctaaagcataaaaaccacctgaa

SEQ ID NO: 356372 - DNA, 841 bp, Homo Sapiens
  misc_feature (12)..(12): n is a, c, g, or t
  misc_feature (15)..(15): n is a, c, g, or t
  misc_feature (18)..(18): n is a, c, g, or t
  misc_feature (25)..(27): n is a, c, g, or t
  misc_feature (33)..(33): n is a, c, g, or t
  misc_feature (35)..(35): n is a, c, g, or t
  misc_feature (46)..(46): n is a, c, g, or t
  misc_feature (49)..(49): n is a, c, g, or t
  misc_feature (51)..(51): n is a, c, g, or t
  misc_feature (57)..(57): n is a, c, g, or t
  misc_feature (68)..(68): n is a, c, g, or t
  misc_feature (70)..(70): n is a, c, g, or t
  misc_feature (98)..(98): n is a, c, g, or t
  misc_feature (104)..(104): n is a, c, g, or t
  misc_feature (106)..(106): n is a, c, g, or t
  misc_feature (110)..(110): n is a, c, g, or t
  misc_feature (113)..(113): n is a, c, g, or t
  misc_feature (125)..(125): n is a, c, g, or t
  misc_feature (135)..(135): n is a, c, g, or t
  misc_feature (138)..(138): n is a, c, g, or t
  misc_feature (201)..(201): n is a, c, g, or t
  misc_feature (216)..(216): n is a, c, g, or t
  misc_feature (554)..(616): n is a, c, g, or t
cccccccgcgantanccncctcggnnnctgtgntngatcccgggcngcntnatgccntccccttttgncnccgattgcagaaccagacccgcaccacntctttntngagntgnaggctgtcggcncaggttggtnatntcctgcgcggagggcttggggcacttgaggaagtggctctccagcgcgcccttgacgctcacntcgatagaggtccgnttcttgcgcttgcgcccctgcgccgcgatctggtcgatgctcgtggggctgcccgagcacgagtccgcctcctccagacacttgttcaacaaaggcttcagcttgcacatgttcttgaagctcagctgcagggcctcgaaccgtgcagatggtggtctgcgagaacacgttgccatacagggtgcccagagccaaccccacgtccgcctgcgtaaagcccagtttgatccgccgctgcttgaactgcttggcgaactgctccaggtcgtccgacgtcggcgtgtcctcgtccgagtgcgggtcgtggtgcgcgcctgggtggccaggcggaccctgcnnnnnnnnnnnnnnnnnnnnnnnnnnnnnnnnnnnnnnnnnnnnnnnnnnnnnnnnnnnnnnntggtgtggctcgtcgtgcgcgtcccgcaggccgtggtggtgcagcccggccggctgcccgccggcgcccagcatgccgttcaccgtgaagctgggctgcgagtagagcaagccgccgttggacgctcccatggagggtgggaggtgcgctgcagccgccgcgctccgccatgccccgggtcccgggtggtggttagcggcgtggtgcaccagatgcggcggccgc

SEQ ID NO: 356373 - DNA, 545 bp, Homo Sapiens
  misc_feature (54)..(54): n is a, c, g, or t
ccacctccagctgccgcctctgcacagagcctgcacccggtgctccgagagccnccggatcacggcgaactgggctcgcaccattgccaggatcactccgacgaggagacgcaaacctctgatgagttggaacagttcgccaaacaattcaaacaaagaagaatcaagttgggcttcacgcaggccgacgtggggttggcgctgggcacactgtatggtaacgtgttctcgcagaccaccatctgcaggttcgaggccttgcagctgagcttcaaaaatatgtgcaagctgaagcccctgctgaacaagtggctggaggaggcggattcgtccacagggagcccgaccagcattgacaagatcgctacacagggccgcaagcgcaagaagcggacctccatcgaggtgagtgtcaagggcgtactggagacgcatttcctcaagtgtcccaagcctgccgcgcaggagatctcctcgctggcagacagcctccagttggagaaggaagtggtgcgtgtctggttctgtaatcgaagacaaaaaaa

SEQ ID NO: 356374 - DNA, 1466 bp, Homo Sapiens
  misc_feature (26)..(26): n is a, c, g, or t
  misc_feature (96)..(96): n is a, c, g, or t
  misc_feature (102)..(102): n is a, c, g, or t
  misc_feature (108)..(108): n is a, c, g, or t
  misc_feature (114)..(114): n is a, c, g, or t
  misc_feature (172)..(172): n is a, c, g, or t
  misc_feature (223)..(223): n is a, c, g, or t
ggggtccgcgtcgcttaataaacatnccacacatatattcgcagggacaacatgatagaagtatccgcaggcgctcttcccttagaatatgggcgngacttntctccngtccgnggagatcgtcctctcacaggcattccggaggtatagctctgcaaggggtgcctctgangaaagacttgcacattgtccaggcgtggtaaagccttactctgggcgcgangtgaacattcttgagaaagcagacggaaccctcctcgtctacctgacgaaggaccgaggctcttcccgttcatggagaagcatgcgatcggctcggaatccagcatccctgtgcatataaccacatctgccagcgcaaatatgtcacggtgagagcgggcgccggctcaagcctaccaacctcggcatcgtcatggtgcacggctaatataagattgatgcagagctggtgctcccccaccatccgcagtgcagtggagaagcagctgaacctgatcgcccagggcaaggccgactaccgccaggtcctgggccacaccctggacgtgttcaagaggaagttccactactttgtcgactccattgctggcatggatgagttgatggaggtgtctttctcgcccctggcggccacaggcaagcccatctcacgctgtgggaagtgccaccgcttcatgaagtacatccaggccaagccaagccgcctgcactgctcccactgcgatgagacctacacgctcccccagaacggcaccatcaagctctacaaggagctccgctgccctctggatgacttcgagctggtcctgtggtcatcaggctctcggggcaagagctacccgctgtgcccctactgctacaaccacccacccttccgagacatgaagaaaggcatgggctgcaacgagtgtacgcacccctcctgccagcactcgctgagcatgctgggcatcggccagtgcgtggaatgtgagagcggggtgctggtgctggaccccacctcgggccccaagtggaaggtggcctgcaacaagtgcaacgtggtagcgcactgcttcgagaacgcccaccgcgtgcgggtgtccgccgacacctgcagtgtctgtgaggccgccttgcttgatgtggacttcaacaaggccaagtccccactcccgggcgatgagacgcagcacatgggctgcgtcttttgtgaccccgtcttccaggagctggtggagctgaagcatgcggcctcctgccaccccatgcaccgcggtggaccagggagaaggcagggtcgagggcggggccgggccaggaggccccctgggaagcccaaccccagacggcccaaggacaagatgtcagccctggccgcctactttgtatgatgaccctgtcctccctcacccaggctgcagtgccatgcagacacctcatggcacttcaaactattaaaatgcattttatcttatccagaa

SEQ ID NO: 356375 - DNA, 848 bp, Homo Sapiens
tcgcggatatcgtcgaccacggcgtccgcagtgacatgagggtcatgtggcattaccagtaacaagctggcagcaaagcaaaggggggatggagtcagctgaaacccactgggatggtgccagcgaggggccttgaaagttgaggaggtttcaggtaagcagaaaacaggggtaatggcagccaggagccgaaacatgagcaaggctgtccccaagagcaaggccaagaagagttccttctgctgggacgagggatccaggagcttgaggcattgggagcaggcagcagagggcaggtgggcacagtgggcgtgcctttacagggctcccttctcccgccaggcatgggctgcaacgagtgtacgcacccctcctgccagcactcgctgagcatgctgggcatcggccagtgcgtggcaatgtgagagcggggtgctggtgctggaccccacctcgggccccaagtggaaggtggcctgcaacaagtgcaacgtggtagcgcactgcttcgagaacgcccaccgcgtgcgggtgtccgccgacacctgcagtgtctgtgaggccgccttgcttgatgtggacttcaacaaggccaagtccccactccccggcgatgagacgcagcacatgggctgcgtcttttgtgaccccgtcttccaggagctggtggagctgaagcatgcgggctcctggcaacccatgcaccaggagtggaccagggagaaggcaggggtcgagggccggggccgggcagggagggcccctggggaaagccaaacccagaacggcccaggacaagatgtcagcctggcgcctacttcgatgatgaccctgtcctccctaccaag

SEQ ID NO: 356376 - DNA, 1700 bp, Homo Sapiens
aagcaggctggtaccggtccggaattcccgggatgccccgggaacaaggaccggagctggatccgcggtgcggctgtgggagtcagcattggtaatagtgctgtgctgcggaagagtggagtctaaactttttcattgccagtgccccgaacctggagtgtgaaggaccgagacaagatgaagactgtgctcatggttgctgaaaagccgtccttggcacagtcaattgccaaaatcctctctagagggagcctgtcctcacacaaagggctgaacggggcctgctcagtccacgagtacactgggacctttgctggccagccagtgcgcttcaagatgacgtctgtctgtggtcacgtgatgaccctggatttcctgggaaaatacaacaaatgggacaaagtggaccccgcagaactgttcagccaagctcccacggagaagaaagaagctaaccccaagctgaacatggtgaagttcctgcaggtggagggcagaggctgcgactacatcgtgctgtggctggactgcgacaaggagggggagaacatctgctttgaggttcttgatgctgttctgcccgtcatgaacaaggcccatggtggcgagaagaccgtgttccgggccaggtttagctccatcacggacacagacatctgtaatgccatggcctgcctaggcgagcctgaccacaacgaggcgctctcagtggatgctcgccaggagctggacctgcgaatcggctgtgcattcaccaggtttcagactaaatatttccaggggaaatacggtgatttagacagctctctcatctcctttgggccgtgtcagactccaaccctgggattctgtgtggagagacatgataaaatccagtccttcaaaccagagacctactgggtgctgcaggccaaggttaacactgacaaagacagatctctccttttggactggggaccgagtaagagtgtttgaccgggagatcgcacagatgtttttaaacatgacaaagctggagaaggaagcccaggtggaggccacaagcaggaaagaaaaggccaagcagaggcccctggccctgaacactgtggagatgctgcgtgtggccagctcttctctgggcatggggccgcagcacgccatgcagacggctgagcggctctacacgcaaggctacatcagctacccacggacagagaccacccactaccctgagaactttgacctgaagggctctctgcggcagcaggccaaccacccctactgggccaacacggtgaagcggttgttagcagaaggtatcaaccggcccgcggaaaggccatgacgccggcgaccatccccccatcacccccatgaagtctgccacagaggccgaattagggggttgacgcgtggcggctcttatgagtacattcaccagacacttctatcgccacgggtcagccactgactgcaagtacctgcagagcaccaatctccttcagaatttgggcccgagctcttcacctgcctccggaaagaccgtcctttaaccaggttttaggaaggaatgccctggcaaaacggtgcccttggggagagcctgtccaccttgcaggcgggggatgccttccctgggggcaaggggatattcttgagaaagaaaaaaaccccccccttcctgacgggggcgggcttatactctttggaaaacttgg

SEQ ID NO: 356377 - DNA, 824 bp, Homo Sapiens
ggccagccagggtggccaacagatccccggtcaggcagccttgctgcctttttccggtgggggctccactggcttccttcccacttgttcatgtttaaaacatctgtgcgatctcccggtcaaacactcttactcggtcataagtccaaaggagagatctgtcttttgtcagtgttaacctcaaagcagatgttctccccctcctgtcgcagtccagccacagcacgatgtagtcgcagcctctgccctccacctgcaggaacttcaccatgttcagcttgggcttagcttctgtgcttctccgtgggagcttggctgaacagttctgtcggggtccactttgtcccatttgttgtattttcccaggaaatccagggtcatcacgtgaccacagacagacgtcatcttgaagcgcatctggctggccagcaaaggtcccagtgtactcgtggactgagcaggccccgttcagccctttgtgtgaggacaggctccctctagagaggattttggcaattgactgtgccaaggacggcttttcagcaaccatgagcacagtcttcattttgtctcggtccttcacactccagtttcggggcactggcaatgataaaagtgttagactccactcttccgcagcacagcactattaccaatgctgactcctgtgagactggtacagcagatctcaccctaaagagccacagcagcacctgcaggatcacagtctccggtccttgttccccgggtgcggcaaccactcgaagccggattcaccacacctatatcctcagctacatatagacccagctatagttagagtc

SEQ ID NO: 356378 - DNA, 967 bp, Homo Sapiens
  misc_feature (891)..(927): n is a, c, g, or t
cagttccccagaaagagcgtgctgtttaaaagggtgagaaccccagcagagtggcagcaaatacagcatgcagactgtgcccagaagagccccatagaactgtgaggacacgacggggttctcccagtgcagcacgcggtaggcggcttcacatgtgcagcacaggcggctcaggaaggcctccagctggatcaagaagctcttcacctcagccacggcctcgggacgagacaggcgaactctctgcaggtcctcctgcctcacgctatgatacttcctccgcatcagctcggaatcaggcagccgtgcccggcaaacctcctgaaggtagcccagcagggcgggcactgaaatcatcagggcacctactgagtaccatgcaccctcattcaaagtgaggaacaagacgttgaggcccaggcaggtcagcaaggaacacaaaggcatctgccacctgagcaagtatcgaacaccatcacctgcatccttcaagggttccaggtagatctccagcctcttgtaggagagaaccaagttgaaaaggtcaaacgctggggacttggtaggaaaaggtggagactccaggggagcctcgggcatcacgctggggctcagctccggcccactcccctcacgttctgatgtctgcatcctacccggccgctggctccgtgagggaggcggcagggtcgggcaggagcaggggtagagccactgggccccggagcgtttcttcaggcctcccccggctgaacgccgctcctcctgccagggttgttcggaagtcgcaggtccgaaaatctcctccgcctacgccgcggccgccaccgccgcttccgggacgcaaatcccgctctcgacgaattcgagctcggccgatttggcctgatnnnnnnnnnnnnnnnnnnnnnnnnnnnnnnnnnnnnncgccgccaccgcgataaccgagggccctatagactagtca

SEQ ID NO: 356379 - DNA, 1071 bp, Homo Sapiens
  misc_feature (6)..(6): n is a, c, g, or t
  misc_feature (11)..(11): n is a, c, g, or t
  misc_feature (31)..(31): n is a, c, g, or t
  misc_feature (34)..(34): n is a, c, g, or t
  misc_feature (42)..(42): n is a, c, g, or t
  misc_feature (50)..(51): n is a, c, g, or t
  misc_feature (77)..(77): n is a, c, g, or t
  misc_feature (79)..(80): n is a, c, g, or t
  misc_feature (94)..(94): n is a, c, g, or t
  misc_feature (99)..(99): n is a, c, g, or t
  misc_feature (107)..(107): n is a, c, g, or t
  misc_feature (111)..(111): n is a, c, g, or t
  misc_feature (119)..(119): n is a, c, g, or t
  misc_feature (127)..(127): n is a, c, g, or t
ggggangccanggcgccacccagtacccagntgngggagacnaagtccannagagctgccgcctttccttcgggatncnnccagtgccattgcncaccnacagcccnactnttggggtnaaatctcnaggctgaaatgctggtgcccacggtgagggcacgagtctcggagggcacgggcagggacaggtgaatggggcctgagagcggcacctctgtcccattacctgtcagcaggtgcacgctcacagcagtcaggggcatcagctccagccaggagccattgcctgagctggaggcctcagtgcccaggaaggcagggaaagcccgcatttcctgctgggtgctggcaggcgtaagtgacgcccagagctggctgtaggtggagctgacaggcaggcgggcagcccggcgctggaactgcaccaagggctgggagcgggcaccgggagagcctaggagaatgtgcaccaggtcctcatagaggatgagcgtggccggccgctcagggagcaggtagaggctgacagacgcatacaagggcagcttgtcaacacgccagggcacagagttggtgaggaagccagggcgggcagcagtgaccagcacccaggtgcccaagcgataactgaggggcagggtggccacaccctctgagtctgtggtgccagctgccagcagagtccggttcccaaacacatccactgaggcccgggccaggggcaccagctccccgctcacatacacctgcaccttgatcaggatctcctgcgggctggggggctccggcggcgacttgccgggagcccgggaggcgctgccgagcagcagccccagcagcggcaacagccgcgcgaggacgctggggccactcgccggcggcatcgcggggctaggccgggccctagcggtccatggctcccgcctggtcccgctcgcccggccccgcgcagccccagctctgcgccgcgcctcgcagctccggctcccgctcccgctgcggcgcccatcccgggaattccggaccggtaccagcggaagagaagggagagagggaaaaaggaaggggaac

SEQ ID NO: 356380 - DNA, 906 bp, Homo Sapiens
tgatgcccctggctgctgtgagcgtgcacctgctgacaggtaatgggacagaggtgccgctctcaggccccattcacctgtccctgcccgtgccctccgagactcgtgccctcaccgtgggcaccagcaattccagcctggagatttgaccccaagagtgggctgtgggtgcgcaatggcactggtgtaatccggaaggaaggccggcagctctactggaccttcgtctccccccagctggggtactgggtggccgccatggcctcccccacggctgggctggtcaccatcacgtcgggcatccaggacatcggcacctaccacaccatcttcttgctcaccatcctggcagccctggccctgctggtgcttatcctgctgtgtctgctcatctactactgccggaggcgctgcctgaagccgaggcaacagcaccgcaagctgcagctctcggggccctctgacggtaacaaacgagaccaggccacctcgatgtcccagctccacctcatctgtgggggacccctggaacccgccccgtcgggggaccccgaggctccgcctccaggccccctccactcggccttctccagctcccgggacttggcctcctcccgggatgacttcttccgcaccaagccgcgctctgccagccgcccggccgccgagccttcgggtgcccgcgggggcgagagcgccgggctcaagggcgctcgctcggccgagggccccggcgggctggagcccggcctagaggagcaccggcgggggccctcgggggctgcggccttcctgcacgagccgccctcgccgccgccgcccttcgaccactacctgggccacaagggggcggccgagggcaagacccccgacttcctgctgtcgcagtcggtggaccagctcggc

SEQ ID NO: 356381 - DNA, 830 bp, Homo Sapiens
tgatttatcctcttatatcctgctgagtgaagatgcctggggggaacaaacttgacagctggcttcccaagtacaggcgtaaatatgatgctatctgggactttagtggtgagaattcatgtctttagactcgatatttttctttaccgtgctcattgatgacgcatatgtgattcagatctctgaagtattcattgtaatctaaggcatatcccaccacaaataagtttggaatctcaaatccagcatagtcaggtctaaagccgtcacttctggatgttctcttcaccaacaaactggctaccttaatcatgttgggcttgtatttctctatattgctgagtagtgctttcatggtcctcccagttccgacaacatcctcaacaatgagaacattctttccagccagcgttgaaagatcatcgcctccgattatctgcatctcacccatggactggtcattcctgtaactttttagtctgatgaaatcaaccttcattgagacaaatcgatctgaatttcggctgatgttcttaaggtgttctacgagatcagcacagaatttgtaacctcctttaagcacacacaggaccatgatgtcactatatcctatgtctttcataatatccttggccagccgctcaattctgtccacaatgataccatgagggatgaggacatactccaagtctccataatagtgctgtgggtacgtgaataaattcaagtcataccctggccaatcatccataatcacgacgcctcgcccgtagtctggcgcctcctcgctgctcccggccatgtttctcccggggaacgcgggaagggaa

SEQ ID NO: 356382 - DNA, 2432 bp, Homo Sapiens
  misc_feature (1697)..(1697): n is a, c, g, or t
  misc_feature (1719)..(1721): n is a, c, g, or t
  misc_feature (1723)..(1723): n is a, c, g, or t
  misc_feature (1743)..(1743): n is a, c, g, or t
  misc_feature (1804)..(1804): n is a, c, g, or t
  misc_feature (1850)..(1850): n is a, c, g, or t
  misc_feature (2308)..(2308): n is a, c, g, or t
aaaataaagaaggcccctgggccggcccgagtgctctccccaaaaggagtctcggatctttgggcctaataggggttcaaagcccctggtgggcaaattaaggccaggacagaggaaatcaaggtggaggtaagaaatgaaggaaccgaggaaaaggtgaatcagatggagttggggagaaagggtggcaggaggcaggggatacccaggtcacgatctacagccacctcaacagcaaactccatctctaacccacctgagagggcacccagccacttggtgtgctggccacacccaccaagaggagtccacgtcttcaaaacgaaaacgaaaagaagccattgtgcacagaggcaccagggagacgaggtgactggtgtttgggcaccgtgggaggggttttctccagtctgtgtgcccgtctgtggtcttagccatggagtccgaggcagcctggcctgcctggaggtgcctcccctcagagctggccaggggttcagggatcaggcaggctatgctgagaggtcctcagggctcctcaggacagtccacagcgctcaggtgtggcccaggccaggtgcaggggaaggagcccgtttcccccaaagagcgaccccatcagtctctctcacactcttatcccaagttcttggagttaagggaagaagatggcgatggagttcagtccttctttttcttcttgagctgctgggcaagacgccggaggccgctgggaggagacccgctgatggaagggtggacggacacgtggaggggtgggggaagcaccattggccgtccgaatcaggcatcgagacagacggacgagggaaacaatattatcactccaaggaccccatgggggcaatacagcaaataccatattaaataaccctgcccacacactctcctgccgatgcccctaggctccaagggtctccttcagtgccgtcttgtcatgcgtgtgcttgaatttccggtgcttgcccttggggggccggcggactcgcaccgtccgaatggtcacccgagtttggggcgttttggctcgctgctcctgggaaccccccgggcttcgggtcacaggccgtgcagctgccactgtctcacacttgcatgccaggtggtcttccagcgtcaccgtggccttcttaaagattggcttcttccgcacaatctcgatctttctcacctggacaggtcgcagctgcacctgggtggggcggcactgcacgttgcggttgttgcagcagccggagcagcgctgcacctccacacagggcggccacaccaggaagttggcgttggtgcggtctatgaggcgccgggagatctcgaacacctcggtgcgcgtcttgcactcggcgatcatggccggctcagcaatggtcagggaacccaggctccttcttccacgagccaagctctccagctcgcctccagagtgggagcgggtcatgttcaggtccaactcggccccatcttcctctccggggtctccgtgcagcaggcgttggagatcatcaaaggagcggatcgagtggtcactcagcatctcataaagctcctcgggaatggggtccccctcggcgctgaccagacgcaggtagcagcagagagacaggaagagcgcccagcagcgattcatgccgactccgggcccgccccgcgggccccggacgcgtagatcgagcgcncccccccgcggccaggttggtnnntngggaggggggtgggctcggntcgggaccgcggcgatcaggcgctcaggcctctgcagccgcggctcacccgcatggccccncggcgccgccgcccccggccccggctccgtcgctggggggcagggnaggacctgggcgcaggacctgggtccgaggccgctacctgggcggatcccgagcccgagtgagcatccacggccggggggctgcgtcgcgaaccagccgaggcgtctagccgtgtgggggcgcccaggggactccaacctccaagaggaaaaggaacacggcagtcgatggttcgtcttcactcgccggctacaggcgttttcctctgcccgccggcttagcttttttgcaacattttctggaaaggcccccaaaatcggaaagcgcggagctgggcacctcaaggcccaagtctcccccaaaaaactttttccaaagttggctttgcaacggcagctcgagcacccgggcagggagaggtgcaaactcccgcccgggccgggtaggggggcgggagcgtgtgcgccctggcgcggggcccgggcggcgggcacggctgctccgcgcgcgcggcgtgncccctgcgcgctcggctgggcccggccgacaggtggacgcggcgcgagtccgtcggtccgtctgcccgcctgctcgccgctctgggcgtcctctgcgggctgcgggctgcgagctgcgagctgc

SEQ ID NO: 356383 - DNA, 1493 bp, Homo Sapiens
  misc_feature (44)..(44): n is a, c, g, or t
  misc_feature (50)..(50): n is a, c, g, or t
  misc_feature (52)..(52): n is a, c, g, or t
  misc_feature (55)..(56): n is a, c, g, or t
  misc_feature (75)..(75): n is a, c, g, or t
  misc_feature (99)..(99): n is a, c, g, or t
  misc_feature (117)..(117): n is a, c, g, or t
  misc_feature (122)..(122): n is a, c, g, or t
  misc_feature (200)..(200): n is a, c, g, or t
  misc_feature (205)..(272): n is a, c, g, or t
  misc_feature (335)..(336): n is a, c, g, or t
  misc_feature (359)..(359): n is a, c, g, or t
  misc_feature (419)..(419): n is a, c, g, or t
  misc_feature (422)..(422): n is a, c, g, or t
  misc_feature (425)..(426): n is a, c, g, or t
  misc_feature (444)..(444): n is a, c, g, or t
  misc_feature (446)..(446): n is a, c, g, or t
  misc_feature (454)..(454): n is a, c, g, or t
  misc_feature (456)..(456): n is a, c, g, or t
  misc_feature (458)..(459): n is a, c, g, or t
  misc_feature (462)..(463): n is a, c, g, or t
  misc_feature (466)..(467): n is a, c, g, or t
  misc_feature (1358)..(1370): n is a, c, g, or t
  misc_feature (1376)..(1376): n is a, c, g, or t
  misc_feature (1387)..(1387): n is a, c, g, or t
ccacaaaccccacaccatcacccccctcctccaacactttcatntccacnancannacatccacactttacatcnctctcttcacctcaccctctctcncactcccaacccaaaccnccctntcatcctcacctaccatcacatccccatgaaccacaaaacctcctacaaccccctcttcaactaccaccacatccacnacatnnnnnnnnnnnnnnnnnnnnnnnnnnnnnnnnnnnnnnnnnnnnnnnnnnnnnnnnnnnnnnnnnnnnctacatctacccctccatccatcacctttctcaaatccttcctccactccttcaacactttcnnctcaaaaccattattcgccatcncaacaccaccaggccgccctacatcctaacctccattttcctctaaacaaccctcacatnctncanncccttctccttatcaacntnaacccttntncnnaannctnnatggactgggccgcctccaaggtgaggtgggggcctgtcaggccggcgggatccctgcaagaagagggacaggtgcacacagcctctgcctggggggatccctggagctacgagctctctctttaccactcctccctaccctctactgcccactccagttccctctgctttacttagaacagtacacatgacctcagccgtttgccattcagaagacttaaataccaccaagctgtctaagccagggaaagcactgggacacaggtccctgaggcagcttggagaagcattgcttggattaatgagtattagctgggtacataacttgtgccaggctttggtcaagatgctgagcatcttgaagaacaagacttcttgagatgaacaagacaaaagcctctaggaatgaatcttaggaatccattcacatattattaaagaaaaataaatatgtatttagtacggactgtgccacagaattttacgataataattagctaacgtagattgagagtttaccatgtgctagtttcattctacgttgctgtgtgtgcatgatctcagttaatcttcatagtaactctaggaggtgagaatttttatcaccgtttcagaggtaaggactcggtgtggctaaggggattgtccagggtcacataaagctaggcagtagaacggggactggatgcagcttgctttgactttgtggttcgtggacctgaccacccgtgcccctggggctcctgtccaaggtgggagacaggcaggcctggcaagcagggtaggctgcctggaggaaaagggacctgtgctgtcttgggaagctctgtcctggctggggtcctaaggtccttggttatcttttaaaaataataatggggggcgtttggnnnnnnnnnnnnnccctgnaaaggctctangttgcccaggggaggggggagtatttcatttgaaaaagaacaagttcttcagctggggggatcggagcttttaattttgaaggcatttttgcccatattggtgggg

SEQ ID NO: 356384 - DNA, 920 bp, Homo Sapiens
  misc_feature (531)..(531): n is a, c, g, or t
  misc_feature (533)..(533): n is a, c, g, or t
  misc_feature (535)..(535): n is a, c, g, or t
  misc_feature (537)..(537): n is a, c, g, or t
  misc_feature (539)..(539): n is a, c, g, or t
  misc_feature (541)..(541): n is a, c, g, or t
  misc_feature (543)..(543): n is a, c, g, or t
  misc_feature (547)..(547): n is a, c, g, or t
  misc_feature (549)..(549): n is a, c, g, or t
  misc_feature (551)..(551): n is a, c, g, or t
  misc_feature (555)..(556): n is a, c, g, or t
  misc_feature (855)..(855): n is a, c, g, or t
  misc_feature (878)..(879): n is a, c, g, or t
  misc_feature (883)..(884): n is a, c, g, or t
atcaggccaaatcggccgagctcgaattcgtcgagagcgggctgttctgcatatgattctcagggcacactctgtggtatgtgaaataggtttccttccacatacagcagaagagaggcaaaggctggtaggaaggaggaagacattggctgggggcttggatgtggggccgtcagggcaggagggaggaagccccagctggaatgaaactcagagcaagtgaccgagggaggacacggctcctgccactgaggccgggcacctgatgcccagcactgtcctggcgccagacacagggagcaggcagtcaagtgaggtctgacccccatggccacgctcaggagagaaagaccatgctcaggacactgtccaaggtgcacaagatgctgggaggtcccttgtttggtgaagaaagggagcatttagagcagttgatggtggtgtgtcctccgtgttctgaaattacagatgatctgtgttggatttttggcttctaccccatgattctcctcaaagaaatcgtgtgtgatntntntntntntntgtntntntatnnctgtgtcacagggagatgcagtgcctgtacaggtgtgtacagtgtgtggatgtcattaacccatagggctatgcaacaaaagacacatttaatagaagtaaaacacacaagaccgctgcctggtctcggggtccagcatgatgtgtgaccaaacctttttatagaattctcttacctgaaggcacaacactctgaaactttaaagataacaggagtattttatcccaatagaataaaccagcgaatctcggaactgtgcatgttgatcactgtgcccctgttgcaagtaaaaggatgtntattttgaacaactgacgttttnncctnntcccagcccccagcccatgttatcttgggtgtcgaa

SEQ ID NO: 356385 - DNA, 1234 bp, Homo Sapiens
  misc_feature (364)..(446): n is a, c, g, or t
  misc_feature (1089)..(1111): n is a, c, g, or t
agcgtgtggggccgtcagggcaggagggaggaagccccagctggaatgaaactcagagcaagtgaaccgagggaggacacggctcctgccactgaggccgggcacctgatgcccagcactgtcctggcgccagacacagggagcaggcagtcaagtgaggtctgacccccatggccacgctcaggagagaaagaccatgctcaggacactgtccaaggtgcacaagatgctgggaggtcccttgtttggtgaagaaagggagcatttagagcagttgatggtggtgtgtcctccgtgttctgaaattccagatgatctgtgttggattcttggcttctaccccatgattctcctcaaagaaatnnnnnnnnnnnnnnnnnnnnnnnnnnnnnnnnnnnnnnnnnnnnnnnnnnnnnnnnnnnnnnnnnnnnnnnnnnnnnnnnnnngatgtcattaacccatagggctatgcaacaaaagacacatttaatagaagtaaaacacacaagaccgctgcctggtctcggggttcagcatgattgtgaccaaacctttttatagaatttccttacctgaaggcacaacactctgaaactttagagataacagagtattttattccaatagaataaaccaggaatctcggactgtgcatgtgatcactgtgctcctgttgcaaagtagaaggatgtgtattgtggacactgacgttttgtctcttgttccccagcccccagcccatgttatcttgggtgtcgaatgtgtccattccatgcagaaccacagccatttccccaggcagtgttgggtcgagaatccacttttctaaacccacacagcctagctggcttgtctagactcttctaggcattggaattgatgaaaactacagggagcggggaaaggagacattatgtcttgttttcctgactttgggttttgtttctcactgtgtcttctccggctatcatatatgtcccctgaatctcatagtgagctgccaaatttgaagtgcatcacccagttgtctgcatctggaaccagtcaagcagtggctgtagtttgaacaagttatgtgtgcatgtaacnnnnnnnnnnnnnnnnnnnnnnncaagtatgtgcatgataatgtatatcttcgtactttttgatacaatgtattcatttgttaatttttaattatatttgatataaatcaaaggtttgttgcaaaactttatatttaagaagtgtt

SEQ ID NO: 356386 - DNA, 991 bp, Homo Sapiens
  misc_feature (905)..(914): n is a, c, g, or t
gtgggggaggagggaaagcggcgagtaagatggaagatgaggaggtcgctgagagctgggaagaggcggcagacagcgggcaggaaatccaaatctcctcccaaagtgcccattgtgattcaggacgatagccttcccgcggggccccctccacagatccgcatcctcaagaggcccaccagcaacggtgtggtcagcagccccaactccaccagcaggcccacccttccagtcaagtccctagcacagcgagaggccgagtacgccgaggcccggaagcggatcctgggcagcgccagccccgaggaggagcaggagaaacccatcctcgacaggccaaccaggatctcccaacccgaagacagcaggcagcccaataatgtgatcagacagcctttgggtcctgatgggtctcaaggcttcaaacagcgcagataaatgcaggcaagaaaagatgccgccgttgctgccgtcaccgcctcctgggtcgtccgccacgggttgcactgccgtggcagacagctggacttgagcagagggaacgacctgacttacttgcactgtgatcccccttgctccgcccactgtgaccttgaaccccatgcactgtgacctccccccttctcccccttcccactgtgattggcacatcgacaagggctgtcccaagtcaatggaaagggaaagggtgggggttaggggaaggttggggggacccagcaaggactcagagagtcagacagtgccacttggccacttggggtaaagccagtgccagcaataacagtttatcatgctcattaatttgggatttcaaaacacaaatgaaaactcacacccacccacccccaagtgcatgtctccatcacttaaaaagtaagttccatttgaacaatatcctttcnnnnnnnnnncttcctatttttgtttgtttatacaaatatctgatttgcaagaaaagtgcatgggaggggtttagtggtttatgaat

SEQ ID NO: 356387 - DNA, 777 bp, Homo Sapiens
cggatcgcggggagggggtgggggaggagggaaagcggcgagtaagatggaagatgaggaggtcgctgagagctgggaagaggcggcagacagcggggaaatagacagacggttggaaaaaaaactgaagatcacacaaaaagagaggaaatccaaatctcctcccaaagtgcccattgtgattcaggacgatagccttcccgcggggccccctccacagatccgcatcctcaagaggcccaccagcaacggtgtggtcagcagccccaactccaccagcaggcccacccttccagtcaagtccctagcacagcgagaggccgagtacgccgaggcccggaagcggatcctgggcagcgccagccccgaggaggagcaggagaaacccatcctcgacaggccaaccaggatctcccaacccgaagacagcaggcagcccaataatgtgatcagacagcctttgggtcctgatgggtctcaaggcttcaaacagcgcagataaatgcaggcaagaaaagatgccgccgttgctgccgtcaccgcctcctgggtcgtccgccacgggttgcactgccgtggcagacagctggacttgagcagagggaacgacctgacttacttgcactgtgatccccccttgctccgaccactgtgaccttgaaccccatgcactgtgacctcccccctttctcccccttcccactgtgatttggcacaatcgaccaagggctgttcccaagtcaatggaaagggaaaaaggtgggggtaaggggaaag

SEQ ID NO: 356388 - DNA, 586 bp, Homo Sapiens
cctttcacacaagacaccgtcaataaaaagacgaggttccaaaacgtaaatccacttttaatccccattttcttcatcaggatgaagtctaggcggccacatttagcgcatcttcgcttgccaggctcccagggtttggattcctttgctcggctttcccctttgcggatccctttcatattattcgcgagctcctaattcctgctcctcagcccggcgcagtggagttgttgctgttgttggtgcgcggtcacagctcggagtgaatggtgtttctgggataccacagcaaccttgacgaggactcaaccatctctccaacgggggcacaaagtctccgctactctggattctgtcttttcttgtgtgttttttcccctccaccaaaatctaccccaattctggctcgttatagcaaccaccagaaaccactagtgagcctcttaaagcccacctctgctctctgataaactccacacaatatttgaaattaaggggcttgctttttttccccgaatagatcaattctgcctgtaaaagcagcccaagaaataatgttagtgagctctccgttgcaggctgcgaa

SEQ ID NO: 356389 - DNA, 2150 bp, Homo Sapiens
  misc_feature (888)..(888): n is a, c, g, or t
  misc_feature (2054)..(2078): n is a, c, g, or t
cgggatcccagagagctgaacctgcatcccggacctgcggcgaccgtcgtacaccatgggcctccacctccgcccctaccgtgtggggctgctcccggatggcctcctgttcctcttgctgctgctaatgctgctcgcggacccagcgctcccggccggacgtcaccccccagtggtgctggtccctggtgatttgggtaaccaactggaagccaagctggacaagccgacagtggtgcactacctctgctccaagaagaccgaaagctacttcacaatctggctgaacctggaactgctgctgcctgtcatcattgactgctggattgacaatatcaggctggtttacaacaaaacatccagggccacccagtttcctgatggtgtggatgtacgtgtccctggctttgggaagaccttctcactggagttcctggaccccagcaaaagcagcgtgggttcctatttccacaccatggtggagagccttgtgggctggggctacacacggggtgaggatgtccgaggggctccctatgactggcgccgagccccaaatgaaaacgggccctacttcctggccctccgcgagatgatcgaggagatgtaccagctgtatgggggccccgtggtgctggttgcccacagtatgggcaacatgtacacgctctactttctgcagcggcagccgcaggcctggaaggacaagtatatccgggccttcgtgtcactgggtgcgccctgggggggcgtggccaagaccctgcgcgtcctggcttcaggagacaacaaccggatcccagtcatcgggcccctgaagatccgggagcagcagcggtcagctgtctccaccagctggctgctgccctacaactacacatggtcacnctgagaaggtgttcgtgcagacacccacaatcaactacacactgcgggactaccgcaagttcttccaggacatcggctttgaagatggctggctcatgcggcaggacacagaaagggctggtggaagccacgatgccacctggcgtgcagctgcactgcctctatggcactggcgtccccacaccagactccttctactatgagagcttccctgaccgtgaccctaaaatctgctttggtgacggcgatggtactgtgaacttgaagagtgccctgcagtgccaggcctggcagagccgccaggagcaccaagtgttgctgcaggagctgccaggcagcgagcacatcgagatgctggccaacgccaccaccctggcctatctgaaacgtgtgctccttgggccctgactcctgtgccacaggactcctgtggctcggccgtggacctgctgttggcctctggggctgtcatggcccacgcgttttgcaaagtttgtgactcaccattcaaggccccgagtcttggactgtgaagcatctgccatggggaagtgctgtttgttatcctttctctgtggcagtgaagaaggaagaaatgagagtctagactcaagggacaattggatggcaagaatgctgcttgatggtggaacttgctgtgaccttaggactggctccacagggtggactggctgggcccctggtcccagtccctgcctggggccatgtgtcccccctattccctgtggggcttttcatacttgcctactggggcccctggcccccgcagcccttcctatggagggatgttactgggggcctgtgggtcctgtaccccagaggttcccaggggatcgggcttcctttggcccctccggggtgacacccttccccacaacaccagcccaccaagataagggccctggccaacttggggtcctgtgggtagcctaagaaccttgctgggggctttccctggtgggcctttacccctggtgggcccaacccctgaacttgggcttttcctgggggccaaagccttaggtaagttttccctgccaaggcaagggggccacactttttgtttcggccattcctttccgcggggttttccccacggggccccttggggaaacattcttttaactttccaactttccctaaannnnnnnnnnnnnnnnnnnnnnnnnggggaaacccatttttcaaaagaccttcttggggaaatttgggggcccaaccccacaaaattgttcgccccc

SEQ ID NO: 356390 - DNA, 1058 bp, Homo Sapiens
  misc_feature (870)..(870): n is a, c, g, or t
tcaaggtaatgttagtatctgagatgcaggttttgattgatagcttataaaaatttaatttacttatttgtgcttcagagataacacagagccactgtttctgtattctgtgtttttaaagtttaagcaaagtgttgagaggcatttcagttcaagcatggagtgttgaaaataaattccagagcctccctggtacaaacagactgaatatgttaatggtaaccttcacttcctgtccctgctgtttctccattgtgggccactaatgcctttcctttttgtagatttcatagccattcttggcctccctgaatttctctgcttttccatgggcctttaggaagaatgagctggcccgttttcctcgttcctggacactgcctatctgggcacactgatttgtatgagccaacctgctaatcttaaatttcctatattccaagacaggttttacttgattgatttacaagtttttacatccacctagagagtcagaatctcctttggaaggtaactgcagtccagaacattagactctaagggcatatacttccaagcagcctggccacttctctctgggtccctccatgtctgctgagagcctgtgcttctcacctgcacttcttcacccggtttcatgagtgtgctttgctgactgtactgggtagggaaggagctggctcttaaacctgctggcaaatgacttcagttttaaattgatcctgagggagatatatttacgtctgagttaaaataatgaatttacatatatgtgaaaataattcctcctttattgatggtatttaaaatcaagactggagcttattttaaatgagccagaatatttgcaattttcaaccaatgtggttnatagaagggcatttctccttagaaaaaagttaacttggtttcttttttctggaattggtaaaattaagcaaattattatttcgaaaagaaacaaaaaagcatgttggttattgggaaatacaagggaatacgtgggaaaaaaattcccagtaatgggttagggaaaacaacttgggtttcattaagtt

SEQ ID NO: 356391 - DNA, 295 bp, Homo Sapiens
  misc_feature (79)..(89): n is a, c, g, or t
ttattatccctgttttataaccagtgttatggacatccaaggacaatgttgattttgttaataaacagtgcatcaaatnnnnnnnnnnngaaatactctggagattgaagatgcctatgagctccaaagcatcgattcctctcctaagtgtagctcctaaagaaattgttgatcctgggcacagagagacatgcaaataacagttattgcaatgttgctggtaatagtggaaaaattggaaacaacctaaatcagtgattctcaaacttgtctgcatgtaagaattaccaggaga

SEQ ID NO: 356392 - DNA, 1555 bp, Homo Sapiens
aattctccggatcccgccgctcctccacgctcgtgccgccccccccgcgctcccagttgacgctctgggccgccacctccgcggaccctgagcgcaagagccaagccgccagcgctgcgatgtgggccacgctgccgctgctctgcgccggggcctggctcctgggagtccccgtctgcggtgccgccgaactgtgcgtgaactccttagagaagtttcacttcaagtcatggatgtctaagcaccgtaagacctacagtacggaggagtaccaccacaggctgcagacgtttgccagcaactggaggaagataaacgcccacaacaatgggaaccacacatttaaaatggcactgaaccaattttcagacatgagctttgctgaaataaaacacaagtatctctggtcagagcctcagaattgctcagccaccaaaagtaactaccttcgaggtactggtccctacccaccttccgtggactggcggaaaaaaggaaattttgtctcacctgtgaaaaatcagggtgcctgcggcagttgctggactttctccaccactggggccctggagtctgcgatcgccatcgcaaccggaaagatgctgtccttggcggaacagcagctggtggactgcgcccaggacttcaataatcacggctgccaagggggtctccccagccaggctttcgagtatatcctgtacaacaaggggatcatgggtgaagacacctacccctaccagggcaaggatggttattgcaagttccaacctggaaaggccatcggctttgtcaaggatgtagccaacatcacaatctatgacgaggaagcgatggtggaggctgtggccctctacaaccctgtgagctttgcctttgaggtgactcaggacttcatgatgtatagaacgggcatctactccagtacttcctgccataaaactccagataaagtaaaccatgcagtactggctgttgggtatggagaaaaaaatgggatcccttactggatcgtgaaaaactcttggggtccccagtggggaatgaacgggtacttcctcatcgagcgcggaaagaacatgtgtggcctggctgcctgcgcctcctaccccatccctctggtgtgagccgtggcagccgcagcgcagactggcggagaaggagaggaacgggcagcctgggcctgggtggaaatcctgccctggaggaagttgtggggagatccactgggacccccaacattctgccctcacctctgtgcccagcctggaaacctacagacaaggaggagttccaccatgagctcacccgtgtctatgacgcaaagatcaccagccatgtgccttagtgtccttcttaacagactcaaaccacatggaccacgaatattctttctgtccagaagggctactttccacatatagagctccagggactgtcttttctgtattcgctgttcaataaacattgagtgagcacctccccagatggaaccacaaaaaagataccagacaagagacagaagcacgaagacacgaatgaacaaaagaggggg

SEQ ID NO: 356393 - DNA, 488 bp, Homo Sapiens
  misc_feature (269)..(269): n is a, c, g, or t
  misc_feature (362)..(362): n is a, c, g, or t
  misc_feature (396)..(396): n is a, c, g, or t
  misc_feature (424)..(424): n is a, c, g, or t
  misc_feature (471)..(471): n is a, c, g, or t
caactggaggaagataaacgcccacaacaatgggaaccacacatttaaaatggcactgaaccaattttcagacatgagctttgctgaaataaaacacaagtatctctggtcagagcctcagaattgctcagccaccaaaagtaactaccttcgaggtactggtccctacccaccttccgtggactggcggaaaaaaggaaattttgtctcacctgtgaaaaatcagggtgcctgcggagattagctgggactttctccaccactggggnccctggggagtctgcgattcgccattcgcaaccgggaaagatgctgttccttgggcgggaacaggcagctgggtgggacttgcgcccagggantttcaataattcacgggcttgcccaaggggggtnttccccaggccagggtttttcggagttntattcctgttaaccaacaagggggtttcatgggggttgaaggacacnttaccccttaccagggg

SEQ ID NO: 356394 - DNA, 852 bp, Homo Sapiens
ggggaggagcggagcggcaggaacccaataacctgcttcgcctcggagctgaagcccgtactcaagatggcggctccgggcgggcgtggccagtgactagaaggcgaggcgccgcgggaccatggcggcggcggcggacgagcggagtccagaggacggagaagacgaggaagaggaggagcagttggttctggtggaattatcaggaattattgattcagacttcctctcaaaatgtgaaaataaatgcaaggttttgggcattgacactgagaggcccattctgcaagtggacagctgtgtctttgctggggagtatgaagacactctagggacctgtgttatatttgaagaaaatgttgaacatgctgatacagaaggcaataataaaacagtgctaaaatataaatgccatacaatgaagaagctcagcatgacaagaactctcctgacagagaagaaggaaggagaagaaaacataggtggggtggaatggctgcaaataaaggataatgatttctcctatcgacccaacatgatttgtaactttctacatgaaaatgaagacgaagaagtggtagcttcagccccagataaatctttggaattggaagaggaagagattcaaatgaacgacagttcaaacctgagttgtgaacaggagaaaccaatgcacttggaaatagaagattctggtcctcttattgatataccttctgagacagaaggttctgtttttatggaaactcaaatgctgccttagaaatcactcctagatgaaatgtttctcataataacttgtcaagaactttttagagttgttacataaaaataattgctgtgtaaaaaaaa

SEQ ID NO: 356395 - DNA, 1369 bp, Homo Sapiens
  misc_feature (232)..(242): n is a, c, g, or t
  misc_feature (1317)..(1317): n is a, c, g, or t
atcaggccaaatcggccgagctcgaattcgtcgagagcgggcttacacagtatggccggcgacattagctagcgctcgctctactctctctaacgggaaagcagcggaatacaagagactgaactgtatctgcctctatttccaaaagactcacgttcaactttcgctcacacaaagccgggaaaattttattagtcctttttttaaaaaaagttaatataaaattatagcnnnnnnnnnnnggaacctgaactttagtaacacagctggaacaatccgcagcggcggcggcagcggcgggagaagaggtttaatttagttgattttctgtggttgtgggttgttcgctagtctcacggtgatggaagctgcacattttttcgaagggaccgagaagctgctggaggttgggttctcccggcagcagcccgacgcaaaccaaggatctggggatcttcgcactatcccaagatctgagtgggacatacttttgaaggatgtgcaatgttcaatcataagtgtgacaaaaactgacaagcaggaagcttatgtactcagtgagagtagcatgtttgtctccaagagacgtttcatttggaagacatgtggtaccaccctcttgctgaaagcactggttcccctgttgaagcttgctagggattacagtgggtttgactcaattcaaagcttcttttattctcgtaagaatttcatgaagccttctcaccaagggtacccacaccggaatttccaggaagaaatagagtttcttaatgcaattttcccaaatggagcagcatattgtatgggacgtatgaattctgactgttggtacttatatactctggatttcccagagagtcgggtaatcagtcagccagatcaaaccttggaaattctgatgagtgagcttgacccagcagttatggaccagttctacatgaaagatggtgttactgcaaaggatgtcactcgtgagagtggaattcgtgacctgataccaggttctgtcattgatgccacaatgttcaatccttgtgggtattcgatgaatggaatgaaatcggatggaacttattggactattcacatcactccagaaccagaattttcttatgttagctttgaaacaaacttaagtcagacctcctatgatgacctgatcaggaaagttgtagaagtcttcaagccaggaaaatttgtgaccaccttggttgttaatcagaggtctaaatgtcgcacaaggcttgcttcgccccaaaaagattgaaggttttaagcgtcttgattgccagagtgctatgttcaatgattacnattttgtttttaccagttttgctaagaagcagcaacaacagcagagttgatt

SEQ ID NO: 356396 - DNA, 987 bp, Homo Sapiens
  misc_feature (803)..(803): n is a, c, g, or t
cgacccgccacccgccgtagcccgcgcgccctggcactcaatccccgccatgtgggggctcctgctcgccctggccgccttcgcgccggccgtcggcccggctctgggggcgcccaggaactcggtgctgggcctcgcgcagcccgggaccaccaaggtcccaggctcgaccccggccctgcatagcagcccggcacagccgccggcggagacagctaacgggacctcagaacagcatgtccggattcgagtcatcaagaagaaaaaggtcattatgaagaagcggaagaagctaactctaactcgccccaccccactggtgactgccgggccccttgtgacccccactccagcagggaccctcgaccccgctgagaaacaagaaacaggctgtcctcctttgggtctggagtccctgcgagtttcagatagccggcttgaggcatccagcagccagtcctttggtcttggaccacaccgaggacggctcaacattcagtcaggcctggaggacggcgatctatatgatggagcctggtgtgctgaggagcaggacgccgatccatggtttcaggtggacgctgggcaccccacccgcttctcgggtgttatcacacagggcaggaactctgtctggaggtatgactgggtcacatcatacaaggtccagttcagcaatgacagtcggacctggtggggaagtaggaaccacagcagtgggatggacgcagtatttcctgccaattcagacccagaaactccagtgctgaacctcctgccggagccccaggtggcccgcttcnattcgcctgctgccccagacctggctccagggaggcgcgccttgcctccgggcagagatcctggcctgcccagtctcagaccccaatgacctattccttgaggcccctgcgtcgggatcctctgaccctctagactttcagcatcacaattacaaggccatgaggaagctgatgaagcaggtac

SEQ ID NO: 356397 - DNA, 1157 bp, Homo Sapiens
  misc_feature (48)..(48): n is a, c, g, or t
  misc_feature (60)..(60): n is a, c, g, or t
  misc_feature (92)..(92): n is a, c, g, or t
  misc_feature (98)..(98): n is a, c, g, or t
  misc_feature (110)..(110): n is a, c, g, or t
  misc_feature (136)..(136): n is a, c, g, or t
  misc_feature (222)..(243): n is a, c, g, or t
gggtagggtacctgaaaacagtggaaaaaaagggaaaaagaaggaatnccgggaaagggnacggaataaaaaagggaacaaggcacaaaccncctgcnccggccgtgcanaaaatttccaagtggaaacagcgtgnattccgacacataagggcttgtgctttttccattaaaagaaataactcgccctgaaaaagctcatttggcaaatgtggccatgaannnnnnnnnnnnnnnnnnnnnnaaatgaggttctatgtcaagtcctgtgagtgtgtcctactggcccctcccccactgtcacacccacctcaccagcaaggaaaaactgatggtttacacctggtcagtctgatattcagaagcttctgacaggctttctgagaagcttaggaaattctcctggtactcagagcaaacaatctcatagcggtaatgccggaactccacggcaaaggtgccaaaataagacaggaagcacatgaccaggccccactggaccctggctgcatacatgtggatgctttgggccatgaggatgaagtagaggaccacacagagagtgatagatgccgacagaataacccgtggaattccaactctccgtccttcattcttgatgttgaccttgagtgtcagcgcagcctggatccagcaggtcaatgtgccaaatccaaaggtcaaggaagttccgacgttatggatttacttcatacaatttgtgagcatgaaaaattaccaagtaaggtcattccgaaggaagccagacacagagccaccaatccactaatattcagccacgggtttaaaaccttcggtttcagttgtatgaagcgcagaacagctaccacaagggctaggaaggctgccatgttcataacttgactaaacacacagcttgcaggaggatcatcacctgcaatgcttatatatggtgcatgcttcacaccaggtttcctttcagctgaatttaatggtaaaattttgtcatcttccacagctatgaagtatactatccacaatccagctgaagtaaacaaagtaaatacaagaggtaggaacatccatacgctgcatttcttcccatccatgcctgtaccactgctctggtgcggcggggccgctgtcgcctcgaggggctgtgacctgctgcggtgg

SEQ ID NO: 356398 - DNA, 1721 bp, Homo Sapiens
cacccaccactggccccagccaggaggagagggggtgcgagcctcacctcggcgtcggaggccagcaagcagaggtacttcctgtagtggttctgcagcgcctgcacctggccactgacccgctgcctctgcaccacgtgccggctgaaagtgcgcgcactcagctcccgggccagggtggtgaaggactcaccttgggcgggcagcgcctgcaggacctgcaggagcatccgcaccacctcgcgctcgtccagcaggcacaggaaggggtaaagtgagaaccggccctcgtacacctcgcgctctaggcggttcttggtctcccgcagcgcccggcacagtgctttctcccattggtcccgcagggtcttcagggtcttccgcgcgtgcttgacctccttgcttggcaacgtgggcttctccacggacaccacgcacaccctgctggccagctccatgtggagctgcttctcaaagaggcactgcagggtcttcaagggcaggtgcagcttcgggtaggacacacgcccatccttggcatacacgtccctgagcagcttggaggtgttgaccgggggcggcagctgcggcgggaggctgaaggtgggcttcaccttgtgcacggccttcagaacagtggcccgatcctcctcagacagcagaacggcggtgaagagtgcctgcagcttcagcccctcctggctcatctgttccagacacctttcgatggtcccggcgtcctggtcctgcctccccatgcactggagggcagccgcataggacagcaggtccggggtcaagccggcatccttcaccatgaataacacatataccagctccttgaaggcaccctgccgcgcccagccaagcatcacggcgttgtacatgtccagcgtgagcagcttccgcttctgccgctggccgtggtggacgaccagcaggtggtgggcgaggggcagctggtcagtgagcaggcagcacttgaagaaggccaggagcctctgctgctgacctgagacctgggcctgcgagtgctgccccgacggggcctgctccacatcgaggctcagcgttcccaggggcctcctgcagcagccgggccagctgctcctcccaggggctctcgggggcctggcgcgtgcagtcctccaggcacccggccatctgcttgctcaggagccggggctccacctgcaggcgcctggtcagcgccttgaactccccgctctggaatggcatctgcagcttcgccttcaaccgctgcatacgcatctgctgggtccgcttatccttctccagtatctttgcccagcggccacagggcaccggggtggcatccttggcccccatctggaccttcctgggtggctggaggctaccatctccactgccacattctgggagccgcgccacatccaccctgttcaccaccacctccgacacgctctcagcctgcagctgccgcacccgcgcctggagcacctccagcagctccacgtggccccagtccttcctgcggtcttggtcttgctcctgggggctggcggacgagctcctcctggggccgcagacgccaccggcggtcccttctttgccggggagtcccgggcggccgcaaggccgtagggctcgtttgagccccgccgctccgcggccccagcaaagtgccgacattacgcacgccgctccaggccaccccaccggcaccgcgccagcccgct

SEQ ID NO: 356399 - DNA, 1125 bp, Homo Sapiens
  misc_feature (1050)..(1050): n is a, c, g, or t
  misc_feature (1058)..(1058): n is a, c, g, or t
  misc_feature (1089)..(1089): n is a, c, g, or t
  misc_feature (1098)..(1098): n is a, c, g, or t
  misc_feature (1113)..(1113): n is a, c, g, or t
  misc_feature (1116)..(1116): n is a, c, g, or t
aaaagcaggctggtaccgggtccggaattcccgggatggcagggaatctggcttgattggcgtgctgagacgcacctggcgcaaccctcccttctgaatcgaagttcaagtcccgcggacactgcaaccatgaaggagagacgggccccccagccagtcgtggccagatgtaagctcgttctggtcggggacgtgcagtgtgggaagaccgcgatgttgcaagtgttagcgaaggattgctatccagagacctatgtgcccaccgtgttcgaaaattacacagcctgtttggagacagaggaacagagggtggagcttagtctctgggatacctcaggatctccctactacgataatgtccgtccactctgctacagcgactcggatgcagtattactatgttttgacatcagccgtccagagacagtggacagcgcactcaagaagtggaggacagaaatcctagattattgtcccagcacccgcgttttgctcattggctgcaagacagacctgcgaacagacctgagtactctgatggagctgtcccaccagaagcaggcgcccatctcctatgagcagggttgtgcaatagcaaagcagctgggtgcagaaatctacctggaaggctcagctttcacctcagaaaagagcatccacagcatctttcggacggcatccatgctgtgtctgaacaagcctagcccactgccccagaagagccctgtccgaagcctctccaaacgactgctccacctccccagtcgctctgaactcatctcttctaccttcaagaaggaaaaggccaaaagctgttccattatgtgaagtggaaattggaggggggagacaacccctacttcctcccttggggtgcagaggcacggggagagggaggatgagacaatttaggacactggacatgagtttttcagatggccacggtgagggcttggaaggagacaggaatggggcgaggaaggagcaagcccggcatgaggactgacgctgagagagaccatcatacccaagcaggcactagattttggnaggggggntacccagtgccccccgctcaaaggaggaaantgtgggggnggggggatgtggctnatngggttgggg

SEQ ID NO: 356400 - DNA, 1652 bp, Homo Sapiens
  misc_feature (455)..(455): n is a, c, g, or t
  misc_feature (1549)..(1562): n is a, c, g, or t
gcagggaatctggcttgattggcgtgctgagacgcacctggcgcaaccctcccttctgaatcgaagttcaagtcccgcggacactgcaaccatgaaggagagacgggccccccagccagtcgtggccagatgtaagctcgttctggtcggggacgtgcagtgtgggaagaccgcgatgttgcaagtgttagcgaaggattgctatccagagacctatgtgcccaccgtgttcgaaaattacacagcctgtttggagacagaggaacagagggtggagcttagtctctgggatacctcaggatctccctactacgataatgtccgtccactctgctacagcgactcggatgcagtattactatgttttgacatcagccgtccagagacagtggacagcgcactcaagaagtggaggacagaaatcctagattattgtcccagcacccgcgttttgntcattggctgcaagacagacctgcgaacagacctgagtactctgatggagctgtcccaccagaagcaggcgcccatctcctatgagcagggttgtgcaatagcaaagcagctgggtccagaaatctacctggaaggctcagctttcacctcagaaaagagcatccacagcatctttcggacggcatccatgctgtgtctgaacaagcctagcccactgccccagaagagccctgtccgaagcctctccaaacgactgctccacctccccagtcgctctgaactcatctcttctaccttcaagaaggaaaaggccaaaagctgttccattatgtgaagtggaaattggaggggggagacaaccccctacttcctcccttggggtgcagaggcacggggagagggaggatgagacaatttaggacactggacatgagtttttcagatggccacggtgagggcttggaaggagacaggaatggggcgaggaaggagccaggcccggcatgaggacctgacgctgagagagaaccatcataccccaagccaggcactagattttggagggggcgactaccccagtgccccccccgctccagaggaaggaaagctgtgggggacggggggcatgctggcctcatgggcttgggggcctacagcagcctcaccttcagcttcatgcctcttccacacagcgtttccatgcaggtcaggggatgggaggggtccctgagcccttcccttcccctctaaggaggcagcaacggagagtggggaagtggagcggcagctcccttgggggcttagcccaggtgcttcgtaactgcaatcggaagtgcaggagctggtcagagccaatgagaaggaaacctcatctttgcatagcccatgcctcatggagaggtgacatcatacattcacatgcttctcacctaagtccccagggtccaagggagaagccccagacccccttctcttgcagagtgtgggggtggtggtgctgcaggggcagggctgggtgggggtcaccagactttttctgcccttagggtagtacagctggcatttgttttatagactcttgtctttggaattnnnnnnnnnnnnnnagtgtttcaatctgttatatgttctgtgtttaatgaagaaaacctatttattaatgaaaaatataatacatataaagaatttggctccgt

SEQ ID NO: 356401 - DNA, 419 bp, Homo Sapiens
  misc_feature (205)..(205): n is a, c, g, or t
  misc_feature (233)..(233): n is a, c, g, or t
  misc_feature (329)..(342): n is a, c, g, or t
tggaacggcaaactcccttgggggcctttagccccaggtgccttccgtaactgcaattcggaagtgcaggagctggtcagagcccaatgagaaggaaacctcatcctttgcatagcccatgccctcatggagaggtgacatcatacattcacatgcttctcacctaagtccccagggtccaagggagaagccccagacccccttnctcttgcagagtgtgggggtggtggtgnctgcaggggcagggctgggtgggggtcaccagactttttctgcccttagggtagtacagctggcatttgttttatagactcttgtctttggaattnnnnnnnnnnnnnnagtgtttcaatctgttatatgttctgtgtttaatgaagaaaacctatttattaatgaaaaatataatacatataaag

SEQ ID NO: 356402 - DNA, 473 bp, Homo Sapiens
  misc_feature (20)..(20): n is a, c, g, or t
  misc_feature (40)..(40): n is a, c, g, or t
aacccaatgaagcaaaaacncgggtgctgggaacaaaaancctaggatttctgtccttccaacttcttgaatgcgctgtcccactgtctctggacggctgatgtcaaaacatagtaatactgcatccgaagtcgctgtagcagagtggacggacattatcgtagtagggaagatcctgaggtatcccagagactaagctccaccctctgttcctctgtctccaaacaggctgtgtaattttcgaacacggtgggcacataggtctctggatagcaatccttcgctaacacttgcaacatcgcggtcttcccacactgcacgtccccgaccagaacgagcttacatctggccacgactggctggggggcccgtctctccttcatggttgcagtgtccgcgggacttgaacttcgattcagaagggagggttgcgccaggtcgtctcagcacgccaatcaagccagattccctcc

SEQ ID NO: 356403 - DNA, 775 bp, Homo Sapiens
  misc_feature (3)..(3): n is a, c, g, or t
ccngtgccgagctcaggctgcacagtagcgacggtggccgtgggcgtgaagatgagcatctgtgccctcagatacatctgtgcttggcttgcagtcagggctggggaagacgtgttgcccaagagcacagcctgctgagcgatgcctgaggactactgcagagttcacactctgggcccggttgaggagctgggctgctgctggggaggctgccaggttgatcgaagatgactgggccggggcctgcgcagacacattgctgcctgaagtgcttccttgtctattggataccaggcttgcctgctgtacggctgccaggctctggagctgggcgctgctgaggtgctgctgctggagcgccgcggtctgcagcatgaggtgctgctgctgggcggcgtacatctgctgcaggtactgagcggccgtgctgggctgtctgtgcagggcctgctggatcacctgcacggtctgccggtctggaataccactgtacacagaaatctggggcccggtggggcggccacttccaccactgctgctgttgttgcagccactgctgctactggccccgctggtactgctggtggcacaggcactgctagatgtatgtgggactggcagctcattctccatggcctgcagtgtggcgcagtcagggcgctcggatggcagaagggcaggcagatgcgtgggatgcaggtttgtggctgtggtgtccccgccttcaagatcatcccatttatctgtctttgttccactccctctctctttcctg

SEQ ID NO: 356404 - DNA, 1965 bp, Homo Sapiens
  misc_feature (144)..(152): n is a, c, g, or t
  misc_feature (515)..(515): n is a, c, g, or t
  misc_feature (570)..(578): n is a, c, g, or t
  misc_feature (987)..(987): n is a, c, g, or t
  misc_feature (1751)..(1751): n is a, c, g, or t
  misc_feature (1894)..(1894): n is a, c, g, or t
tcctcccacattccaccctcaaataggttcccagaaaagacaataagttagtaccaaagtagtgagcgtgtcagtacgtagtttcaggaagggtaggaggttggtaggtatcatagggcaaggtgtttcagaagaaaaccggcnnnnnnnnncatttagattattataagatgttccagaggcactaagtgaacagaatctaatgtctttgtgcaatctgacgaacacttagtgtttagtagcagcattatgaaattgccatttttagataattctggcagtaaataccgtttaaatggtggtgaagaagactagcaacctatccttcacaaatatttcctgatagctctattttccctgctctttcaattacttacgtttacactttctctttatttacctatatgtctatctctgtttgatcttttctgaagttctgggcatactactcagatttcagtcacagctgtgaaagctgctattgataagattttttgaaacttcattctgttgcnaaagaagggagaaatggccttattttattcaatacaggaaaaagaaacattcacnnnnnnnnnggtatctttcagtttcagagtcaagtggtgagatcaaagacttttcaccaaaaaatgtcatttatgatgactcatcccagtatttgatcatggaaagaattctaagtcaaggccctgtgtattccagttttaaaggaggctggaaatgcaaggatcatactgagatgctgcaagaaaatcagggatgtattaggaaagtaacagtctctcatcaagaagccctggctcaacatatgaatatcagtactgtggagaggccctatggatgccatgaatgtggaaaaacttttggtcgacgcttttccctggtgttacaccagaggactcatactggagagaaaccatatgcatgtaaggaatgtggcaaaacctttagccagatttcaaaccttgtgaaacaccaaatganacatactggaaagaaaccccatgagtgtaaggactgtaataaaacattcagttacctttcatttcttattgaacaccagagaacgcacactggggagaaaccttatgaatgtactgagtgtggaaaggcctttagccgtgcctccaacctcactcgacatcaaagaattcacataggaaagaaacaatatatatgtaggaaatgtggtaaagcatttagcagtggctcagaactcattcgccaccagattacacatactggagagaaaccttatgaatgcattgaatgtgggaaggcatttcgccgtttctcacaccttactcgacatcagagcatccatacaaccaaaaccccgtatgaatgtaatgaatgtaggaaagctttccgttgtcactcattccttattaaacatcagagaattcatgctggagaaaagctctatgaatgtgatgaatgtggtaaagttttcacttggcatgcatcccttattcaacatacgaagagtcacactggagagaaaccctatgcgtgtgctgaatgtgataaagccttcagccggagcttttccctcattctacatcagagaactcatactggagagaaaccctatgtatgtaaggtatgcaacaaatccttcagctggagctcaaaccttgctaaacatcagaggacacacactcttgacaacccctatgaatatgaaaattcatttaattaccactcattcctttactgaacaccagtgaatttacactgcaaagaanaaactatgaatgtatggaattttttaaaaagaaagtataatgccttacttcagagaactctttggaaagaaagccttattgtgaaagtgatgactgtggaagtattatggcccacactttaattcacccaccctggaggaaanaaaaccccaggattatgtggaaaagccattattaaccactccttttatttttttgcattaacaaggggaaa

SEQ ID NO: 356405 - DNA, 969 bp, Homo Sapiens
  misc_feature (13)..(13): n is a, c, g, or t
  misc_feature (177)..(177): n is a, c, g, or t
  misc_feature (939)..(939): n is a, c, g, or t
gggatcgaaaggngccctcccggtctgcgccggatggccccgggcggtgactcggtccggagccctggaacgctacgcccacctggcggaaagcaccacggaaacgcatccttctgtggccactgttaggtctgccattttacacttttctgatctcctccttcccttctgtgagcntatgtctcaggggtcagtgacattcagagatgtggccatagacttctcccaggaggagtggaaatggcttcagcctgctcaaagagatttgtacagatgtgtaatgttggagaactatggccatctggtctcactgggtctttccatttctaagccagatgtggtttccttattggagcaagggaaagaaccctgggctgggggaaaagggaagtgaaaagagatctgttttcagtttcagagtcaagtggtgagatcaaagacttttcaccaaaaaatgtcatttatgatgactcatcccagtatttgatcatggaaagaattctaagtcaaggccctgtgtattccagttttaaaggaggctggaaatgcaaggatcatactgagatgctgcaagaaaatcagggatgtattaggaaagtaacagtctctcatcaagaagccctggctcaacatatgaatatcagtactgtggagaggccctatggatgccatgaatgtggaaaaacttttggtcgacgcttttccctggtgttacaccagaggactcatactggagagaaaccatatgcatgtaaggaatgtggcaaaacctttagccagatttcaaaccttgtgaaacaccaaatgatacatactggaaagaaaccccatgagtgtaaggactgtaataaaacattcagttacctttcatttcttattgaacaccagagaacgcacactgggggagaaaccttatgaatgtactgagtgtggaaaggnctttagccgtgcctccaacctcactcgaca

SEQ ID NO: 356406 - DNA, 915 bp, Homo Sapiens
  misc_feature (4)..(4): n is a, c, g, or t
  misc_feature (9)..(9): n is a, c, g, or t
  misc_feature (13)..(13): n is a, c, g, or t
  misc_feature (19)..(19): n is a, c, g, or t
  misc_feature (21)..(21): n is a, c, g, or t
  misc_feature (24)..(24): n is a, c, g, or t
  misc_feature (30)..(30): n is a, c, g, or t
  misc_feature (33)..(33): n is a, c, g, or t
  misc_feature (43)..(44): n is a, c, g, or t
  misc_feature (51)..(51): n is a, c, g, or t
  misc_feature (54)..(54): n is a, c, g, or t
  misc_feature (69)..(69): n is a, c, g, or t
  misc_feature (124)..(124): n is a, c, g, or t
  misc_feature (145)..(145): n is a, c, g, or t
  misc_feature (160)..(160): n is a, c, g, or t
gtgnagtanatanatgaantnatncggcanaanaatttttggnntggccanttntgcccccagtcctcntgggacacagagctgggtcctggcaattcgggaaatgaagcaaggaggctggctntgccgcagctggacagggggntgtcgggctcagatntctcggaggcaggagagggtgcacgaagaggttggccaggaaggcctcaggcaggggcgaggtgcagttgctgagcaccccccggggtggaggggccgcgagccgaggtggcacccccaggcagctgcatcttgttgtactcggccccagaggtgcccaagaaacttagagctgtgccctggggggcgccagagtggatgcgccagggagaaccgcatcaaagaaagctcagtcttgccgtcctccgcacgctgagacagcgaggcctcagtctgtcccgccgagagccactgagggtgtccgtggcgcttcacatccataagggcaaaggaacagatgtccccaaccccagccacatccacagtgaagtgatgaaaaaagtcgataatctccagggcacgagggcggaaccagaaaagcagaaacagcggggtgaggagcggggacaggagctcctccaggagggagaccgctcggtactgcagcagtgcgccatctgccggtaggcgcggtccctgccgccggggccgggctcctccgggaggtagtgcatgtgggccagggctgtctgcagcaggagctgcggcgcacgaccctggcactgctcttccggaatgaaagacctggcgacggtggcggtgaccccgagcgcggtcatggcggtgagcacgtgctccacggctagcacgtcctcgtcgtagacggtgagcacaagcagcgcggcgaagagtgcacccgcgaagaaaacgagctgg

SEQ ID NO: 356407 - DNA, 1436 bp, Homo Sapiens
  misc_feature (186)..(248): n is a, c, g, or t
  misc_feature (1215)..(1293): n is a, c, g, or t
tcggcgaggctggggagacagcgatcgaggcggctatagccacaattaattttccgagctacaggcgcacactagggctgtaaaaaaaatttttggtttaacctttcctaccgctgggccaatcagagctggcggcgtgcgggagcgtctctctcgccgtcgaccaatcggaggggccgggcccannnnnnnnnnnnnnnnnnnnnnnnnnnnnnnnnnnnnnnnnnnnnnnnnnnnnnnnnnnnnnncctcggggtccgaggcccgcggagccgcgtagggatacgccggcgggagcacgcggtgccgcagcccttccctgcgcccccgccaccccctccaccccgccggctccgctccaccgaaattcccctcctagggccaatagctcacatttccggcttcctcctcattgtactgggtcattttcgtttaagcgtcaatatttgtccttagtgattaaagtttgtatccaattttatttttgaaagcgggggtggtggtggtagtgggaagagtgggagtgcagggagaggatgcgagagggcaggaaatggaggaggtagaggcgaggcactacttttccgagttcggccttgcaggccagtgtctggcatttctgagccagcaggaaaattgtgccctttgtaggtaatagtctagcgcagctttggataaggggggagataaggcccaccgctggcgtgtgtgcgggggtgtcctttacttcgggggaggagggtgtgggagagctttgggagcgatgagatgaggaggaggaagtgggcagaggagcgcggggccaaacaggggttacttactcgattcctgaggcctgggcggcggcgagctccgggctccggcaccgcggggaaaccgggactggggctccgggtgctgctgcggcggccggggcccgctcagtagtgggcgcctctgatggccttccgaaatgagaggtgcccagagagaaaacagtaccaaacaatctcgaaataaatcaggtaacacatgctatatacgtgtgtctcttccttttccttctctcctgctccagagcgtgtcacgcgcggggtgactcgatgtcgttttctcctcgccgctccagcctcagcttctaatccgaattggaagcgggtagctgcgagcgatcaccctggaaatattttcgttttgcttgttgacattggagggaaaataagggtgggcgtctannnnnnnnnnnnnnnnnnnnnnnnnnnnnnnnnnnnnnnnnnnnnnnnnnnnnnnnnnnnnnnnnnnnnnnnnnnnnnngtgcgggcctcattcctgaaataacagtatactgaagccagctcttgccaaccctgagtgctgctggaaagcaccggggagccttgggaacgtggatctcacagtcccagcttcttgggctttggaactgggaaggtatcggt

SEQ ID NO: 356408 - DNA, 824 bp, Homo Sapiens
  misc_feature (143)..(221): n is a, c, g, or t
  misc_feature (374)..(374): n is a, c, g, or t
  misc_feature (686)..(686): n is a, c, g, or t
  misc_feature (688)..(688): n is a, c, g, or t
  misc_feature (692)..(693): n is a, c, g, or t
  misc_feature (732)..(732): n is a, c, g, or t
  misc_feature (735)..(735): n is a, c, g, or t
  misc_feature (743)..(743): n is a, c, g, or t
  misc_feature (749)..(749): n is a, c, g, or t
  misc_feature (761)..(761): n is a, c, g, or t
  misc_feature (763)..(763): n is a, c, g, or t
  misc_feature (765)..(765): n is a, c, g, or t
  misc_feature (769)..(770): n is a, c, g, or t
  misc_feature (789)..(789): n is a, c, g, or t
  misc_feature (796)..(796): n is a, c, g, or t
  misc_feature (804)..(804): n is a, c, g, or t
  misc_feature (806)..(806): n is a, c, g, or t
  misc_feature (812)..(813): n is a, c, g, or t
accgaaccttcccagttccaaagcccaagaagctgggactgtgagatccacgttcccaaggctccccggtgctttccagcagcactcagggttggcaagagctggcttcagtatactgttatttcaggaatgaggcccgcacnnnnnnnnnnnnnnnnnnnnnnnnnnnnnnnnnnnnnnnnnnnnnnnnnnnnnnnnnnnnnnnnnnnnnnnnnnnnnnntagacgcccacccttattttccctccaatgtcaacaagcaaaacgaaaatatttccagggtgatcgctcgcagctacccgcttccaattcggattagaagctgaggctggagcggcgaggagaaaacgacatcgagtcaccccgcgcgtgagnacgctctggagcaggagagaaggaaaaggaagagacacacgtatatagcatgtgttacctgatttatttcgagattgtttggtactgttttctctctgggcacctctcatttcggaaggccatcagaggcgcccactactgagcggccccggccgccgcagcagcacccggagccccagtcccggtttccccgcggtgccggagcccggagctcgccgccgcccaggcctcaggaatcgagtaagtaacccctgtttggccccgcgctcctctgcccacttcctcctcctcatctcatcgctcccaaagctntnccannccctcctcccccgaagtaaaggacacccccgcacacacncancggtgggncttatntcccccttatcnanantgcnnagactataactacaaaggnaaatttnctgcggcnanaatgcnnaactggctgca

SEQ ID NO: 356409 - DNA, 1008 bp, Homo Sapiens
  misc_feature (13)..(13): n is a, c, g, or t
  misc_feature (247)..(256): n is a, c, g, or t
aaggcggtacggnccacgagtttggatatcgtcgaccagcgcgtcagcgaaccttcccagttccaaagcccaagaagctgggactgtgagatccacgttcccaaggctccccggtgctttccagcagcactcagggttggcaagagctggcttcagtatactgttatttcaggaatgaggcccgcacaaaataaaagcatttgagaaacggaaaggaaaaaaaaaggagtgaaaataggaaggcttnnnnnnnnnnccggaaagaaatagacgcccacccttattttccctccaatgtcaacaagcaaaacgaaaatatttccagcgtgatcgctcgcagctacccgcttccaattcggacttagaagctgaggctggagcggcgaggagaaaacgacatcgagtcaccccgcgcgtgagcgacgctctggagcaggagagaaggaaaaggaagagacacacgtatatagcatgtgttacctgatttactttcgacgatggtctgggtactgttatactctctgggcacctctcatttcggaaggccatcagaggcgcccactactgagcggccccggacgccgcagcagcacccggagccccagtcccggtttccacgcggtgccggagcccggagctcgccgccgcccaggcctcaggaatcgagtaagtaacccctgtattggccccgcgctcctctgcccacttcctcctcctcatctcatcgctcccaaagtcttcacaaaacctccatcacccgaaagtaaagggacacccccggaaacaacgccagcggtggggcttatctcgccccttatccaaagctgagctagacttattacctacaaaagggcacaattttcctggctgggtcagaaattgccagaaactgggccggaaagtgcagattccgaaaaagtagtgcctcgcttctccttcctccatttctggcctctggaatctctactggatcccatcttcccatacagacaccccgttcaaattaag

SEQ ID NO: 356410 - DNA, 804 bp, Homo Sapiens
  misc_feature (158)..(186): n is a, c, g, or t
  misc_feature (201)..(213): n is a, c, g, or t
  misc_feature (706)..(706): n is a, c, g, or t
  misc_feature (777)..(777): n is a, c, g, or t
  misc_feature (779)..(779): n is a, c, g, or t
caacaaaaaagaaaggtgcagagtgttcgcaggctgggctggccctgcgtctggagaggggcatggctcacatgactgtcagttatgtcactgaccctacctatgccagaagtcaaggcctagaatgtttgtggagtctgataagagcagtacacagnnnnnnnnnnnnnnnnnnnnnnnnnnnnnaaagcagctgtgggnnnnnnnnnnnnnggaaagtgatggtccttccccctccagagggacaacgacctctctgtcgagggcaagggactcgtgctggaatggtcacacgcttgtaaggaaggaatggaagcctgggcaagggactggagtctgcagacctcctcatgctgcaaagtgacctcctggtatgcaggggacctgggcactcgcccttagggccactgtcactgctgggtcacaggaaaccggcagggcccttgggggcagggacacgcaggtggggctccagttttctgcagaatgagggaggcatgtgcaagaacccagccgtggggactgacagcccttccaggcagaattctagcacatgcttatgggttaggatcctgtatggagaagctgtcacccagagggtctaccctggattccccaggagggccaggacacatgaatgtaattattgctgtgactatggaatggtaaaaaggagggtgtaggcagagaggcccctggtggagtntctcatcctagcctagagtagcggctctcaaacccaagcaagcatcaggaccacccagaagcgcgtgaaancnagatggccgggccacacccagaact

SEQ ID NO: 356411 - DNA, 1098 bp, Homo Sapiens
  misc_feature (494)..(793): n is a, c, g, or t
tctttttaacaaccgtaaaggcgccttcatgcagggggtggatgagccccaccttcagttcccctaatgtccatgctccctcagagcaaggtggaacaagagtgttcacagactctgagggccacaacgccagcatcatacggatgtggttcatggggacaagtgagaaacagtgaagctctccttctcccccaggagcagtggatccgctagaatccctgggccaaggcttgagccacagtctctgggcctgggggcggagggggcacctctgtattggatggctcttctttgtcaagcactccatgggttctccaacctacaccccactgccaggccctggtgggtcaggccaggatggcagcgggacctacagcggcgctcccggcccctccagggcatgtgtccctgtggcctgcagggcttaggactgcagccactgggggtccctgcgatcaggaaggccaactgctgagtgcagctccacccccggnnnnnnnnnnnnnnnnnnnnnnnnnnnnnnnnnnnnnnnnnnnnnnnnnnnnnnnnnnnnnnnnnnnnnnnnnnnnnnnnnnnnnnnnnnnnnnnnnnnnnnnnnnnnnnnnnnnnnnnnnnnnnnnnnnnnnnnnnnnnnnnnnnnnnnnnnnnnnnnnnnnnnnnnnnnnnnnnnnnnnnnnnnnnnnnnnnnnnnnnnnnnnnnnnnnnnnnnnnnnnnnnnnnnnnnnnnnnnnnnnnnnnnnnnnnnnnnnnnnnnnnnnnnnnnnnnnnnnnnnnnnnnnnnnnnnnnnnnnnngcagttaagttctaaaagctttcaggagaagaaaatcttggggtggggccccactcatgggcctgcccatcatgggacccaaagttcatggccctcaagacactcaaggtgccccctcagccccaccctgctggctcagagctccccaaacagtcccggactgccctgctcccattctccatggctggccccccagggacacctaacaatccttcagaccctggggacaggcaagagcctccgtaaggagtcacagccctgtctgctgcctgtgacacagaggaaaccctgcagggacatcccgg

SEQ ID NO: 356412 - DNA, 1449 bp, Homo Sapiens
  misc_feature (321)..(376): n is a, c, g, or t
  misc_feature (614)..(906): n is a, c, g, or t
  misc_feature (1193)..(1281): n is a, c, g, or t
  misc_feature (1284)..(1309): n is a, c, g, or t
  misc_feature (1323)..(1341): n is a, c, g, or t
gggccatactgcattgcactgcccgtggcttggccagcatcccccggatcagggccctgtggtttgcgtgttacccatctgtgtccccatgcccagttcagggtctgcctttatgccagtgaggagcagcagagtctgatactaggtctaggaccggccgaggtataccatgaacatgtggatacacctgagcccactcttgcacatgtacacaggcactcacatggcacacacatacactcctgcgtgtgcacaagcacacacatgcaagccatatacatggacaccgacacaggcacatgtacgtgcacaggtgtgctnnnnnnnnnnnnnnnnnnnnnnnnnnnnnnnnnnnnnnnnnnnnnnnnnnnnnnnngatgccgaacaaagcagaagggcgactctcacctctcatgtgcttctggccagtaggtctttgttctggtccaactgacaggagtaggcttgtatttaaaagccggcccctcctctcctgtggccacaaaaacacaagcgggcttggactcttgaaaagcagacctgctcctgcagaagagacaggcacacatttggaattgggcaccgagaagacctgagaaaaacccactctctcnnnnnnnnnnnnnnnnnnnnnnnnnnnnnnnnnnnnnnnnnnnnnnnnnnnnnnnnnnnnnnnnnnnnnnnnnnnnnnnnnnnnnnnnnnnnnnnnnnnnnnnnnnnnnnnnnnnnnnnnnnnnnnnnnnnnnnnnnnnnnnnnnnnnnnnnnnnnnnnnnnnnnnnnnnnnnnnnnnnnnnnnnnnnnnnnnnnnnnnnnnnnnnnnnnnnnnnnnnnnnnnnnnnnnnnnnnnnnnnnnnnnnnnnnnnnnnnnnnnnnnnnnnnnnnnnnnnnnnnnnnnnnnnnnnnnngaaaaacccactctcataacagaagtgcagactcattgctagattcagtgcccttgagtgtgccagaggtcctctgtgtttgagacaatcctgtgtgtgccaggaggctccgtgtgcaccaggggctctcagaatcccgcttacccagctggagaccatgcctctggcagccccatctcagccagccctgctctctccctcttccctccaggtgaggcaaacttcataggaatctgtacctgaatgtgagctcctgataataaaactctgaggctttggtgagcgcnnnnnnnnnnnnnnnnnnnnnnnnnnnnnnnnnnnnnnnnnnnnnnnnnnnnnnnnnnnnnnnnnnnnnnnnnnnnnnnnnnnnnnnnnccnnnnnnnnnnnnnnnnnnnnnnnnnnaaaaaatgtggggnnnnnnnnnnnnnnnnnnnaaaaagatttttataaacccttttttttgtgggggcgggggcccccccaaaagggaaagggaaaacagggggccaaaatgttgtttcccaaaaagaaaacccgggggc

SEQ ID NO: 356413 - DNA, 705 bp, Homo Sapiens
  misc_feature (53)..(158): n is a, c, g, or t
  misc_feature (161)..(173): n is a, c, g, or t
  misc_feature (406)..(476): n is a, c, g, or t
  misc_feature (517)..(572): n is a, c, g, or t
ccgaccccgaattagctgggcattggtggcacacgcctgtaatccccgctaannnnnnnnnnnnnnnnnnnnnnnnnnnnnnnnnnnnnnnnnnnnnnnnnnnnnnnnnnnnnnnnnnnnnnnnnnnnnnnnnnnnnnnnnnnnnnnnnnnnnnnnnnccnnnnnnnnnnnnngagagagtgggtttttctcaggtcttctcggtgcccaattccaaatgtggctgtctcctctgcaggagcaggtctgcttgtcaagagtccaagcacgcctgtgttctgtggccacaggagaggaggggccgcttttaaatacaagcctactcctgtcgttggaccagaacaaagacctactggccagaagcacatgagaggtgagagtcgcccttctgccttgttcggcatcnnnnnnnnnnnnnnnnnnnnnnnnnnnnnnnnnnnnnnnnnnnnnnnnnnnnnnnnnnnnnnnnnnnnnnngtacatgtgcctgtgtcggtgtccatgtatatggcttgcannnnnnnnnnnnnnnnnnnnnnnnnnnnnnnnnnnnnnnnnnnnnnnnnnnnnnnnacatgtgcaagagtgggctcaggtgtatccacatgttcatggtatacctcggccggtcctagacctagtatcagactctgctgctcctcactggcataaaggcagaccctgaactgggcatggggacaccgct

SEQ ID NO: 356414 - DNA, 1636 bp, Homo Sapiens
  misc_feature (130)..(130): n is a, c, g, or t
ttctgcaaggcgccagtcactagggagcatgtgtcttatcccttccttgcactagggccccttataagctaggacctgtccatggtgtccttaaattcctgatgccatcccggcctcagcactgtcacanccgagttgtcagctctaggtctcctttcctctcctttccgtctctgcacttctgttcaccccgctgttacatttccaggagggagtggggcaggcgaccaacttccagttgagaacatgggtgactctcggccagcctgatactccccactgctgctgccccagctgcctcccggggacgatccaggcctggccttcccaagcaggtctctttactcccaccctcctcgctcccctgacagcccttttcccagacctacccagacacgggctccccagcctggacacaggctgctcccacaggcctcctgcactgcctcaggaggggagcccaggtgagggattctttggtgggcagagagagactcttcctgccgcggggaaaagcaaggccgggacccgtgacgaggtttccccaccaaccaggctttcttgccttcatgccagacctctgtgttttgctactggaaggccataagctccaacagagggttagctgcacctgctgtgccctcccaggaaggagcagacccattgtgctacttcccagaaacagcttcagaggagattctccaacagaggcaggcaagcccaggtgtgaccttgttccggcccaaggcaggagcctccccgcagaggtccagggcgtgcacccacacatccctcgctccaccggcctccatctcccctccctccctgtggccccccctgccctcttttcctggtgtctgccctgctggcctgccccagaccacagcccagctccaccatgctcatcatcatcacaaacccagaccttggatggcaacattttgtgaatacttccctcccgcctgggaaaaactcatcctgagcaggacgtgggacacagatgcaggccagcctccgggtgggctctcccccaagctgagcagttggggctctggcctggctgggaggccagagacccgagtcttagaccccgctctgcctcacaaagaaccacatgaactgggtcttcaaggccagttcccctcctggatcatcagagtcctgctctttggaagggcccctgtccctgcagtcagagagtctgaggtttcctaaatatcttcacgcagaaaggatggggaaatggcaagcgcaggcccctaactcctgctgctgggaaccctccctggggcccagcccaggcgtgctccttcttcccacgggttcctttctcaaagcccccaccctctccctgaagccccccacgaagccccaagctcctggcctcctacactcagcagtgtgactgatcctccaccccagctggccagccaattcaccaggcccgtctgggagccctgacttcctcatctacaaaacgggaacaagcgggacggacagacagtcccttccaccgggacaagagcccttgaggaggcttccctggggctgccctccctggcatggaggaggggaaggaactggggacaagggaggtggcagtggagagagggagggaggaagggaggtggcacat

SEQ ID NO: 356415 - DNA, 924 bp, Homo Sapiens
  misc_feature (869)..(869): n is a, c, g, or t
gctaatttcctgtaaaagttgtggaaattgttagaacatagaaaaatagagcagtgtatgtgtgccaaaactcatcattactcaaaggagaactgtgttaggcacatttaagaaagtttacatctgacattgctttataggaattgtttctgcagattccggatattataattcacaccataaagattgtgaagtggttattggcaaacgtttgtaaatgtgaccatgtataaagtatttatactctttaattcacactgttagagagcaaaatcatctaagtattgccacatgacaagattagtaaacaggaatactagaactatgtttgcatgatacacaagcaccaataaagactaatccatacacagttaacctaatgccaaataaatactggttaaataaatgtatggcacagaatataatttgactatcaagacttttagcataatgaaaaaccctctctctctatatatatgtgtatatgaattatgtgggcattcttgatacttcaagttctagtttgaaaaaaatacataactaatttaattttacacaaaaatatttatgcagattttcagaatttcatatcaggaaatgacctttttatgtctgttaaatatcaaaacaatttgctacagtgttaatctgcatggtctttaagcctgctgtagttgagttgcagacagtgcatgaaaaagtattccgctgggaattgagccatgccaccaaagccaagaggagcgcatggaaacccggtagtctagaactaatcagattacctgattttagggcacagcaccagatgaattgttgtatatgccttgtaaaaaatgattctgggtggtccctctgacaaagcggggaanaagatgataccatcatattgaaattaacttccacttctcttataaaattaaaaca

SEQ ID NO: 356416 - DNA, 1912 bp, Homo Sapiens
  misc_feature (109)..(109): n is a, c, g, or t
  misc_feature (231)..(232): n is a, c, g, or t
  misc_feature (237)..(237): n is a, c, g, or t
  misc_feature (496)..(504): n is a, c, g, or t
  misc_feature (1635)..(1635): n is a, c, g, or t
  misc_feature (1730)..(1738): n is a, c, g, or t
  misc_feature (1806)..(1806): n is a, c, g, or t
  misc_feature (1868)..(1868): n is a, c, g, or t
tccgaagtgcccccaccgaagctggcggggacgctgtccgagccgggggcaccgcccccttgtccgcccagcagcagcatgaatgtggcgacgcggactgtcgggagtnccccgaaaacccctgcgactgtcacagggagccgccccccgaaaccccagacatcaaccagctgccgccgtccatcctgctcaaggtgggtctgggcgagaggcgcagggatgctcgctttnncccanccccggcccccgcctccgaggctttctctctcctccccctaagcgcggaggaggggggttccctggcagcctagggacgtcccaaggggagactgggaagccagtggggcctctgcctatggcctattttttgaagtaggagcacttggagtctactgaatgtcttttaatagcttgactctataacccaccattcagggttcagctattattagaatcccaacccagtggtttagaaacttcgcaggtattctgtggnnnnnnnnnttttttaatcgaggaatttatacttagtgggtaaaggctttgcatgttggtgtttgaaagtctttaaacattactttcatgtttgatggctggtagttaatgtcaaacggttaacttactgagcatttaccataatcaggcactgcgccagactttatatatataatatcccatttatctagttaacgcttcgagataaatactgttaatatctttattttatacaggaagaaactgatttctccgtgctgtgggccacggtttatagtagtgagtcaggcagaagtggtctttgctcctgtggagctgacagtctagtggggcttgaagtggttgaatgacttgtgcaaggtcacatacagaaagtaaagggtagatctaggtcttgaatgagggaatttaagaccacctgacttaaaaacctctttgtttatgctatgttgtaatgcccttctacattttaacccttgcataaaagcatacagattaccagaggtaagcacagatgtattttttgttgggagatgggtgtcctgcatgaagtttgtgtcattttcaactaccaagaatattttgcagttttgtcaatgctagtgacaaactttagttacataatagagtttttattaagttattattaactttttccctccttttctctcttctcccaccctaccctatttggagcttaataaatataaaccatttttattgtggatgatactagagactagccataaataaccttgataagaatttggctacttttaccgttactgaagtaactgtcattaattacaattgttattgtcaccaatatagtttctttgactagactttttgcatatttacagtactgtgtgtttgggtctgttttacagtgatattattgttcttgtgagtgatacagcaagagggtgggaaaacttacatttccttgtgtcaaaatgtaatgatctaattcttatggaggtctacttgttggaagagtaattgcctactctttgtgtgcagaggtgcattttaggacaaagggaactttcttgagtcctttaaatcactgggtgatatggataaataaaatatcaacaaatatttggtatagaaacttgattgctgtcttcttatttnggcaaataagactggttcaaaatgaaccaaaacaaagccaggtaccttctacttacaaattatttcatgaggtaaaaaacattttaatgccgagnnnnnnnnnggacatgatctcataataaagagaaactctaatagaataaaataaacctatcctataccgcgttgttntctttcatattttttcctgaggattgttgaaaactttgtctaaaggacatatgggaattacnatgggcttgcgtattgttgtattggacgtgttagtagatttcca

SEQ ID NO: 356417 - DNA, 1108 bp, Homo Sapiens
gggatcgggaacgcgatccgactcggcggccctccctgcctggatggccggtccccgaggctgaggaagtccattcctctttcggaaatggtccccaggaagcttctccgtgtccccctatggccgggtactgagcggggcccgggtggtctgcggccgtggcccccgcccctcagcgcaggcgaccctcctggccctggcgggcacagcgcctctcccgtgacctgggccggcccgcaggatgagcccccggatcacgatcgctggcattttatttaccttcttccattacaaccccaggcgagtctcccgggccccgagaggagggggtgactggtcagggtcatcggtagcggcggcaggggcctgcatagggctgcctcggggcgactagcagaatggccgccagcctcggctgccccagcccccagcgcatggaatgtgccccgggccccaggagctccaggaaccgcgcttgtgagacggagcttcggctgcttggagctagtgagccaccggccacggcagggatttgagcagaacttgggggcagagggatgagatggtgcatcccttgaggtcacttcaggagatgacactcctgtggctaagtgtagcttcccaggtcatggctcccaggtcaggcctggtcaatggagaattaagtgggcgttgggtggtggatggatgtgatttggcagaggggacaaatgtgacaacagtgtaataagggccatgttggggagggtcaggggtcagggtccggcccaacctgagcagaagggaggctgctctcagggatatttgtcaggtaggaatgggtggagtggaactacagggccaccatgtttcccatgggtcacccatggtggccttgtcatgtttatccgtgatcctcagtgttctctgtggtcctcccgtcacccctttcagactgtcctttcagttctccactgtccctgcatcacctctgcccctgtcccgtttgtctgtgttcagtccatgttcccaggtcttgaggtggcccctggttctatgccccttacctaagaccctgtgcagggaatctgtgaaaacacagaggaaataaaaagtgaggaaaatagta

SEQ ID NO: 356418 - DNA, 2089 bp, Homo Sapiens
gcaccgttagggcagcctggcgcgcggcgcccgccaggcgcccagtcctctgccatcgcccacgcctccctggtgccaggaacaggtatcagcgcgcctccccagcggctgggagagacgctgaatgaagaagagggaaggacggttagtcagcagtcttatagctggatcagctaccaagagaagttctaaaccaagaagagaaaagcatttcaatttgggacatttatttgcacctggaaatggggaatgggctgtcagaccagacttctatcctgtccaacctgccttcatttcagtctttccacattgttattctgggtttggactgtgctggaaagacaactgtcttatacaggctgcagttcaatgaatttgtaaataccgtacctaccaaaggatttaacactgagaaaattaaggtaaccttgggaaattctaaaacagtcacttttcacttctgggatgtaggtggtcaggagaaattaaggccactgtggaagtcatataccagatgcacagatggcattgtatttgttgtggactctgttgatgtcgaaaggatggaagaagccaaaactgaacttcacaaaataactaggatatcagaaaatcagggagtccctgtacttatagttgctaacaaacaagatttgaggaactcattgtcactttcagaaattgagaaattgttagcaatgggtgaactgagctcatcaactccttggcatttgcagcctacctgtgcaatcataggagatggcctaaaggaaggacttgagaaactacatgatatgatcattaaaagaagaaaaatgttgcggcaacagaaaaagaaaagatgaatatcaatacctattatatctgtgtggagtaggttttctctggtctgattttgacaaatagaagagtgtctacagcgtggtttgcctgtctgccctcctggatgctattaaagctttgttttgttgaacaatcagatgcccaactctgttgccttgtggaagatgagtaaatgcagtgcttcttaaagtggtctcttctccctaccccacaaatcttttggtactaccatttggggaagccaagcaaggatagtaaattgaccagaacacagttgtgggaatttggtctgaagttagtgaaataaaactttaaagagtgtctgcctagtgttttgtgcttacatctttcggggggaagcctttgcaagaaaattgcatacaaggctttgtaacgatcaagtgctaatcgatggaaatgttaaggtagattaacatatatgcagttatattgatcacattggtccaaccagtccttttttgaagtaagggacaagaagtaagtattttcttttttaagtttctgccaaatgatttttgacgctttctggaatcaagtaatttaatagtatagcttaattctagacaatgtttaagttggtctacctttattaaaaataagatatttggggtatattcaagtgcatggattagttttcctgacaaagcatgttttggtgtgtagtcttactttttagaaatagctatgcatcgttctacacaggtttaaaacaacttttttggggatttagggctattataggaatagtttgttgtcagaagcactttcacttgaagaacctaaaatgattgactcattcatagtaaatatgggcatgtaaactaataaatatgcactggatacatatatggatttatgaagaaggcgatttagtcaagaggatgtaattaaaatatgtggtctctaaaatattccagttacaagatatttgttttattaatatttgctggctaaaaacaaatgtggtttttatatatttttgtagtgtgttgagaagagcaaaagctttataaatatacctgatgcgctgtagaatgaaaatgtaaaagataacctgtatgtgttccgagctttaattttttgtttacaaattgaacagtgttacatgggctgtccagtcctgattatagagaggaagaaatggtaacagtatggcagataagaattacaattatagaaaatgaggggaaaataacaaacctgttttatgaaaattcactggtgc

SEQ ID NO: 356419 - DNA, 1050 bp, Homo Sapiens
  misc_feature (771)..(771): n is a, c, g, or t
  misc_feature (910)..(911): n is a, c, g, or t
  misc_feature (916)..(916): n is a, c, g, or t
  misc_feature (954)..(954): n is a, c, g, or t
gggagagctgcttggagagctaagctggaagggtgcttatccctgcgtagaaacgcctgccaatgctttctcatttggacccagactccagatcgggagcagtcttatagctggatcagctaccaagagaagttctaaaccaagaagagaaaagcatttcaatttgggacatttatttgcacctggaaatggggaatgggctgtcagaccagacttctatcctgtccaacctgccttcatttcagtctttccacattgttattctgggtttggactgtgctggaaagacaactgtcttatacaggctgcagttcaatgaatttgtaaataccgtacctaccaaaggatttaacactgagaaaattaaggtaaccttgggaaattctaaaacagtcacttttcacttctgggatgtaggtggtcaggagaaattaaggccactgtggaagtcatataccagatgcacagatggcattgtatttgttgtggactctgttgatgtcgaaaggatggaagaagccaaaactgaacttcacaaaataactaggatatcagaaaatcagggagtccctgtacttatagttgctaacaaacaagatttgaggaactcattgtcactttcagaaattgagaaattgttagcaatgggtgaactgagctcatcaactccttggcatttgcagcctacctgtgcaatcataggagatggcctaaaggaaggacttgagaaactacatgatatgatcattaaaaagaagaaaatgttgcggncacagaaaaagaaaagatgaatatcaatacctattatatctgtgtggagtaggttttctctggtctgattttgacaaatagaagagtgtctacagcgtggtttgcctgtctgccctcctggatgctattaaagctttgnntttgntgaccaatcagatgccccaactctgttggctttgtggnaagatggagtaaatgccatgcgcttcttaaagggggtctccttctcccctaccccacaaaatcttttgggtactacccattttggggggaaggcct

SEQ ID NO: 356420 - DNA, 2957 bp, Homo Sapiens
  misc_feature (1105)..(1105): n is a, c, g, or t
  misc_feature (1108)..(1108): n is a, c, g, or t
  misc_feature (1118)..(1118): n is a, c, g, or t
  misc_feature (1120)..(1120): n is a, c, g, or t
  misc_feature (1137)..(1137): n is a, c, g, or t
  misc_feature (1142)..(1142): n is a, c, g, or t
  misc_feature (1155)..(1155): n is a, c, g, or t
  misc_feature (1178)..(1178): n is a, c, g, or t
  misc_feature (1181)..(1181): n is a, c, g, or t
  misc_feature (1183)..(1183): n is a, c, g, or t
atgtcgaccacgcgtcggcattctcaacagtttttaaggatcgaagtgagaacgaagtggagaaggtgaagagtgctctgatcctgtgctatgggcacgtggcggcccgggccccccgggagctggtgctggccaaggtagagtcagacatcctccggaacatctgccagcacttcagcaccaaggacccagccctgaagctgtgccttgtccagagtgtgtgcatggtcagccgcgccatctgcagcagcacccaggctggctccttccacttcacccggaaagcagagctggtggcacagatgatggagttcatcagggcagagcccccggactccttgaggacacctattcggaagaaagccatgctcacctgcacttacttggtctccgtggagccagcgctggacgagcaggcccgggcggatgtgatccatggctgcctgcacagacattatggccctgctgcctgagcccaaggaggaggacggaggctgacagaagtccctgtatctggagacactgcacgccctatgaggatctgctgacgagcctcctgacagcggaacatgaccccacaaggcctgcagatcatgattgagcacctgagcccatggatcaagtacacacaagaggtcaccgagcgggcgcgggccctgggcctgagcgccctcctgctgcgctacttcctggagcacctgcgtgtcagcgccctggtgcccttccacaacctgggccttctcatcggcctcttctccccacggtgtgcggacctgtggcctgccacccgccaggaggccgtggactgtgtctactccctgctgtacctccagctcggctatgagggcttctcccgggactaccgcgatgacgtggcggagcggctcctcagcctcaaggacggcctcgtgcaccctgaccccgccattctcttccacacctgccacagtgtaggccagattattgccaagcgcctccccccagaccagctcatcagcctcttgctaaccatgtttgaggccctgggagacccgaaaagaactgctcccgagcagctaccgtcatgatcaactgcctgctgcaggagcggggcggtgtgctccanganaaggtgcccnanatcgtgagcgtcctgcnccccnagcttcaggaggnccagggagagcacgtcctgccgnccncncagcacagcgtgtacctcctggccacccagcactgcgcagccgtgggtgtccagcctcctgggcagccccttgcccttggacagccacacctgcatgctgtggcgggcgctggcggtggagcctcgcctaactgcccaggtcctggggctgctgctggagaagatgagtagggacgtccctttcaaggagagccgggccttcctgctgggccgcaccccagaccgcgtggccacgctgctgcctctctcggctacctgtgcactgtttgaggtcatgtccacgcctgcagcggggcccgcggtgctcgagctctacccccagctgtttgtggtgcttctgctgcgcgtcagctgcaccgtgggtgtccagctgccccggaacctgcaggcccaggaaaggaggggtgccagtccagccctagccaccaggaacctggaaccctgcagctctgcagtggacaccctgcggtccatgctactccgcagcggcagcgaggatgtggtacagcgcatggacctggagggaggctgggaactgctcaggacctcggcggggcatgaggagggggccaccaaggtggccagggccatggctgagcacgcagggccccgactccccctggtgctgaagacgctggcatgcacacacagcagtgcgtatgagaaccagagggtgaccaccaccgccttcctggccgagctgctgaacagcaacgtggccaacgacctcatgctcttggactcgctgctggagagcctggcggctcgccagaaggacacatgcgccagcgtgcggaggctggtgctccgcggcctggccaacctggccttccggctgccctgacaaggtgcgaacccacggcccccagctcctcacagccatgattggcgggctggacgacggggacaacccttcacagcccagtggccctggaggccatgctgggccttgcgaggctggtgcacctggtggagtcctgggacctgcgctcagggctgctgcacgtggccatccgcatccggcctttcttcgacagtgagaagatggagttccggacggcatctatccgcctctttgggcaccttaacaaggtctgccacggagactgtgaggacgtcttcctggaccaggtggtgggcgggctggcgcccctgctgctgcacctgcaggaccctcaggccactgtggccagcgcctgcaggtttgccctgcgcatgtgtggccccaatctggcatgtgaggagctctcagctgctttccagaaacacctgcaggagggccgagccctgcacttcggggagttcctcaacaccacctgcaagcacctgatgcaccatttcccagacctgctgggccttctcctgaccacctgcctgttctacttcaagagcagctgggagaacgtccgagctgctgcacccctgttcaccgggttcctggtgctgcactcggagccccaggcagcagccgcaggtggacctggaccagctcattgcggcgctccagatcctgctgaaggacccggcccccgaggtgcggacgagggctgctgaagccctgggccgccctggtgaagcttgcctaaggctccggccagcacccccagcgaggagtatgcacccagacctgtgcctgagctccaagacagggcctcctgaggaccacagcctgggcacacgactggaaggcctggccccagaacaggcactgctggggaccaaacccaagcccttcagtgagggatgtgcccaataaactcatctgctcccagcg

SEQ ID NO: 356421 - DNA, 1135 bp, Homo Sapiens
atagattctgcagcatggcaaacaggtaatacttaaagccaaatggcgcttcggcttatttcaatactatttttatgtaaagatcagtgtgagaatatcagctcaatggttgaggttctaggatcaattgccttgcagtttttatactagcttttgatatcttttgcctattaaaacactttgtgaactttagaattaaggaactaaaaaatatttaccataagtccaagttatgacttgaggatcatatctgattagaactgtggcagaactactagaaaaagattctgcaaattggtttcagtgattcttgttgatgtaatcaacaagattacataatcaacaataatagatattgaaccaaaatgatcctttttttaagtttaaggttatttagtttctcttgcaaggatatgatttagtcacacactaatagggaatatgtgtatgtactggtggggagcagtgggcttgctgcatgtatgtatgttttaaaattaataaatattatcttactgggctccatagatggtttaaatttagatttatttaattaagaggctataaataatatatacactactgtatggtatttaacaaataagttttaaatctgttaattcttctggaaaactttggatgtagggatggcaagctaattttcttgtatagctggtgatataagcagcatggtcataaaataacatttcttataaagactaactggtaatagttgtgacagaacctggttttcctgactgagaatcccttgcttgcttagaatatctgacttcccattgaaatggaacatagaaaatgtgttttcttatgtgactctcattattggttcctttatcttagttgtgctacaatataaggctggacctgtaatacactatgtatcagactagactgaaaaatgtgatcgatttgttttctaagtcctcctctatataactgaaccatggtcaggggattagagaagcaacagagcactgctcctaaggctttaggctagtcttagtgaattggactgaatggatttttctctgttgttttttgcattaagtgtttttgcactagaagagggtgcttaacactcctctatctatatgaataaaaaattatgttctca

SEQ ID NO: 356422 - DNA, 884 bp, Homo Sapiens
caagaagaagtgaggattctagactttaagggtgtcaagatggagaccatcaaaaaccagcggggcttctagtttggcttgagaagggcacctctccctgacagtagcacaaaagtcctgcctgtttcaaaaggtgacagtagaaagtaatgagactgactccaaaagctgcacaccccaaatcagtctcgctgctttatactcacacctcttccttagataagactagaaagtgctcctcctggccagtccctgccctcttaaaagtggcatcacacaccactgcatggatggtgtcaatccctagaagtgatctcaaagcgtcttcactggaaccacaacaatagaaacttacacatggcaaatggctatgcagtacagctcccgatatctggtccactaaattgacctttgagcttagtgtgggaatttcttgcctcctttctatcacttctgagaacaaattctataagcagaaatgcctggaattattgtctggggtcgaggtgttttgtttcaatataagctggccagtctggaaccaaaaggacgaatgtttaacttgtataatcttcttgcagggaaacaggcaagtgtttttgcaagcataaaaggcacaaagtggagtttatttttggtcagagagatgaagaagtaaatcacaaggcaaaatttgttgtttgtttgaagaggggagcagtattaacaagcaaataaaatgccttctatgatttccacagttacaattatagatcctaatcttgcaaatacatgtcaccaaatgcacaacattttgggaatgatggtaaaattgtatgactgaaaaaatcataaatatttaagctatattgttttattaataaattgggtacttacagaattct

SEQ ID NO: 356423 - DNA, 303 bp, Homo Sapiens
aattccaatgtgaatttgcagggggagtgggggacacacacaaatttcggggccataccacccttcaccacaccctcctgcgctcagggtggcttgcagtccctggcccttctggtgggcatttggtatgtcctttctcttggggtgatttctgatgtttttactctatatagtgaaaagctagggagagcgggtcttctcccccctccctctccagtcccctcacaatcccagatgggttctaatgcagctgctggggcctgatgccctgagttgtttgtgattcaataaagaatccataag

SEQ ID NO: 356424 - DNA, 1489 bp, Homo Sapiens
  misc_feature (69)..(108): n is a, c, g, or t
  misc_feature (314)..(314): n is a, c, g, or t
  misc_feature (411)..(411): n is a, c, g, or t
gggaagtaatcgacagatacaggagaaattaaagcaatatggtaatgctcgtaactaactacatacttnnnnnnnnnnnnnnnnnnnnnnnnnnnnnnnnnnnnnnnntcaagaacaaaccaaaaatttttaagatgaacaagtatagcatgatagttatgataggggattctgggactaaccgcgtgcttaagcttgaatgccagcttcatacttaaatagccgtataatcttgaacaagttatttaacttctttgtgttgcagttttctcatttgcaaaatgacagtagtagcataatagtactttaccttnaatatatataaaaactcctagtctttgtgtgccttttttttcctaatagtaatcccagtccattatttattacttgttgaatgtagcgaatgtgttncattttcgttagtgttatattatggctgtcattttcctttctctttaagagacgacccgtgagttatttgttttaaatgcgattgaagattgttgaaagattcttatctagatttggcttcctctatgtgtgcatatatatatgtatttttttgtttcttttagtgggaagtacccttctgtctatagtggtgttatcctgggaattaaagacaatttaacaagagatttggtttatattcttatggccaaaggtttgcactgcagtactgttaaggacttttcccatgctaaacagctctttgctgcttgtttggaagttggtaacagagttctcaccgaagcttcgtcaggtcatgctgaataagatggtgcttttgaatattcatacacacgaagctggaacagggcaggcaggagagagaccgccatccgaccttataagtagagtacgaggctatctggaaatgaggcttcctgatattcctcttcgtcaagttatagctgaggaatgtgttgcctttatgttaaactggagaaaaaatgaataccttacactccaagttccctgcatttttgcttcagagtaatccatatgtaaaggtagttaatgtttaaataaaaggattgttaggatggtattattatacttgtttctttaactttatactactttgggaacttgtctaatttctgtgatacaaatgattggacaaatgcttgttgatttgtagttaaaggatagagtttttgataattcatgcacttgaccttgttctaatatttctttctaatgccctgtaattcatgagcatgtagtcacagattatttagttaacagataacacattggtgtaatcctaagtaatgagagattcgctttctttgctttggttgctctaatcacactctagaactgatggagtccgtcagggatgcacttctccttgtttccatttgaacactttattcttctttagaattttatccttctaagtttgctatgtctgaatctccaataggtttgctattagtaattattcccctagtaaagaattaaacagtgattggcacctaag

SEQ ID NO: 356425 - DNA, 1418 bp, Homo Sapiens
  misc_feature (134)..(134): n is a, c, g, or t
  misc_feature (175)..(175): n is a, c, g, or t
  misc_feature (202)..(202): n is a, c, g, or t
  misc_feature (210)..(210): n is a, c, g, or t
  misc_feature (234)..(234): n is a, c, g, or t
  misc_feature (283)..(283): n is a, c, g, or t
tgagttcagctatttacctggaattggagttttggtttaaatcgccccaaaaaattcccaaaacttaagttaaaacttgcctaaggaaaattctgcctggcgttaaaatagcctttaaaaatccatggttccancccgccctttctgtgataggagctctcatttgtaaatccancgtgggccctccggggtttggaaactntgtgtagnaattcaagtatctggcattgttgnaaggcaatgcataattcctgtcctggtttctgttcattctgctgggctnttctgcatgaagcacactgtgaaaagtaacatcgtgttcatacgtttctttcattcggtggattttttctcttgagacaccatgaatgtttcttcatttctggcctgaaaactaccatgtccatttccagcctgaaaagattcttttgttcggtctgaaatacctgaaaatagcaggatacataatgaggaactagaaaaacaaagaagtaccttgctaactcttgaacgttgaatttccagcgagtgtaaggttctcggaatataacttcatagttattttcaagtgcctgatttttcaaaagtacataaaacattgaagacatagtatgtatgtttgggaatgtttatgctgccatttaacatttactacaaatcttttcagaattccttttgttttaccagtaatccaatgccttaatttatcacaataaatgcagttgtttcattcccatacttagccactctcataattctccatgataaattttgctcaattttatctagtatgtaggaaatttgtaaaggttctttgttttggacatctttaaaaatagatgactgagctagtttaaaacgtcctgaacaccggtatgaatgaactcagtgacgtctcaaagtcacttatgggatttttgtagatttacttgtcagatgccttgtcctattcctcatgccttcctttagaaagtgggagtaccataggaacataactggtgaaataaaagtgatagtcacatacttcacatcatcttccttccaaaagtagctctccccattatgcaatacaatttgggtcaatgctctgggccccatttccttgagtttagaaaactattataatttccttataaacatccaaatattctttgcattcataaattgactactaccttatctcaaactgaattttctattatcactataatttattgtgtttataaaacatagagtggaaagagctaagcaaaaaggtttccttttcattcttgagatgggcgcttctcaactgggaaggatttaaataacacaaccggaaacctctcatttctaagtcgaattaatagctgaggatggctgaaaaagattatacatatccagaagataaaaagtaaaatgaggccgggcgcggtggc

SEQ ID NO: 356426 - DNA, 708 bp, Homo Sapiens
agcggatcacatggccggagagtcacaaaaacaacagctttggccaagaccgtgacttcagtaaagggaacccggggctctcgcagccagccctcctgcccatggaggacagtttccttcaatcttttgggaggctgagcctccagccccagcagcagcagcagcggcagcggccgccccggccgcccccgcgggggacacctcctcgccgccacagctttaggaaacacctctacctcctgcgaggcctcccgggctccgggaaaactacactggccagacaattgcagcatgactttcccagggccctgattttcagcacggatgattttttcttcagggaagatggtgcctatgagttcaatcctgacttcctggaggaagctcatgaatggaaccaaaaaagagcaagaaaagcaatgaggaatggcatatcccccattattattgataataccaacctccacgcctgggaaatgaagccctatgcagttcatggcaccttgaaaatatacctatgaacggttatattccgagaaccttggacactcgctggaagattcaacggtcaagagttagcaagaagaaacattcaatggtgtctcaaggagaacaaaatccaccgaatgaaagaaacggtatgaacacgatgttacttttcacagtgtgcttcatgcagaaaagccaagcagaatgaacagaaaccag

SEQ ID NO: 356427 - DNA, 1871 bp, Homo Sapiens
  misc_feature (55)..(55): n is a, c, g, or t
agatatatgcatgacattaacaggcaaatgtatgattttttaaaaatctcatggngttcttttatgtcttgaagcacgtaattgagaggaccagaaacaaagcatttctgaagctttagtccttgctagcctcagggtggtttgcgggtgtgcagggcagcatgaaaaacatgagtggaggctgaaagagaactgctgaacaagatgtttgttatgcttttgccagagctaggtcctgagaacagggactgcaatatctgcaatactagaggacttgtaaaatataagtaactcattgtggtatcctgccttaactaaatgcattttttttccatgtagaagaaacattcatggtgtctcaagagaaaaaatccaccgaatgaaagaacggtatgaacacgatgttacttttcacagtgtgcttcatgcagaaaagccaagcagaatgaacagaaaccaggacaggaataatgcattgccttccaacaatgccagatactggaattcctacacagagtttccaaaccggagggcccacggtggatttacaaatgagagctcctatcacagaaggggcggttgtcaccatggatattagaggcctatcttacagccaggcagaattttcctaagtcagtttctacttcagtttttgttattttttgttgcattttagtcagagctccaattccagtgtaaatagctgaactcaaaagtttctgagcaaagtcattatattcactttcttcaccaaaatttgttaaagtgcttctatatgcatggtctgatgctgggaattctgcagatttgagtaaacagtctctttctctagggtaagaatttgaaaccaaaacttgagaacacacccaagaatatatttacataggttcatagatgaaataaagtgtttatattatatataagcttcagtaccatttgctctgaagtgatctatttattttttcaggaaattcatctccatcggtaaagttgggaaggtggagagaagtggtgggggggcattgctacttatcaaagtgccattgctactttgataatctatgtatctaaaaatgtgagatgtgcgactcttatgatactgattttcctttaatgttaatatgccagaaagcatacatctaagggaacattgtccttcaaagtagacactttgggaagttatttctttattttaatgatgtatcattgttaaaaatgctgtcaaatccttaatagctacaggagctactgagggaaatcagtgtcattatttaaagtcacgccttgtgtttttactactttattcagcaggattaaacctgaataacttttggctgttgtgctaatagtgtaaataaaataagcctgccttcataaaacactaacttttaaaaggaataaacgacttctaaaattatgcctattaacatgtgtaattagtcggcagctcaaatgtttgggagtgcaagaaattaggcaccccaggatataggtcatacagggatatataaaagccatgctcattacaaaatgagcagttgatgttttatgtggcattaagacaatcaagtcctcacaactctggaatgtcttcttatactgatgctgaatttatgaatccaaattaatttccaacaggttggaatcagatttaatgtgagatcatgatagacaagaccacagaggacgtatgctctatttcttgttggccaacagcttctttctaatgttctgtgaaaaattattttaagtgtcttatataatggtgcttttatggttattaaaaattgtaaatggtatcacatttatatggatttgtcattggatctttttttggttcaacaataaaaaaatttaattacctaaatgcc

SEQ ID NO: 356428 - DNA, 908 bp, Homo Sapiens
  misc_feature (879)..(879): n is a, c, g, or t
tgctattccatggttaatattcagtgttcaaatcctgtataatcacacacaaaacaggggtcttaaatgggctagtgctggggctgcggggcggggcaggatttgagcctgaggagagtggtaggaaataagcttacgttgaaatggttaggagcctactccagaccaactctccccctccaacccccacaaaacagagagaggaattgtcctaagttcttcttgggagagactgctttccaacctcagagatttcaaagggacagcgggcctctccacctttagaagtcaaccgggaatgctcatgggtttgctgcaggcccattgctgaagccttgcctttagctatcaattccatgatgtagccaaattcactcatctccccagactccgacatgtttacaccccttcacaaactctggaggaccgacgcgggtgtatcgaatttgtcctttcttttctctttttctgtttttagtctgagttttgccgagctccccgcccataagctgttaaccaggaaaagaggggaagcgccggggaaagcaagaagcgggcttgggtgaaatgaaggccatcgagggctcccgggcagcctcgcccggcttgctaggatccgggtgcagcggtcggggctgcgcgatctaacggaacaaacgagggcggcggcggcggcagcagaggccgtgaaaccctcaccaggcggagccgggcgcgcggaggccccgcctcctcgggggtcgcggcagcggttcggaccccagcggagacaaacaaacgcgcacacaaagcgggtccgcacctcggctcagcgcggccccagctagacatttccccggcctttatcgcatgccggcaggtttggccgtccccggctcncggcgcgaagatctggaaaaaagcccatc

SEQ ID NO: 356429 - DNA, 728 bp, Homo Sapiens
ggggatccggcatgcgataaaggccggggaatgtctagctggggccgcgctgagccgagtgcggacccgctttgtgtgcgcgtttgtttgtctccgctgcggtccgaaccgctgccgcgacccccgaggaggcggggcctccgcgcgcccggctccgcctggtgagggtttcacggcctctgctgccgccgccgccgccctcgtttgttccgttagatcgcgcagccccgaccgctgcacccggatcctagcaagccgggcgaggctgcccgggagccctcgatggccttcatttcacccaagcccgcttcttgctttccccggcgcttcccctcttttcctggttaacagcttatgggcggggagctcggcaaaactcagactaaaaacagaaaaagagaaaagaaaggacaaattcgatacacccgcgtcggtcctccagagtttgtgaaggggtgtaaacatgtcggagtctggggagatgagtgaatttggctacatcatggaattgatagctaaaggcaagatgccggattggagacgaggctaccgctgcagacagggctgtgggaagacgacggaacttgccacagcgacagacttctcccaaacaggaaataacaagtggcgaagcattttaaaaaccttaaagaaaaacaaacacatcaaaccacaacaccaccgccaccaagcccaccaccgcagaccagcccaccaccagagagggg

SEQ ID NO: 356430 - DNA, 890 bp, Homo Sapiens
  misc_feature (47)..(272): n is a, c, g, or t
aatgtagttggtggcaaattcaagctcacttgcaaacctcccactcnnnnnnnnnnnnnnnnnnnnnnnnnnnnnnnnnnnnnnnnnnnnnnnnnnnnnnnnnnnnnnnnnnnnnnnnnnnnnnnnnnnnnnnnnnnnnnnnnnnnnnnnnnnnnnnnnnnnnnnnnnnnnnnnnnnnnnnnnnnnnnnnnnnnnnnnnnnnnnnnnnnnnnnnnnnnnnnnnnnnnnnnnnnnnnnnnnnnnnnnnnnnnnnnnnnnnnnnnnnnnnnnnnaaaaattcagtaggccactcaaactaattggggcttaattcatcttacatttaatgtagctaatgatatatttggatttatatccatcacgttgttttctacttaatctgtgaactatgtgtttctgggcttttctccttttggatttcatattttcccttatttcatcctctatgttatttcacaagctattacctctatttcttctatctgctattatgacacacatactgattaactttagactctgaaaagctatgtgtctttactgtcctcacaagtaccttacagaaactccattcatccttctgacttacgtgctatcattgacatatatattaatatgctttaaagcctatgaaaatgattactgttttataaaaatgtttgtttagatttactaagatatttattactcttatgctttttgatctttcttgtatctctggcctcctgtctgagagtcactttcttcatgcctagagtacacacttctaaatttcaagtgaagacttcctaattgcaaatgctcagtttttgtctgcaagaaacgtatgaatttcccctggatttattgttcttagtataaaattacttaaatttttatttatattaaag

SEQ ID NO: 356431 - DNA, 1866 bp, Homo Sapiens
  misc_feature (1220)..(1220): n is a, c, g, or t
gtgatgcccaaccgccatctctcctggcatgggggtccctcagctctcccttcctccccacaggtaatggacagctcaatgccgctgattggagagcatgtggaagaggacagacagctgatggccgaccttgttgtctccaaaatgagccagctcccgatgccaggaggcacagcgccctcccccctcagaccttgggctccacagattaaatcagcgaaatcccctaggtcaagcccagctggggcctcagctaggccagccccagccacgcccacctccgcaaggaggccctcgccaagctcagtctcctcagccccagagatctggaagcccctcccaacagaggctctccccacaaggtccagcagcccctgagcccccagtccggagtctccacagcagcaaaggtcaccaggctctccgcagctatcccgggcatccagtggcaagctccccaaaccagggcctccaagccaggtgccaccctcgcctcacagccccggccccctgtgcagggccgtagtacctcccagcagggtgaagagtccaagaatgcccagcaccacgcccatccgctatctcaacagaatctcagtccctgactaacagcctcagcacatccgacacctcccagcgtgggaccccaagtgaagacgaggccaaggctgaaaccatccgcaacctgaggaagtcttttgccagcctgttctctgactaacgccatccaggctgggaggggaagagtgctctgctacactcgtccccctcctgcctcatcttccttctcagccttggttcctgatgggaacagaatggagggcctgagaacatactttctaaatgcctttgacccaggaaccgattatctatatttgttcccattttccttcaccgtgacattccagcattgtctgactgtgaggtgggcctttgagagcctccaggttcctcaaaacaggcctgagcgatgggcatcacaccctctgcctacccacgtgcctgcttacctgccagataaccaagtgagatgtctgcgagtggctagttttcacattcttactagtgtttggctcacctttgggcaaaggccccctctaggccttgccccacctccatcaaacgcagacactgtagtcagacctcagcaatataggaggcaataatcttttaacagtgttttgcaaacaaacaaaaagagaaaaatcccagccaggggnactcgccacctgcccacgctagttccatccacgctcaagacccgcccttagaccaggcaggcaaaggcccccatcacactcggccactagtggggtcctaaggccaagaaagaaaccagaccctgtatgacaagtggggtctttcagaacacgacagaaacaggggggcccttgtaatgccactcatactcagagcattattcttatttggacagccaagggcagatcacaggttattgtaggaataaagactagtttacaaaggagaaagaggccctggacttcccaaggaaagggtcaggttagggctcctgtacccattctgttccaccactgtttgatctctctggcctcccaccaggaatgccgtttcctttttatggatctgttgggaaccagagagaatcaacagatcaatgacataggatccgaagtgcaatgatagtcacttctagtttggcatttcacaaactctgtacagcaaggtattggtaggttactcaatttcaaaagggccccatggccaaatatgtttaggaaccgctgtttgtatttctttttttggagacgcattgtatataatatatgtcaaaggctttcggaattcctgcaggaaagaaatcagctttgttaaatccaaaaaaaa

SEQ ID NO: 356432 - DNA, 760 bp, Homo Sapiens
ttcttctacgcgctgattctgtcccccacccgcttttggattctgtgagtgccatctttgtgaatggcagatgccattctgagtgcgtcctaaagtgccagcctgtagcaactgcttgtctgagcacttcccctgtgctagggggacatggggtgtaagacgaatatgattcaggccctgcctcaggaggctcagtcataggatggggaggcaacagacttgagatgcggatgggctggtgctggcttcttggactcttcaccctgctgggaggtactacggccctgcacagggggccggggctgtgaggcgagggtggcacctggcttggaggcctggtttggggagctgccactggatgcccgggatagctgcggagagcctggtgacctttgctgctgtggagatccggactgggggctcaggggctgctggccttgtggggagagcctctgttgggaggggcttccagatctctggggctgaggagactgagcttggcgagggcctcccaaggtctgaggggggagggcgctgtgcctcctggcatcgggagctggctcattttggagacaacaaggtcggccatcagctgtctgtcctcttccacatgctctccaatcagcggcattgagctgtccattacctgtggggaggaagggagagctgagggacccccatgccaggagagatggcggttgggcatcacatcccaaaagtccgctctcgacgaattcgagctcggccgatttggcctgat

SEQ ID NO: 356433 - DNA, 1168 bp, Homo Sapiens
  misc_feature (5)..(5): n is a, c, g, or t
  misc_feature (8)..(8): n is a, c, g, or t
  misc_feature (16)..(17): n is a, c, g, or t
  misc_feature (25)..(27): n is a, c, g, or t
  misc_feature (29)..(29): n is a, c, g, or t
  misc_feature (31)..(32): n is a, c, g, or t
  misc_feature (39)..(39): n is a, c, g, or t
  misc_feature (45)..(45): n is a, c, g, or t
  misc_feature (47)..(48): n is a, c, g, or t
  misc_feature (51)..(51): n is a, c, g, or t
  misc_feature (55)..(55): n is a, c, g, or t
  misc_feature (58)..(58): n is a, c, g, or t
  misc_feature (65)..(65): n is a, c, g, or t
  misc_feature (68)..(69): n is a, c, g, or t
  misc_feature (73)..(75): n is a, c, g, or t
  misc_feature (84)..(84): n is a, c, g, or t
  misc_feature (88)..(88): n is a, c, g, or t
  misc_feature (90)..(90): n is a, c, g, or t
  misc_feature (93)..(93): n is a, c, g, or t
  misc_feature (96)..(97): n is a, c, g, or t
  misc_feature (118)..(118): n is a, c, g, or t
  misc_feature (125)..(125): n is a, c, g, or t
  misc_feature (135)..(135): n is a, c, g, or t
  misc_feature (139)..(139): n is a, c, g, or t
  misc_feature (143)..(143): n is a, c, g, or t
  misc_feature (146)..(146): n is a, c, g, or t
  misc_feature (150)..(150): n is a, c, g, or t
  misc_feature (154)..(154): n is a, c, g, or t
  misc_feature (156)..(156): n is a, c, g, or t
  misc_feature (158)..(159): n is a, c, g, or t
  misc_feature (165)..(165): n is a, c, g, or t
  misc_feature (170)..(170): n is a, c, g, or t
  misc_feature (172)..(172): n is a, c, g, or t
  misc_feature (177)..(177): n is a, c, g, or t
  misc_feature (182)..(182): n is a, c, g, or t
  misc_feature (184)..(184): n is a, c, g, or t
  misc_feature (194)..(194): n is a, c, g, or t
  misc_feature (204)..(204): n is a, c, g, or t
  misc_feature (222)..(222): n is a, c, g, or t
  misc_feature (226)..(227): n is a, c, g, or t
  misc_feature (241)..(241): n is a, c, g, or t
  misc_feature (271)..(271): n is a, c, g, or t
  misc_feature (289)..(289): n is a, c, g, or t
  misc_feature (326)..(326): n is a, c, g, or t
  misc_feature (359)..(360): n is a, c, g, or t
  misc_feature (363)..(363): n is a, c, g, or t
  misc_feature (369)..(369): n is a, c, g, or t
  misc_feature (372)..(372): n is a, c, g, or t
  misc_feature (377)..(377): n is a, c, g, or t
  misc_feature (389)..(389): n is a, c, g, or t
  misc_feature (405)..(405): n is a, c, g, or t
  misc_feature (801)..(801): n is a, c, g, or t
  misc_feature (956)..(1074): n is a, c, g, or t
aaagnagnaatgaagnnaggctggnnngnannggcagcnttagcnannaanaaanaanaaaggcngcnnttgnnnaaaaagtgnttgngnagnaannatggctgcggcctaaaatatngcagaanagcagatgangtgnaaanaangcantttngngnnctttangcgcncnttgcntttantngtgaaagcanggggagcatntgcagcattgcaggcagnagcnntcagttttggcgcnctgctgctcacttggtttttgcactggttnagactttcagttgacagnatgttgggggtgttttttgcttaagaaaaggtccccnttgtctgcaagcattgcaagggcaaggcaatgnnaantctctngcnagttncagctgccaccntttgatcatttgaaangagtcaatcaggcacacacacgccgcctaaggatgttttgcaactttcacacgaatctggcacacacgaaattagggctcaatttcactgattgtagtagaggttaagattgctgtgagctttatcagataagagaccgagagaagtaagctgggtcttgttattccttgggtgttggtggaataagcagtggaatttgaacaaggaagaggagaaaagggaattttgtctttatggggtggggtgattttctcctagggttatgtccagttggggtttttaaggcagcacagactgccaagtactgttttttttaaccgactgaaatcactttgggatattttttcctgcaacactggaaagttttagttttttaagaagtactcatgcagatanatatatatatatttttcccagtcctttttttaagagacggtctttattgggtctgcacctccatccttgatcttgttagcaatgctgtttttgctgttagtcgggttagagttggctctacgcgaggtttgttaataaaagtttgttaaaagttnnnnnnnnnnnnnnnnnnnnnnnnnnnnnnnnnnnnnnnnnnnnnnnnnnnnnnnnnnnnnnnnnnnnnnnnnnnnnnnnnnnnnnnnnnnnnnnnnnnnnnnnnnnnnnnnnnnnnnnccatgctttgggcgcgggccccccaaaggaagggaaacagggccaaacgggttcccaagaaaacccgggcccggaccggggctgtggatccccc

SEQ ID NO: 356434 - DNA, 1609 bp, Homo Sapiens
  misc_feature (43)..(44): n is a, c, g, or t
  misc_feature (47)..(47): n is a, c, g, or t
  misc_feature (1034)..(1082): n is a, c, g, or t
atcgggtccatctgtacaactctctccgtttctccgtctctcnnccnccctccctccctccacccccccaatctttttctccccatctctccatctctctcttatctcttcaggaagagcctaaaaggcggcaacaccaacacctcttgacatggaaatacactgatacaataggcaaaaggaaacactcgattgcatcttcccggttccaggtggccttatttgggagattctatactgaccttattcctgtgatggaggatactggcatccagcgaggcatctgggatggagatgccaaggctgtccaacaatgtctgacagatatttttaccagcgtttacaccacctgcgacatccctgagaatgctatatttggtccctgtgtcctgagccatacttccctatatgacagcatagctttcatagctctcaagtctactgacaagagaacagtaccgtatatctttcgggtagacacctcagcagcaaatggttcctcagaaggtctcatgtggctgcggttggtccaatcggccagagataaggaagagcagaaccttgaagcctacataaaaaacggacagctgttctaccgctctctccgcagatatgccaaagacgaggagttactagtttggtacgggaaagaactgactgagttactcttgctctgcccctctagatcccacaacaaaatgaatggtaggttggctcgcgaccggcgtgtgggcccttaactagcggggggagagacgcagggagcggcaggggctcacccggcgcgttggcgccttttcttcccttcgggtgtctcataggaagattctgagatgtagtctggaatgaagttaaacagataggtgaggataaagcgaggaaacttgcttgtttgctgtattccctccaaatcaggagggaaagtgagatcaggttggtcattcttttctcaggcactcaggccctgagaaatgaaggtggatttgtcaaggggatggtggcaaactggcttgggggcgatgctgagtaatcannnnnnnnnnnnnnnnnnnnnnnnnnnnnnnnnnnnnnnnnnnnnnnnnttgctcactaagcagggtcgtccccttacacatgcctggaatgcagccaacgtttccagtttgagttcccctatgtggcgcatctgcgtttccgctgccccaagagacttcacagcgctgatataagtccccaagacgaacaaggcggcggcgtgggcaccaaggaccacgggggcggcggcggcggtggcaaagaccagcagcagcagcagcaggaggcacctttaggcccgtgtcccaagttttgcaaagccggccccctccaccactacccattccccttcccggaaagcagtatacccatccgcttgccgcttcgtcagcagcgcgaagtcatccacagactttcacaacctgcccagggggcttggaaaacttccggtgaggctgcagcttgttcctcagcccctaagcttaaccgcggtagttgtatttgtctgcgttctttttccccattgagctgaaccttgtttcctgcggccctcccaccggcgccgcaaaggaaagtggaaattcccgcgagaggc

SEQ ID NO: 356435 - DNA, 921 bp, Homo Sapiens
cttctagtcccacaccacatgaatggtctccccctacacatgcctgaatccaccaacctttccatttgattcccctatgtgccgcatctgcgtttccgctgcccccaatgagacttcacagcgctgatataagtcccccaagcacgaacaagccgcggcgtgggcaccaaggaccacgggccggcggcgcggtcggcaaagaccagcagcagcagcagcaggaggcacctttaggcccgggtcccaagttttgcaaagccggccccctccaccactacccatccccctccccggaaagcagcaacccatccgctgccgccggcggcagcagcgcgaagccatccacagacttccacaacctggccagggagctggaaaactcccggggaggcagcagctgctcccccagcccagagcctcagcagcggtaccggcagcgccggcggcggcggccaccaggaggcggagctgagtcccgacggcatcgccacgggcggcggcaaaggaaagaggaaattcccggaggaggcggcggagggcggcggtggcgctggtctggtagggggccggggccgcttcgtagagcggcccctcccggcctccaaggaggatctggtgtgcacaccgcagcagtaccgagcctcgggcagctacttcggcctggaagagaacggccgcctcttcgcgccgccaagtcccgagacgggcgaggcgaagcgcagcgccttcgtggaggtgaagaaggctgcccgcgcggccagcctgcaggaggaggggacagccgacggcgcgggagtcgcctccgaggaccaggacgctggcggcggcggcggctcctccacgcccgcggccgcgtcaccggtgggcgccgagaagctgctggccccgcggcctgggggcccgctgcccagccggctcgag

SEQ ID NO: 356436 - DNA, 769 bp, Homo Sapiens
ccatctctctcttatctcttcaggaagagcctaaaaggcggcaacaccaacacctcttgacatggaaatacactgatacaataggcaaaaggaaacactcgattgcatcttcccggttccaggtggccttatttgggagattctatactgaccttattcctgtgatggaggatactggcatccagcgaggcatctgggatggagatgccaaggctgtccaacaatgtctgacagatatttttaccagcgtttacaccacctgcgacatccctgagaatgctatatttggtccctgtgtcctgagccatacttccctatatgacagcatagctttcatagctctcaagtctactgacaagagaacagtaccgtatatctttcgggtagacacctcagcagcaaatggttcctcagaaggtctcatgtggctgcggttggtccaatcggccagagataaggaagagcagaaccttgaagcctacataaaaaacggacagctgttctaccgctctctccgcaggattgccaaagacgaggagttactagtttggtacgggaaagaactgactgagttactcttgctctgcccctctagatcccacaaaaaacatgaatgggtcgtccccttacacatgcctggaatgccagacaacgattccagtgtgagttcccctatgtggcgcatctgcgtaaccgatgacccaagaaacttcacagcgctgatataagtccccaagacgaacaaggcggaggacgtgggcaccaaggg

SEQ ID NO: 356437 - DNA, 1324 bp, Homo Sapiens
  misc_feature (262)..(262): n is a, c, g, or t
  misc_feature (1248)..(1248): n is a, c, g, or t
  misc_feature (1257)..(1257): n is a, c, g, or t
  misc_feature (1300)..(1301): n is a, c, g, or t
  misc_feature (1303)..(1305): n is a, c, g, or t
  misc_feature (1307)..(1307): n is a, c, g, or t
  misc_feature (1312)..(1315): n is a, c, g, or t
  misc_feature (1317)..(1320): n is a, c, g, or t
  misc_feature (1322)..(1324): n is a, c, g, or t
ggcagaatggtacacctccccatctggccgggggtgtttcccttctgcacccttctttggagccactctgccttcaagcttttctttcagcaatttggacttgaagatttaagtaaattcaggtttctgtttctctggggcctaagttttttgcctcttggaagtagcttttgttcttcaaggggttggcttttttctttctaggagtgggctttttttcttcagaacgttatcttttcttctttcaggggattagtttttnttctcaagggagtgggctttttttcttgaagagctgaagctttgtctttctctagttaactctcttcttgtttttgatctgtggttaccataggaggaattttttccattgatagtgtttcctttactttttccagaatgactttttcagcttccgtttttacttcttgttcttgctttttcactaattttacttggggaggcactgctgttttctgagatgatgattctgtaggaacaggcataggagatgctttgggtcctgatggtgcaggtggcattttgcgtatgtctccaagctgtcctgatattgctctctgggtttggcaatttaaacaaagccattcttgaatctgtgggaaaaaaattacaatgaacagattgaatgtattataatgtatctgtttctgtgattttaccaaagtgaaaatttggcaattcctatctgctgtttttgtacatggagaaggtgggtcactgttttccaaatccaatgacgcagtaattttttaaaacattacaaaaaggctatttgaactgtaaaactgtatagaatttctagagactagcaattcactatcttcattaaatgagaaaaagaaagagaaataattacattaaacgtggacccagagaaatattcattttcaggaagaaaaaaaatctgcatttgttccaaataaaattattttaaggcctggcttcttcaaaattagtattttcatccaaaatttattcaaagactattatatttcataataattatctttataataaccaattaatcaaaagttcttttaggatttagcctattatctcctatctcttgacttgggccaaatatagttctacctttcagagtagagctttataggtatagacagttttcaagaatcacttgtgcataatcctctgcttccagattatgaacataatctcattcttaatactaatcacattacctcatgcagttgaataagaagcacnccaagtctnaattatttggtatctttttccctgagtgtcctgatttgggggnntnnntnttttnnnnannnntnnn

SEQ ID NO: 356438 - DNA, 1404 bp, Homo Sapiens
  misc_feature (9)..(9): n is a, c, g, or t
  misc_feature (22)..(22): n is a, c, g, or t
  misc_feature (24)..(24): n is a, c, g, or t
  misc_feature (28)..(30): n is a, c, g, or t
  misc_feature (32)..(33): n is a, c, g, or t
  misc_feature (43)..(43): n is a, c, g, or t
  misc_feature (45)..(45): n is a, c, g, or t
  misc_feature (56)..(56): n is a, c, g, or t
  misc_feature (69)..(69): n is a, c, g, or t
  misc_feature (74)..(74): n is a, c, g, or t
  misc_feature (76)..(76): n is a, c, g, or t
  misc_feature (89)..(89): n is a, c, g, or t
  misc_feature (98)..(98): n is a, c, g, or t
  misc_feature (103)..(103): n is a, c, g, or t
  misc_feature (107)..(107): n is a, c, g, or t
  misc_feature (120)..(120): n is a, c, g, or t
  misc_feature (154)..(154): n is a, c, g, or t
tcccccccntagcaactcactncngttnnnannatttaaccanangagttttccantccaggtctttgnttgcnantctcttcctctcnaatgaaatnaatanattnagaattccaggtnaacccccaaagacctatgcctcacccccgacccnagcagcaggaactcagggagttctcacctggtctgggacctgcaggacagctcggagctgcacccagagtttgcaaaatgccacgtgccttggacacccaggtttgcctatggagtgttctatgcagacccctgcacgggaggtgattcttatcacccacatgagcaatcatctcccccaattttctctaaacagagctgggcattaactgcctcttgaaaaggggcaggaatggcttccaagatcacctccaggaaaggccagagtgttctaatggacttgaaaagcctgctcccggccagaagcagccactcatcttgggaaccccctggctctcattttggcctctcgaggatatgggctgtgatttctgagcacccagggaacacagttggctgattcctaatcaacctagttgtacaggggacaaagtcagaggggcaatcaaactcgcaacagaactcgaatctacaagcctgacctgactcagggatctcgccttgtcaccgacacacaagcacggcccctttaccaacgtgttcattgttttgtttcaaaaggcaatgcggcagcgggtccttgggagccagctctagtatagcactggctaattttttaaaaacgtctgttggctgtgagtgaatgaatgaagggatgaagggatgaatggatgagttacaaccactgccaccctgtggaggaagctgaaaggctgaaagcaaagctcatgggagggaccatgcgccaggcaaggtgaggcctggggaggacttctccgctcatgggtgggagggcttggccccaggctactcttgaccccgaccctgggtcacagtcgtggtgtgtgacacatggaaagcaccatggggaagaagctatgggtgacagtggcagacgagatccagctgggacgtgctcagggcagtaaccccggaggaggcagctacaagaaagggtgtttgcttcataaccacagcccatggcgctacacagcccacccaaaatgaaagggtttgctttcaggagaagaaaaggccaaaagcacggggtcaagataagtaggccaaatgcatggatgggtagatggagcaattcatgttgaaagtcattgccggcctcccaaactcggataccaagctaaacatgtgggtgagggattctgacacgggcaaacagggctcagtgctatagtagagggatgggtgggcagaagcagctctgctgagagcggaggatgcctggaaagaagg

SEQ ID NO: 356439 - DNA, 2071 bp, Homo Sapiens
  misc_feature (236)..(236): n is a, c, g, or t
  misc_feature (948)..(948): n is a, c, g, or t
  misc_feature (953)..(953): n is a, c, g, or t
  misc_feature (958)..(958): n is a, c, g, or t
  misc_feature (1002)..(1002): n is a, c, g, or t
  misc_feature (1008)..(1008): n is a, c, g, or t
  misc_feature (1163)..(1163): n is a, c, g, or t
  misc_feature (1165)..(1165): n is a, c, g, or t
  misc_feature (1385)..(1389): n is a, c, g, or t
  misc_feature (1391)..(1391): n is a, c, g, or t
  misc_feature (1396)..(1396): n is a, c, g, or t
  misc_feature (1398)..(1402): n is a, c, g, or t
  misc_feature (1404)..(1404): n is a, c, g, or t
gcctcacttgcctggcgcatgtccctccccatgagtttgcttaagcctttcagcttcccacacaaggtggcggtggttgtaactcatccatttcatcccttcatcccttcattcattcactcacagccaacagacgtttttaaaaaaataagccagtgctatactagagctggctcccaagaacccgctgacgcattgccttttgaaacaaaacaatgaacacgttggtaaagggnccgtgcttgtgtgtcggtgacaaggcgagatccctgagtcaggtcaggcttgtagattcgagttctgttgcgagtttgattgcccctctgactttgatcccctgtacaactaggttgattaggaatcagccaactgtgttccctgggtgctcagaaatcacagcccatatcctcgagaggccaaaatgagagccagggggttccaagatgagtggctgcttctggccgggagcaggttttcaagtcattagaacactctggcctttcctggaggtgatcttggagccattcctgcccctttcaagaggagttaatgcccagctctgtttagagaaaattgggggagatgattgctcatgtgggtgataagaatcacctcccgtgcaggggtctgcatagaacactccataggcaaacctgggtgtccaaggcacgtggcattttgcaaactctgggtgcagctccgagctgtcctgcaggtcccagaccaggtgagaactccctgagttcctgctgcctgggtcgggggtgaggcataggtcttgggggttcaacctggaattctgaatgtcattcattgcattggagaggaaggagagtaggcaaagccaagaccctggaactggacaaactcgtgtggtttaaagtcactgtgagagctggagttgagtctgcctacgggggaggactgcggcacctacctcgcaggctnttgtnaggancaatttaaccgtgattttgaactgtgaattctggaagggcggtntgcgtntccccgggggtgtgccaggggagtgaggagaaaaggccagggagacagcctcactcaggcagctgagtgggagagcatttatctctaaacctggaggggtatatggtgggacaggaggaatttgggcaggaactttcatgctaggggtttggggnantcgctggacaatgcccctggaccccccgggggtacgcgttcacgctcacctctgagaggctggaaacgcctggctgtgctttctgaatgctgtgtgcttcctgcctctgtgcctggcctgtgtgcagcacctacttgtgtccgccttcaaaaggcccttctgggtggcgtccttttccccaaaatattaggcaccagccatcaaagatactgcattgttnnnnncnccacncnnnnngncgactgacaacatttgggctcaaatgcagcaggctgggtgcccaacacagtgcctggcgagtggtagcgcttacgtttcttttctgttgaatggatggatagctaatgaaattgtaaccaatgacaagccttgatgtttataacctttactaagagattattattttgctcttcatggacctgttaacaaccaccatattgtatcttacggacgtttgtatgccacgtttgaagagcaggagccttgtttcggcgtcatgttgatggaacttgagctgtctgatgcgaatctgtgttttatgttagaaagcgcgtagccttaggatctggccagacccaggggccacttaattaaccctttgcctctttgaccctcaatctccttttctctaagccataggtcacctgaaagcctacctcacagggctgttgtgagggccgagggtgggtgtgtttcaacagtgtgcagatgctggctttccctgggaatgggcatatgttgggatttgtcttgaaagcatgagtgatggctttactagtcctaagtgaataaaaagtcagccctgaccttacgctggggattgcatttcccacagtcaagtggcatgtgcagaccactggcagagcagcctgcaggtgcttagcgatgtgggccagagtaaatatt

SEQ ID NO: 356440 - DNA, 953 bp, Homo Sapiens
  misc_feature (194)..(210): n is a, c, g, or t
  misc_feature (641)..(682): n is a, c, g, or t
caaaaagggggtgttaacgggtccctgaaaaccaaataatatttcttagaaagggttataacaccaaggctctgccttggtacaatttcattagctatccatccatcaaccagaaagaaacgtaagcggtaccactcgccaggcactgtgtgggcacccagcctgctgcatttgagcccaaatgttgtcagttnnnnnnnnnnnnnnnnnaggcaacaatgcagtatctttgatggctggtgcctaatattttgggaaaaaggacgccacccagaagggccttttgaaggcggacacaagtaggtgctgcacacaggccaggcacagaggcaggaagcacacagcattcagaaagcacagccaggcgtttccagcctctcagaggtgagcgtgaacgcgtacccccggggggtccaggggcattgtccagcgagtcccccaaacccctagcatgaaagttcctgcccaaattcctcctgtcccaccatatacccctccaggtttagagataaatgctctcccactcagctgcctgagtgaggctgtctccctggccttttctcctcactcccctggcacacccccggggacacgcacaccgcccttccagaatcacagttcaaaatcacggttacattgcnnnnnnnnnnnnnnnnnnnnnnnnnnnnnnnnnnnnnnnnnncgtaggcagactcaactccagctctcacagtgactttaaaccacacgagtttgtccagttccagggtcttggctttgcctactctccttcctctccaatgcaatgaatgacattcagaattccaggttgaacccccaagacctatgcctcacccccgacccaggcagcaggaactcagggagttctcacctggtctgggacctgcaggacagctcggagctgcacccagagtttgcaaaatgccacgtgcctggacacccggttgctatgg

SEQ ID NO: 356441 - DNA, 389 bp, Homo Sapiens
agatcagctcggccccagttctgcttcttgaaagagtagttaatgcccagctctgtttagagaaaattgggggagatgattgctcatgtgggtgataagaatcacctcccgtgcaggggtctgcatagaacactccataggcaaacctgggtgtccaatggcacgtggcattttgcaaactctgggtgcagctccgagtctgtcctgcaggtcccagaccaggtgagaactccctgagttcctgctgcctgggtcgggggtgaggcataggtcttgggggttcaacctggaattctgaatgtcattcattgcattggagaggaaggagagtaggcaaagccaagaccctggaactggtttcaagaagcaggaactggggggatcctcta

SEQ ID NO: 356442 - DNA, 1001 bp, Homo Sapiens
  misc_feature (52)..(88): n is a, c, g, or t
cgaatgatagactcactatagggcgactcggaggttaacgcggtggcggcgnnnnnnnnnnnnnnnnnnnnnnnnnnnnnnnnnnnnnatcaggccaaatcggccgagctcgaattcgtcgagagcggcttctcgcgcctcgctctggccctgcaggttgtgtttccgcctctaccccgcctccattccgttgctctctcagtctcagacccgggctctcggtccgccgcttcaggtcttggcgcagcctcagagagttggcgcggctctgtgttgaccaaacctagtggatgcagttagcgccggagcccggccccgcccgtcaccagggttattcccgccttctaggtttgccaggactgccggccctgcagctgccttctgccccaggtttttggctactgatgttacaaacaataaaatattggagcatagagttgaagaacagactcaaaccaggtttttatttaattagttaaaaatatggatcctgagacaaggggacaagagattatcaaagtgacacctcttcaacaaatgcttgcctcatgtactggagctatactgacatcagtaatagtgacacccctggatgttgttaaaattagactccaagcccaaaacaacccactccccaaaggaaaatgttttgtatatagtaatggactcatggatcatctatgtgtctgtgaagagggaggcaacaaactatggtataagaagccagggaaatttccaggggaacattggatgcattttttaaaaatcattcgaaatgagggccattaaatctctatggagtggccttcctcctaacctagtgatggcagttcctggccacagttatttatttttacctggctattgatcaattacagtgctcttctgaggatctaagttaagagcaacatgtaaccctggcattccaatggttgctcggacattgttcgccgaacatggggccctacatgtggataagtcccgtcaattgggctgaaacc

SEQ ID NO: 356443 - DNA, 1063 bp, Homo Sapiens
  misc_feature (843)..(843): n is a, c, g, or t
gggtccggaattcccgggatgccgctccccgcgctcgtagcgcgggcctggggactggggatcccgccgccgggccgcagcatggggcgcttccgcgggggcctgcggtgcatcaagtacctgctgcttggcttcaacctgctcttctggctggctggatcggccgtcattgcttttggactatggtttcggttcggaggggccataaaggagttatcatcagaggacaagtccccagagtatttctatgtggggctgtatgttctggttggagccggggccctgatgatggccgtggggttcttcggatgctgcggagccatgcgggagtcgcaatgtgtgcttggatcattttttacctgcctcctggtgatatttgctgctgaagtaaccactggagtatttgcttttataggcaagggggtagctatccgacatgttcagaccatgtatgaagaggcttacaatgattaccttaaagacaggggaaaaggcaatgggacactcatcaccttccactcaacatttcagtgctgtggaaaagaaagctccgaacaggtccaacctacatgcccaaaggagcttctaggacacaagaattgcatcgatgaaattgagaccataatcagtgttaagctccagctcattggaattgtcggtattggaattgcaggtctgacgatctttggcatgatattcagcatggtcctctgctgtgcgatacgaaactcacgagatgtgatatgaagctacttctacatgaaaattgcaatctaaagctttcataccaaatgtcacaggagctgtctccccagctcatttttaacactgaaatgacattangatctaaaataatttgctgtcaaatgtacatttgcatgagtacgtatgttttggctcattactggtttaccccttgagtgaatgcctgtttatgatggactgagagcatattcatgtgtgatctgcgtgtttctggaatatgctttatacgtaatgaaatctgtttgctgggaattcctgattcttgttatataagaggaacaacctatttcgctcccag

SEQ ID NO: 356444 - DNA, 758 bp, Homo Sapiens
ccgccccaccgctaccgccgctgcagccgctttccgcggcctgggcctctcgccgtcagcatgccacacgccttcaagcccggggacttggtgttcgctaagatgaagggctaccctcactggcctgccaggatcgacgacatcgcggatggcgccgtgaagcccccacccaacaagtaccccatctttttctttggcacacacgaaacagccttcctgggacccaaggacctgttcccctacgacaaatgtaaagacaagtacgggaagcccaacaagaggaaaggcttcaatgaagggctgtgggagatccagaacaacccccacgccagctacagcgcccctccgccagtgagctcctccgacagcgaggcccccgaggccaaccccgccgacggcagtgacgctgacgaggacgatgaggaccggggggtcatggccgtcacagcggtaaccgccacagctgccagcgacaggatggagagcgactcagactcagacaagagtagcgacaacagtggcctgaagaggaagacgcctgcgctaaagatgtcggtctcgaaacgagcccgaaaggcctccagcgacctggatcaggccagcgtgtccccatccgaagaggagaactcggaaagctcatctgagtcggagaagaccagcgaccaggacttcacacctgagaagaaagcagcggtccgggcgccacggaggggccctctgggggggacggacaaacaagaaggcgccgtcaggcctcc

SEQ ID NO: 356445 - DNA, 991 bp, Homo Sapiens
attcccgggattctgcatccttaggagctgccagctgcatcctctgggggaccgcccgtgagcccctctttgcgggaggggtccccaggaaaggtcctggcagtccatagacgctgagcttggccccaccccctggttgcttcagagggccggatctggctttgctcaggtggagcacctgccctggggccagctccgtccctggggtagggggagagctctctgggtggggcacagctttgcagtgaagggtacacagaagaatgcagcttcccatcgggaaggggctgctgcttcctggggggaaggctcccctcctcccagcgtgatttgccccaagtaacttggctgatttctcggtgatttcctgggtcagtgggtaaagccaccccctcactggcctctcactgcagatcgacgacatcgcggatggcgccgtgaagcccccacccaacaagtaccccatctttttctttggcacacacgaaacagccttcctgggacccaaggacctgttcccctacgacaaatgtaaagacaagtacgggaaacccaacaagaggaaaagcttcaatggaagggctggggggaagatccagaacaacccccacgccagctacagcggcccctccgccagtgagctcctccgacagcgaggcccccgagggcaaccccgccgacggcagtgacgctgacaaggaccatgaggaccggggggtcatggtcgtcacagccggtaacccccccagctgccatccgacaggatggagaccgcactctactctgaccagagtaggcaacaacaggggccctgaaaaaggaagacccccgcgcctcaacaatgttcggctttcctaaaactcaccccggaaaaggcctctcagccccactctggtattcatggcccaccgcgtgtctcccccctgtccctaagaaagcgacaaactccgcgaaaagctctccactttggcagttctgcgaagaaaccaac

SEQ ID NO: 356446 - DNA, 2412 bp, Homo Sapiens
  misc_feature (17)..(17): n is a, c, g, or t
  misc_feature (22)..(22): n is a, c, g, or t
  misc_feature (35)..(35): n is a, c, g, or t
  misc_feature (38)..(38): n is a, c, g, or t
  misc_feature (49)..(49): n is a, c, g, or t
  misc_feature (66)..(66): n is a, c, g, or t
  misc_feature (68)..(68): n is a, c, g, or t
  misc_feature (74)..(75): n is a, c, g, or t
  misc_feature (77)..(77): n is a, c, g, or t
  misc_feature (81)..(81): n is a, c, g, or t
  misc_feature (85)..(85): n is a, c, g, or t
  misc_feature (96)..(96): n is a, c, g, or t
  misc_feature (105)..(106): n is a, c, g, or t
  misc_feature (114)..(114): n is a, c, g, or t
  misc_feature (118)..(118): n is a, c, g, or t
  misc_feature (121)..(121): n is a, c, g, or t
  misc_feature (123)..(123): n is a, c, g, or t
  misc_feature (126)..(126): n is a, c, g, or t
  misc_feature (130)..(131): n is a, c, g, or t
  misc_feature (135)..(136): n is a, c, g, or t
  misc_feature (140)..(140): n is a, c, g, or t
  misc_feature (142)..(142): n is a, c, g, or t
  misc_feature (144)..(144): n is a, c, g, or t
  misc_feature (146)..(147): n is a, c, g, or t
  misc_feature (151)..(151): n is a, c, g, or t
  misc_feature (155)..(155): n is a, c, g, or t
  misc_feature (161)..(161): n is a, c, g, or t
  misc_feature (166)..(168): n is a, c, g, or t
  misc_feature (172)..(173): n is a, c, g, or t
  misc_feature (181)..(181): n is a, c, g, or t
  misc_feature (183)..(183): n is a, c, g, or t
  misc_feature (193)..(194): n is a, c, g, or t
  misc_feature (204)..(204): n is a, c, g, or t
  misc_feature (206)..(207): n is a, c, g, or t
  misc_feature (211)..(211): n is a, c, g, or t
  misc_feature (213)..(214): n is a, c, g, or t
  misc_feature (220)..(220): n is a, c, g, or t
  misc_feature (225)..(225): n is a, c, g, or t
  misc_feature (230)..(232): n is a, c, g, or t
  misc_feature (235)..(235): n is a, c, g, or t
  misc_feature (237)..(237): n is a, c, g, or t
  misc_feature (242)..(244): n is a, c, g, or t
  misc_feature (248)..(249): n is a, c, g, or t
  misc_feature (254)..(256): n is a, c, g, or t
  misc_feature (258)..(259): n is a, c, g, or t
  misc_feature (264)..(264): n is a, c, g, or t
  misc_feature (269)..(269): n is a, c, g, or t
  misc_feature (281)..(281): n is a, c, g, or t
  misc_feature (283)..(283): n is a, c, g, or t
  misc_feature (288)..(288): n is a, c, g, or t
  misc_feature (292)..(292): n is a, c, g, or t
  misc_feature (296)..(296): n is a, c, g, or t
  misc_feature (298)..(298): n is a, c, g, or t
  misc_feature (301)..(301): n is a, c, g, or t
  misc_feature (305)..(305): n is a, c, g, or t
  misc_feature (307)..(307): n is a, c, g, or t
  misc_feature (312)..(315): n is a, c, g, or t
  misc_feature (317)..(317): n is a, c, g, or t
  misc_feature (319)..(319): n is a, c, g, or t
  misc_feature (324)..(324): n is a, c, g, or t
  misc_feature (326)..(329): n is a, c, g, or t
  misc_feature (340)..(340): n is a, c, g, or t
  misc_feature (343)..(343): n is a, c, g, or t
  misc_feature (345)..(345): n is a, c, g, or t
  misc_feature (357)..(357): n is a, c, g, or t
  misc_feature (367)..(367): n is a, c, g, or t
  misc_feature (372)..(372): n is a, c, g, or t
  misc_feature (381)..(381): n is a, c, g, or t
  misc_feature (386)..(386): n is a, c, g, or t
  misc_feature (396)..(396): n is a, c, g, or t
  misc_feature (403)..(403): n is a, c, g, or t
  misc_feature (410)..(410): n is a, c, g, or t
  misc_feature (414)..(414): n is a, c, g, or t
  misc_feature (417)..(417): n is a, c, g, or t
  misc_feature (420)..(420): n is a, c, g, or t
  misc_feature (427)..(427): n is a, c, g, or t
  misc_feature (443)..(445): n is a, c, g, or t
  misc_feature (449)..(449): n is a, c, g, or t
  misc_feature (452)..(452): n is a, c, g, or t
  misc_feature (457)..(458): n is a, c, g, or t
  misc_feature (460)..(461): n is a, c, g, or t
  misc_feature (463)..(463): n is a, c, g, or t
  misc_feature (467)..(468): n is a, c, g, or t
  misc_feature (471)..(491): n is a, c, g, or t
  misc_feature (495)..(495): n is a, c, g, or t
  misc_feature (497)..(498): n is a, c, g, or t
  misc_feature (504)..(504): n is a, c, g, or t
  misc_feature (506)..(507): n is a, c, g, or t
  misc_feature (509)..(509): n is a, c, g, or t
  misc_feature (517)..(517): n is a, c, g, or t
  misc_feature (519)..(519): n is a, c, g, or t
  misc_feature (523)..(524): n is a, c, g, or t
  misc_feature (526)..(526): n is a, c, g, or t
  misc_feature (529)..(529): n is a, c, g, or t
  misc_feature (531)..(532): n is a, c, g, or t
  misc_feature (534)..(534): n is a, c, g, or t
  misc_feature (536)..(536): n is a, c, g, or t
  misc_feature (538)..(539): n is a, c, g, or t
  misc_feature (547)..(550): n is a, c, g, or t
  misc_feature (553)..(553): n is a, c, g, or t
  misc_feature (557)..(557): n is a, c, g, or t
  misc_feature (560)..(560): n is a, c, g, or t
  misc_feature (565)..(565): n is a, c, g, or t
  misc_feature (582)..(600): n is a, c, g, or t
  misc_feature (606)..(606): n is a, c, g, or t
  misc_feature (608)..(608): n is a, c, g, or t
  misc_feature (611)..(611): n is a, c, g, or t
  misc_feature (615)..(615): n is a, c, g, or t
  misc_feature (628)..(628): n is a, c, g, or t
  misc_feature (633)..(633): n is a, c, g, or t
  misc_feature (635)..(635): n is a, c, g, or t
  misc_feature (639)..(639): n is a, c, g, or t
  misc_feature (644)..(644): n is a, c, g, or t
  misc_feature (657)..(657): n is a, c, g, or t
  misc_feature (732)..(732): n is a, c, g, or t
  misc_feature (735)..(735): n is a, c, g, or t
  misc_feature (1908)..(1963): n is a, c, g, or t
catacacgtataagtanatttngtttcatcatggngtnaccagattttnaaaccagccaacacttncncatttnngnggcnaagngatgttaaatncttagatgnnatagttgnggtncancngcnttgnnattnngctnanangnntagnatgngattgngcgannnatcnnagtgttcncnggggggtctnnggggtgggtngnnacantnnaggggngatcngattnnnaangngccannnaagnnttttnnngnnaccantcttnatgccaccaaananaagcntgcnatancnggngggngnggggnnnngngnctgantnnnnggggggggagnggntncggcgggggtgngctgggtgtncgtgnggggcattnggggntttgtaatangtgattnataatanaggnttnggngtgtggnatggggctaggggggnnngagnggnggggnntnntngggnnggnnnnnnnnnnnnnnnnnnnnngtgngnntgggtncnncnggcctttngngttnncncangnntncngnntttgtgtnnnngtnacanacnaaggnctagcaggggtctggcnnnnnnnnnnnnnnnnnnntgacantnggncatngagcgcgggtgangcgantnattnatggntgtgctatgtgcnatgaactctaatagcccaacttatacatggcactccaaggggatgcttcagccagaaagtaaagggctgaaaaantanaacaatacaaaaggcctcgtgtggtgggaactgtggcctcactcttacttgtccttccattcaaaacagtttggcacctttccatgacgaggatctctacaggtaggttaaaatacttttctgtgctattcagccagaaatagtttttgtgctggatatgattttaaaacagattttgtctgtcacccagtgcaaaaacattacagatgtctgggctaatacaaaaacacataagaacctacaactttatatttaatactctattcaaatttaactcaaagtaatgcaaaataattagaagtaaaaacttaattccttcctgagagctcctatttggaaaagcttcacatatccacacacaaatatgggtatattcatgcacagggcaaacaactgtattctgaagcataaataaactcaaagtaagacatcagtagctagataccagttccagtattggttaatggtctctggggatcccattttaagcactctcagatgaggatcttgctcagttgttagactatcattagtttgattaagcaactgaagtttacttcataaattactttttcctatatccaggactctgcctgagaaattttatacattcctccaaaggtaagtattctccaaaggtaagtatttgactattaacacaaaggcaatgtgattattgcataatgacactaaatattatgtggcttttctgttaggtttataagttttcaatgatcagttcaagaaaatgcagatcatatataactaaggttttacaccagtggttgacaaactatggcccacaggctaaacccagcctccccttgtttttataaataagttttattagaacataaccacactcattcatttctgtattgtgtatagctgctttcacgctatactagcagaactgaatagttgtgacagagactgtatggaccgtgaagcataaatatttaccatctggcccattctaaaaaaagtgtgccaattcctggtttacactaaaatatagagtttagtgggaagcctatttgaaatgtgttttttttaggggctgtaattaccaattaaaattaaggttcaggtgactcagcaaccaaacaaaagggatactaattttttatgaacaatatatttgtattttatggacataaaaggaaactttcnnnnnnnnnnnnnnnnnnnnnnnnnnnnnnnnnnnnnnnnnnnnnnnnnnnnnnnnaaaaggccatttctttaatatcataataaaattaacattccatccatgaaataaaccagaacttgagcttagagtctctctctactaaacacattacttttggaatgtttttgcatcaggacaaaatggtatccaaattgatcagacatataaagtagacaagtgaaactaacatacgactgccagtttctaaggagtgttacggtcgccatcttcgtaaagccagacccaaactgcaaccataacaagctgtcgtcataaaggcaaaaattgaggctgctacgtttatgttatactggttatcactcaggagtggctgcccggttatggttgtattgcaatgcaaatcatgcagggatgtggctgctgcttccaataaaaaggctccaaaatagaagacaaatactgtaaaatggtaggcaaaatccaggaagttccagttagcatca

SEQ ID NO: 356447 - DNA, 958 bp, Homo Sapiens
  misc_feature (851)..(907): n is a, c, g, or t
gtttttcgttattcttgttcccctattgttctggtgtcttctgttattgcaatcactcgtttactcggtcatgctttgtttgttcctgtcttgcgtcgtccatttctccgttgtcgccttcgaatctttccggcccttgtctcgttccgcttcgcgtccccgtggttccccgcttgcccacctggccccagacatcctgcggacctactcgcggcgccttcgtctgcctggagattctgttcgggggtccttgtctggatttctggttcgcctcctccaatgttcctctacctctactacaaggatgggtcatgtttgtgtccgtgacagcgtttttcttttcgctcctctttctgggcatgttcctctctggcatggtggctcaaattgatgctaactggaacttcctggattttgcctaccattttacagtatttgtcttctattttggagcctttttattggaagcagcagccacatccctgcatgatttgcattgcaatacaaccataaccgggcagccactcctgagtgataaccagtataacataaacgtagcagcctcaatttttgcctttatgacgacagcttgttatggttgcagtttgggtctggctttacgaagatggcgaccgtaacactccttagaaactggcagtcgtatgttagtttcacttgtctactttatatgtctgatcaatttggataccattttgtccagatgcaaaaacattccaaaagtaatgtgtttagtagagagagactctaagctcaagttctggtttatttcatggatggaatgttaattttattatgatattaaagaaatggccttttattttacatctctnnnnnnnnnnnnnnnnnnnnnnnnnnnnnnnnnnnnnnnnnnnnnnnnnnnnnnnnnatgtccataaaatacaaatatattgttcataaaaaattagtatcccttttg

SEQ ID NO: 356448 - DNA, 1446 bp, Homo Sapiens
  misc_feature (90)..(90): n is a, c, g, or t
  misc_feature (938)..(938): n is a, c, g, or t
  misc_feature (1035)..(1035): n is a, c, g, or t
  misc_feature (1055)..(1055): n is a, c, g, or t
  misc_feature (1065)..(1065): n is a, c, g, or t
  misc_feature (1071)..(1071): n is a, c, g, or t
cattgctcacatcgctggggcactttccacaaaacaagtccaaaggcccaaatatcgacccttttataagaatcgaacaatcccacctgnatgtttcatctagaactcggggggccatgtagcgcttggtgcccacacgggatttgttccccacatcaagctgattggtgcctctgggaaatgcatgactgcccaggccccaaatctgctatgcaacactgtcccattccttcttaaccagaatatttttgcctctttaaatctcgatgggcaatggctggtttcccttgggtcccaaatatctctatgtgcaaatgtgcaagaccactagctatggacagcactattcgaaggcagctaactgtatccagagtagtaagctgaagatagtcgtacaacgatcccatttcatgataatgtgtaattaaccacagctgggtactggagtgtcttgatgtcatgtctgaagcaatgaaacctaagatattttcatgcctcagcatcacagtgttgtacaattccgtttccctgaaccatgacttctcatcacgggaggagaagatcttcacggcaacattttccccttgccagctgcccctccacacctcaccatacctgcctttcccgacacactccaacagtgtaatctggcgagccactgttctttgtaccagaaaaggaagaccagagccacttcctgatgtacacgaatgatccaataaatctgctaaagtgctgtctccaacattggtggtgatgagcccttcgatagtgccatactccacgtctcggggattgaggcgttcttggttgcgccttttaaattttcggagagcaactcccagcaggcaggctaaaagacatactgcgaacactacagagagaataatgaggccaacctccaagtggaaattctgtgttccagggaaggattttcntttagtgggcagctgggccgtgatgttcctgttacaccagtccccttggcagcactccacagcttggccaggggacggcggggtcttacaggtcatntttccctgctcataaacctngaagcagctntttttnttagacgtggaagccatcgttgatgctcagtgaggaaaagcactgctggccttcacagtggtcctcattaccgcaggagagaccttcacacacacacatgtagagtttggggttgaccttgggcttctcatcttccatactaggggaggggagagcaatcatgataagcacaggaagaatcatcactccatctaccattgtacaacttaatgcaggctcttggtcacatctgcccacagtccttcaagccgcgtgccctcgttcagagcttctctcactctggtcactggggtactcggagagtagaagaggcgttcctgggattatgagttctccagcagctctcactttggcagtgtgacgcttaccaatgct

SEQ ID NO: 356449 - DNA, 2063 bp, Homo Sapiens
  misc_feature (105)..(114): n is a, c, g, or t
  misc_feature (1226)..(1227): n is a, c, g, or t
  misc_feature (1229)..(1230): n is a, c, g, or t
  misc_feature (1465)..(1479): n is a, c, g, or t
  misc_feature (1668)..(1668): n is a, c, g, or t
  misc_feature (1692)..(1692): n is a, c, g, or t
  misc_feature (2031)..(2031): n is a, c, g, or t
  misc_feature (2035)..(2035): n is a, c, g, or t
acctctctccccacactccaatctacaaccctgggcatcataatccatatgtattaactaacagcaatatgaatcaaaaacccttttaccaccatctcatcattnnnnnnnnnnattcccacctccccgtccccattctcacagcgtcaacaagccacattccccgctgtgctcattgtccaattagatcctaatcatgacctcactggttgtcagaatgcaatccatctgtctccctccccaaatggctcctttcacaaggcacactgtcgtacccacccatgtgttggggagacatcaaaaccaccctaacctcgctcgatgactgtgaactgggcatttcacgaactgttcacactgcagagactaatgttggacagacactgttgcaaaggtagggactggaggaacacagagaaatcctaaaagagatctgggcattaagtcagtggctttgcatagctttcacaagtctcctagacactccccacgggaaactcaaggaggtggtgaatttttaatcagcaatattgcctgtgcttctcttctttattgcactaggaattctttgcattccttacttgcactgttactcttaattttaaagacccaacttgccaaaatgttggctgcgtactccactggtctgtctttggataataggaattcaatttggcaaaacaaaatgtaatgtcagactttgctgcattttacacatgtgctgatgtttacaatgatgccgaacattaggaattgtttatacacaactttgcaaattatttattacttgtgcacttagtagtttttacaaaactgctttgtgcatatgttaaagcttatttttatgtggtcttatgattttattacagaaatgtttttaacactatactctaaaatggacattttcttttattatcagttaaaatcacattttaagtgcttcacatttgtatgtgtgtagactgtaactttttttcagttcatatgcagaacgtatttagccattacccacgtgacaccaccgaatatattactgatttagaagcaaagatttcagtagaattttagtcctgaacgctacggggaaaatgcattttcttcagaattatccattacgtgcatttaaactctgccagaaaaaaataactattttgttttaatctactttttgtatttagtagttatttgtataaattaaataaactgttttcaagtcaaaaaaacannanncagcgaagccaacgacgctacccacacccacagactattctactatgtgttgctataataccaaatcaaacgccagccgcgcccccctcccgtgaaagagaggcgtgttgctacacccaccccacaggagaaagctgtccctatatccccgcctttacacactttcttctgaacggggccccctctgggcgcgccgcgcgaagatagctgttcacaccacacacctcgtggagtnnnnnnnnnnnnnnntccgccccccaccgcccaatggaggagaaaaacggggcttaattatatatttgtttccataaataacgaggagaaacattcaatgtgttaacacaataatcaccaatacacccggggagagaatactccccccccgaccacgacagctttagaatcatgcaccctggtctcccgtggcgggtctgtggngcaaacgcgagacggggtttggcnttgtcctcctcaacaacaccttcccataatcaatgcctcccccatgaccgcactccaccgacgagcgcctctctcctcggcaggaggtagatctcttcaaccaaactatgaagagccgcccactccacatacgaaaataatccacaagcagcacgaatgcaaggcacaccaacaaaccccggccgcgccccgcctccctcccagcattcctcctccgcacagacccaacaattacggatgtgtgaccacacgaaagatgtcacatatataagaatcactggggctccccccagcaaaaattatcctctcctaccatcggccgccagttcttgtgcacanagantttgtacttggtaaacaaacaaaacaca

SEQ ID NO: 356450 - DNA, 780 bp, Homo Sapiens
gggccccacagccccttatcccgaaacgggatttggcacttcaggggcctcaacaccccaatgtgggaggacaccccttagcagattaatggatcattcgtgtacatcagggaagtggctctgtctccttttctggtacaaagaacagtggctcgccagattacactgttggagtgtgtcgggaaaggcaggtatggtgaggtgtggaggggcagctggcaaggggaaaatgttgccgtgaagatcttctcctcccgtgatgagaagtcatggttcagggaaacggaattgtacaacactgtgatgctgaggcatgaaaatatcttaggtttcattgcttcagacatgacatcaagacactccagtacccagctgtggttaattacacattatcatgaaatgggatcgttgtacgactatcttcagcttactactctggatacagttagctgccttcgaatagtgctgtccatagctagtggtcttgcacatttgcacaatagagatatttgggaacccaagggaaaccagccattgcccatcgagatttaaagagcaaaaatattctggttaagaagaatggacagtgttgcatagcagatttgggcctggcagtcatgcattcccagagcaccaatcagcttgatgtggggaacaatccccgtgtgggcaccaagcgctacatggcccccgaagttctagatgaaaccatccaggtggattgtttcgattcttacctcgtgccgaattcgccaccaggcctcgcttacctagccgtaa

SEQ ID NO: 356451 - DNA, 593 bp, Homo Sapiens
  misc_feature (452)..(452): n is a, c, g, or t
  misc_feature (461)..(461): n is a, c, g, or t
  misc_feature (515)..(515): n is a, c, g, or t
atttaaagagcaaaaatattctggttaagaagaatggacagtgttgcatagcagatttgggcctggcagtcatgcattcccagagcaccaatcagcttgatgtggggaacaatccccgtgtgggcaccaagcgctacatggcccccgaagttctagatgaaaccatccaggtggattgtttcgattcttataaaagggtcgatatttgggcctttcgacttgttttgtgggaagtggccaggcggatggtgagcaatggtatagtggaggattacaagccaccgttctacgatgtggttcccaatgacccaagttttgaagatatgaggaaggtagtctgtgtggatcaacaaaggccaaacatacccaacagatggttctcagacccgacattaacctctctggccaagctaatgaaagaatgctggtatcaaaatccatccgcaagactnacagcactncgtaatcaaaaagactttgaccaaaattgataattcctcgacaaattgaaactnactgttgacattttcatagtgtcaggaggagatttacgttgttgtcattgtccagcttggcctattcttgccttcctg

SEQ ID NO: 356452 - DNA, 1018 bp, Homo Sapiens
  misc_feature (870)..(870): n is a, c, g, or t
  misc_feature (876)..(876): n is a, c, g, or t
  misc_feature (976)..(976): n is a, c, g, or t
  misc_feature (978)..(979): n is a, c, g, or t
  misc_feature (1001)..(1001): n is a, c, g, or t
  misc_feature (1009)..(1009): n is a, c, g, or t
  misc_feature (1011)..(1011): n is a, c, g, or t
  misc_feature (1016)..(1016): n is a, c, g, or t
gctgtgtggatgcggcgaaacgctgaggcgcggccttcgctgtgtggtggggactcacaagaccgacgtcaagatgatgctttcaagggccaaacctgctgtaggcagaggcgtacagcacactgacaaaagaaagaagaaaggtaggaagattccaaaactagaggagctactttcaaaaagagatttcactggagctattaccctgttggagttcaaacgtcatgttggggaagaagaagaggatactaatttgtggattggatattgtgcctttcacctgggtgactacaagagagctctggaggaatacgaaaatgctacaaaagaggaaaattgtaattctgaagtctgggtgaacctagcttgcacctacttctttcttgggatgtataaacaagctgaagcagctggatttaaagcttcaaaaagccgactccaaaaccgcctcctcttccacttggctcacaagtttaatgatgagaaaaaattgatgagctttcatcaaaatcttcaggatgtcacagaagatcaactcagtttggcctcaatccactatatgcgatctcactaccaagaagctatagatatatataagcgaatactgctagataacagggaataccttgcccttaatgtttatgtggccctctgctactacaagttggattactatgatgtgtctcaagaagttttggctgtttaccttcagcaaattcctgatagtaccatcgcactcaatcttaaagcctgtaaccattttcgcctttacaatggcagagcagctgaggcagaactcaaaagcttgatgggacaatgcgttctttcatcctttgaatttgctaaagaactcatcaggcacaatctggntgtttncgaggaggtgaaggggctttgcaggctttacctcccctagttgatgtcattcctgaagctaggctaaacttggtgattactaacttcgtcaagatgatgnannagaagcatataacttattaagnctctggancnactantc

SEQ ID NO: 356453 - DNA, 476 bp, Homo Sapiens
agtgtttcaggaaggagggatgctttaattggcccagttctgttgggaggtcacctgaggtgaacattaagaaatggtttggcaagatggagacttattggtgaagttcacaagaactattttgttggagtgctgaggacaaaagcctgattgagggtggtgattccactgaagcaactgccaaaccaaagagaagtttttatgctgccagggatttgtacaagtaccgacaccagtacccacagaacttcaaagatatccgatatcaaaatgacttgagcaatcttcgtttttataagaataaaattccattcaagccagatggtgtttacattgaagaagttctaagtaaatggaaaggagattatgaaaaactggagcacaaccacacttacattcaatggcttttccccctgagagaacaaggcttgaacttctatgccaaagaactaactacatatgaaattgaggaattc

SEQ ID NO: 356454 - DNA, 1244 bp, Homo Sapiens
agcgggcccgcggcggaaggggcggacccgggagactgaggacttggattgcttaaggacaccaggcaggcgcgacagccttcagcctctccctctgcagttttggccggttcctttaacttgccttcatctggggctgtttggtatttccacgtgccttgggcccgcccactgcagcctccatcttagaagcggccgccggcgcctagaactgtatttcagaaaaaagaaactacagttttagcatgcagaaaggaaaagggagaacaagccggatcagaagacgaaaactctgcggaagttctgaatcaagaggagtgaatgagagccacaagtctgaatttatagagctgaggaagtggctgaaagctaggaagtttcaagattcaaacttagcgcctgcttgttttccaggtacaggaagagggctgatgagtcaaacatccctgcaggagggacagatgattatttcgttgcctgagagttgcctgctcaccacggacacagtgattcgaagctacttaggggcatacattactaagtggaagcctcctccatctcctctgctggcgctgtgcacctttttagtttcagaaaagcatgctgggcaccgatctctttggaagccttacctggagattttacccaaggcgtatacctgccctgtttgtttggagccggaagtggtgaaccttcttcccaaatctttaaaagcaaaggctgaagagcagagagcccacgtgcaggagttctttgcttcctccagagactttttctcttctctgcagcctctgtttgcggaggctgttgacagcatcttcagctacagtgccctgctgtgggcttggtgcaccgtcaacaccagagccgtgtacctgaggcccaggcagcgggaatgcctttctgcagagccggacacctgtgcactcgctccgtacctggacctgctgaatcatagcccacatgtccaggtaaaagcagcgtttaatgaagaaactcattcttacgaaattagaacgacttcacgttggagaaagcatgaagaggtattcatctgttacggccctcacgataatcaacggctgttcctggaatacggatttgtttctgtccataatcctcatgcttgtgtttatgtctcaagaggttggaatcaactttgttcttaacattaacactatataatttttttccccatttggagatgtgtattttcagttttaataaaaatatcaaaaccttaa

SEQ ID NO: 356455 - DNA, 1716 bp, Homo Sapiens
  misc_feature (1303)..(1303): n is a, c, g, or t
cacacatgaaatggagagtgaaagccagcctgcctctgctgacaagctcgcttccgacgcctggccaagagctcgagtctagggtgaccatggcagtgcggctgagcgtggtggccctgtgagccgcagccctggagctccaagcgctggggaggcagaggctcggcccagccccagcaccaccccactcccagactcttcacccagcaggaagccaccccccatttccaagaagcccaaactgttcctggtggtaccacctccgcagaaagattttgcagtggagcccgcagagaacgtgagcgaagccctccgagctgtgcccagccccacgacgggagaggagggctctgtgcacagcagggaggcaaaagagagttctgcagcccaagctggctctcatgccacgcaccctggcacctcggttcttgagggaggagctgcaggatccatgtctcccagcagagtggaagccaatgtccccatggttcagcctgatgtctcaccagcccccaagcaggaggagccagccgagaacagtgcggatactgggggcgatggggagagctgcctatctcaacaggacggagcagctggggtgccggagaccaacgcagccggttcatcctcagaggcctgtgacttcctcaaggaagacgggaatgatgaggtaatgacccccagtcgacccaggaccacagaagacctttttgcagctattcacagatccaaaaggaaagtcctcggccgtagagattcagatgatgaccactcccgaaaccattctccctccccgcccgtgacacccaccggcgctgccccaagcctggcctctccaaagcaagtggggtcgattcagagaagcatccgaaaagagcagcaccagcagtgacaacttcaaagctctgctgctgaaaaagggcagtcgttcagacaccagcgcccgcatgtctgcagcagagatgctcaagaacacagaccctagattccagaggtcgaggtcagagccttccccagatgcccccgagagcccgtcaagctgctccccaagcaagaacagaagggcgcaggaggagtgggccaagaacgaaggcttgatgcctcggagtctgtccttttccggccccaggtacggccgcagccgaacgccgccttctgccgccagcagcaggtacagcatgcggaaccggatccagagcagccccatgaccgtcatctcggagggagaaggggaagccgtggagcctgtggacagcatagcccgcggggctctgggcgctgcggagggatgttccctggacgngactggcgagggaggagatggacgagggcggcctgctctgtggggaagggcctgccgcctccctgcagccccaggcccccaggccctgtggatgggacagccagtgcagagggcagagagccctccccacagtgtggcggttctctgagcaaggagagttaaggccacagaacgtaactctcccaggtgacacgggggggagacgagcaatgcagcactctaagaagcctgctaagcgcccttccctggctcacccggggagcccactctgcttctgtgctgtgggccccggggttgccagccctgcagtgtgagtgaacggttatttaggactcacctggcacttgccctgtggcttaagaacaagtagaagcttaaacttctgaaagtgcttcccggggggaagatattag

SEQ ID NO: 356456 - DNA, 989 bp, Homo Sapiens
  misc_feature (5)..(5): n is a, c, g, or t
  misc_feature (35)..(35): n is a, c, g, or t
  misc_feature (53)..(53): n is a, c, g, or t
  misc_feature (62)..(62): n is a, c, g, or t
  misc_feature (117)..(117): n is a, c, g, or t
  misc_feature (220)..(221): n is a, c, g, or t
  misc_feature (231)..(473): n is a, c, g, or t
  misc_feature (512)..(512): n is a, c, g, or t
  misc_feature (525)..(525): n is a, c, g, or t
  misc_feature (528)..(528): n is a, c, g, or t
  misc_feature (530)..(530): n is a, c, g, or t
  misc_feature (856)..(864): n is a, c, g, or t
ccatnacttctgggtaagtctagaagtaacagttnactgtaaccacatttctntccccaatnagtattttttaagattattaaagttcattattactaccctatgatgtgaaactcncatttgcttaatctttttaattttttattctcaacctcatcttactgaagagcataaaactcttttaccatattcttaaaatgtggaattctcggcccaggtnnaagtgctcannnnnnnnnnnnnnnnnnnnnnnnnnnnnnnnnnnnnnnnnnnnnnnnnnnnnnnnnnnnnnnnnnnnnnnnnnnnnnnnnnnnnnnnnnnnnnnnnnnnnnnnnnnnnnnnnnnnnnnnnnnnnnnnnnnnnnnnnnnnnnnnnnnnnnnnnnnnnnnnnnnnnnnnnnnnnnnnnnnnnnnnnnnnnnnnnnnnnnnnnnnnnnnnnnnnnnnnnnnnnnnnnnnnnnnnnnnnnnnnnnntgacagcagaactctgtctcaaaaaaagatgtggaattnttttctgtttttnttntntaatagtataccttcttcagtctgtcgatatatgtatgctattattttacaagtaatacatgttgattgtattggaaattatagaaaagattatattggattgtttagaaaatatttttaaatgtgaagaaaaatataaaaattactcccttgttccactttccccactctcaagtcagactatgttgttttcatagttagtagctagcagtctaccccactagattatatgcttcacagagggaagggaccctcaagacttcactggattgagtagcacccaataccttgcttgctgcctggtttgtgatgggcatactgtaagnnnnnnnnntctgaatgacaaaatgtttttccataataccagacttcctcttgaagagatgggtcgtaatgttgtagtcttacatgcttacgtagacaatcaaagcaagaatactcaataaagtgctattcacc

SEQ ID NO: 356457 - DNA, 860 bp, Homo Sapiens
  misc_feature (788)..(788): n is a, c, g, or t
  misc_feature (819)..(819): n is a, c, g, or t
  misc_feature (826)..(826): n is a, c, g, or t
agcgggatatcaacacggcacctgccaacatggaaggtggcggcggcagcgtcgctgtagctggcctcggagctcgaggctctggagcggctgcagctacagtccgggaacttctgcaggacgggtgttatagtgactttttaaacgaagactttgatgtaaagacttatacttctcaatctattcatcaagctgtaattgctgaacaactagcaaaacttgcccaaggaatcagtcagttggacagagaactacacttacaggttgttgcaagacatgaagatttactggcacaagcaactgggattgagtcgttggaaggtgttcttcagatgatgcagacgagaattggggctttacagggagctgttgataggataaaagcaaaaattgttgaaccatacaataagatagttgcccggactgcacaactagcaagacttcaggttgcctgtgatttgcttcggaggattattcgtatcttgaatctcagtaagagactccaaggacaactgcaagggggaagtagagagataacaaaagctgctcagagtctcaatgaacttgattatctttctcaaggaatagatctttctggaatagaagtgatagaaaatgatctactttttattgcaagagcccgacttgaagtggaaaatcaagctaagcgcctactagagcagggtttggagactcagaatccaactcaagtcggaacagctcttcaggttttctataatcctggaacttgaggatactattaccgtgttgttgatggatattgtgcnactttagaagaaaatatcaccgtgcttagcnttaaagntttgactcagcttccccagtcagctttaaagggg

SEQ ID NO: 356458 - DNA, 976 bp, Homo Sapiens
gctacaggtgtcttcttgaagtcctgggtctatcagcccaggagaggacacagaggaggaggaagatgaggacagtgatacaggatcagccgaggatgaaagagaagctgagacttctgcttccacaccccctgcaagtgctttcttgaaggcctgggtgtatcggccaggagaggacacggaggaggaggaagatgaggatgtggatagtgaggataaggaagatgattcagaagcagccttggaagaagctgagtcagaacccacatccctcccacccggaccagagggcccacttcaggggctggggatatcgacctggaaaagagacagaggaagaggaagctgctgaggactggggagaagctgagccctgccccttccgagtggccatctatgtacctggagagaagccaccgcctccctgggctcctcctaggctgcccctccgactgcaaaggcggctcaagcgcccagaaacccctactcatgatccggaccctgagactcccctaaaggccagaaaggtgcgcttctccgagaaggtcactgtccatttcctggctgtctgggcagggccggcccaggccgcccgccagggcccctgggagcagcttgctcgggatcgcagccgcttcgcacgccgcatcacccaggcccaggaggagctgagcccctgcctcacccctgctgcccgggccagagcctgggcacgcctcaggaacccacctttagcccccatccctgccctcacccagaccttgccttcctcctctgtcccttcgtccccagtccagaccacgcccttgagccaagctgtggccacaccttcccgctcgtctgctgctgcagcggctgccctggacctcagtgggaggcgtggctgagaccaactggtttgcctataatttattaactatttattttttctaagtgtgggtttatataaggaataaagcccctttgtatttgtagc

SEQ ID NO: 356459 - DNA, 957 bp, Homo Sapiens
  misc_feature (652)..(652): n is a, c, g, or t
ggctggaccggtccggattcccgggataccagaggaagaggaagatgaggaagaagatgaggacagtgactctggatcagatgaggaagagggagaagctgaggcttcctcttccactcctgctacaggtgtcttcttgaagtcctgggtctatcagccaggagaggacacagaggaggaggaagatgaggacagtgatacaggatcagccgaggatgaaagagaagctgagacttctgcttccacaccccctgcaagtgctttcttgaaggcctgggtgtatcggccaggagaggacacggaggaggaggaagatgaggatgtggatagtgaggataaggaagatgattcagaagcagccttaggagaagctgagtcagacccacatccctcccacccggaccagagtgcccacttcaggggctggggatatcgacctggaaaagagacagaggaagaggaagctgctgaggactggggagaagctgagccctgccccttccgagtggccatctatgtacctggagagaagccaccgcctccctgggctcctcctaggctgcccctccgactgcaaaggcggctcaagcgcccagaaacccctactcatgatccggaccctgagactcccctaaaggccagaaaggtgcgncttctccgagaaggtcactgtccatttcctggctgtctggggccagggccggcccaggccgcccgccagggcccctggggagcagccttgctcgggggatcgcagccgccttcgcacgccgcatcgcccagggccccaggaagaagctgaaccccctggcctcaccccctggctgcccggggcccagagcctggggcacggcctcggaaaccccacctttagccccccattccctgcccctcacccagaaccttgccctttcctcctctggtcccttcggtccccagttccagaccacgcccctt

SEQ ID NO: 356460 - DNA, 2542 bp, Homo Sapiens
  misc_feature (2431)..(2431): n is a, c, g, or t
ggaattcccgggatcgcctggtccagctatcgtgctcggtattcagttttccggagcagcgctctttctctggcccgcggagcggtcccgcggccgagtaccggattcccgagtttgggaggctctgctttcctccttaggacccactttgccgtcctggggtggctgcagttatgtccgcgctgcgacctctcctgcttctgctgctgcctctgtgtcccggtcctggtcccggacccgggagcgaggcaaaggtcacccggagttgtgcagagacccggcaggtgctgggggcccggggatatagcttaaacctaatccctcccgccctgatctcaggtgagcacctccgggtctgtccccaggagtacacctgctgttccagtgagacagagcagaggctgatcagggagactgaggccaccttccgaggcctggtggaggacagcggctcctttctggttcacacactggctgccaggcacagaaaatttgatgagttttttctggagatgctctcagtagcccagcactctctgacccagctcttctcccactcctacggccgcctgtatgcccagcacgccctcatattcaatggcctgttctctcggctgcgagacttctatggggaatctggtgaggggttggatgacaccctggcggatttctgggcacagctcctggagagagtgttcccgctgctgcacccacagtacagcttcccccctgactacctgctctgcctctcacgcttggcctcatctaccgatggctctctgcagccctttggggactcaccccgccgcctccgcctgcagataacccggaccctggtggctgcccgagcctttgtgcagggcctggagactggaagaaatgtggtcagcgaagcgcttaaggtgccggtgtctgaaggctgcagccaggctctgatgcgtctcatcggctgtcccctgtgccggggggtccctcacttatgccctgccaggggcttctgcctcaacggtggttcgtggctgtctcagcagcaggggactggagcctgactgggggcaacctatctggatggtctcctgatcctggctgataagctccagggcccctttcctttgagctgacggccgagtccattggggtgaagatctcggagggtttgatgtacctgcaggaaaacagtgcgaaggtgtccgcccaggtgtttcaggagtgcggcccccccgacccggtgcctgcccgcaaccgtcgagccccgccgccccgggaagaggcgggccggctgtggtcgatggtgaccgaggaggagcggcccacgacggccgcaggcaccaaagctgcaccggctggtgtgggagctccgcgagcgtctggcccggatgcggggcttctggggcccggctgtccctgacggtgtgcggagactctcgcatggcagcggacgcctcgctggaggcggcgccctgctggaaccggagccgggcggggccggtacttgccgccagtggtcgggggctccccggccgagcaggtcaacaaccccgagctcaaggtggacgcctcgggccccgatgtcccgacacggcggcgtcggctacagctccgggcggccacggccagaatgaaaacggccgcactgggacacgacctggacgggcaggacgcggatgaggatgccagcggctctggagggggacagcagtatgcagatgactggatggctggggctgtggctcccccagcccggcctcctcggcctccataccctcctagaagggatggttctgggggcaaaggaggaggtggcagtgcccgctacaaccagggccggagcaggagtgggggggcatctattggttttcacacccaaaccatcctcattctctccctctcagccctggccctgcttggacctcgataacgggggaggggtgccctagcatcagaagggttcatggccctttcccctcctcccccctcagctgggcctggggaggagtcgaagggggctgcagagagggtagagaagggactttgcaggtgaatggctggggccccaaatccaggagattttcatcagaggtgggtgggtgttcacaatatttattttttcatttggtaatgggaggggggcctgggggtatttatttaggagggagtgtggtttccttagaaggtatagtctccagccctctaaggctggggctggtgatcagccccaacagagaaaatgaggagtttagagttgcagctggggaaggggtttgaaggaagttggaagtggggaggggtgggggcatctggtctcagaaatggaccagctggatgcagggcaggggactgagggtgcttgagtaggatgtgagacttcatgggcctgggttctgttgagttttttcagtatcaatttcttaaaccaaattttaaaaaaaancaaggtgggggggtgctcatctcgtgacctctgccacccacatccttcacaaactccatgtttcagtgtttgagtccatgtttattttgcaaataaatggtaatgtattgg

SEQ ID NO: 356461 - DNA, 1060 bp, Homo Sapiens
  misc_feature (917)..(917): n is a, c, g, or t
  misc_feature (935)..(936): n is a, c, g, or t
  misc_feature (963)..(963): n is a, c, g, or t
  misc_feature (977)..(977): n is a, c, g, or t
  misc_feature (980)..(980): n is a, c, g, or t
  misc_feature (992)..(992): n is a, c, g, or t
  misc_feature (998)..(998): n is a, c, g, or t
  misc_feature (1000)..(1001): n is a, c, g, or t
  misc_feature (1005)..(1005): n is a, c, g, or t
  misc_feature (1007)..(1007): n is a, c, g, or t
  misc_feature (1033)..(1033): n is a, c, g, or t
  misc_feature (1043)..(1043): n is a, c, g, or t
  misc_feature (1046)..(1046): n is a, c, g, or t
  misc_feature (1049)..(1050): n is a, c, g, or t
tgcactcccctgtccacatcaaactgggtttcccttgcccgggcctccaggtcccaaggtgctgtctttgcacctgcactccactgtccacatcagactgggtttccctcgcccgggcctccaggccccagggcactgtctctgcacgtgcactgccctgttcgcatcagactgggtttccctttcccggcactccaggccccagggcactgtctttacacctgcactgccctgtctgcatctcttctgtctttctgtgcctcttgcccttagagctccttgtctgtctttcagtgcatataccagaatgtctgtatgtctatgtgaaatctttttgtgggaatgcctgaatttttacgtatgtgactttctggtgtcatccctaaggccaagagtgttaagagttggggtgagagatggtagagttttttatgtttggctctccacattatataggttctaggatatgtccctgaaactacaacgtagctcatacatgggcatttttataagactaagtgtttttatgggtggacctcctgattctctgccatgagctaggcctgagattttacagacctaggactaactgcagtcacctggacaccagagatctgtaactgtcaaccgtaaagagagagagtatatttgcttctttggggttgaaaccatactgacgtaatataaacagaaattggtcagcaccatcagggcaaacatagtcttgctcgataaggaaactgtgagagtcaaaggaaacttttgaagaatctagaccaagctgaacttccctgccatattcacccctgcctcacgcctctccctgttcacccctggctggctggctgcatcctggggaatgcttctgctccatcggggtacctttcctcctctgcatctcctcaagagaagtgtancaagacacatagaagaannacagactaacacaccttccccatagtncatcatctcacctncanagcctcatgtantctctntnncctnanagtctccctccatacctgcaaccggngggggggtgnaancannttgatcataa

SEQ ID NO: 356462 - DNA, 1690 bp, Homo Sapiens
  misc_feature (62)..(62): n is a, c, g, or t
  misc_feature (1112)..(1112): n is a, c, g, or t
gctgggatcgccctcctgggcttcggtgcgatcggcggcgggaggttccctgggaaccaggntggtcgaagggctgagctgtgtggccagacaagaggtccctgccctcccccagtgagccctgctgttcccgtgggagccatgaagctgaacgagaggagtgtagcccactatgcactcagcgactccccagcggaccacatgggcttcctgcgcacctgggggggcccagggaccccaccgacccccagtggcactggccgaagatgctggtttgtcctcaagggcaacctgctattctcctttgagagtcgcgagggccgggccccactgagcctggtggtgctggaaggctgcacagtggaactggccgaggctcccgtgcccgaggagtttgcctttgccatctgctttgatgcccctggagtgcgcccacacctgctggctgcagaagggccggcggccaggaggcctgggtgaaggtgctgtcccgggcaagctttggctacatgcgcctggtggtacgcgagttggagagccagttgcaggacgcacgccagagcctggctttgcaacgccgctcatcctggaagtctgttgccagccgctgtaagccccaggctcctaaccaccgagctgcgggcctggagaatggccactgcctctccaaggacagcagccctgtgggcttggttgaagaagcgggcagcaggtctgcagggtgggggttggctgagtgggagctgcagggccctgccagcctcctcctaggcaaggggcagagccctgtgtcccctgagacctcctgcttctctaccctgcatgactggtatggccaggagatcgtggagctgcggcagtgttggcagaagagggcccaggggagccactcaaaatgtgaggaacaggataggccctaagtctgggccctttgagtcaggaaaccagggccagttctttttcaggagttaaatgtttacccatttccaaggttgcgttttgggaggggacatgggttctctccttcctgctatttaggcattctccaggttcgagatccacccgtgtgtctggaagggactgcgggaccattccttccatcctctttattntcctgaggtccagagaaggaaggagacttagcagccacagagcaagaccccaatctcctgactgcactggcctgactgcgcccctccaaggggatgttaatgaaatgaaggaagtgggggaatgtcaacccgagactgtcacaggcttgccatacctttggcctacacaccgggctctagagccataatttccaacctggggagtctcctgtgcacttaaatccgaggtaggctgcagtatcggcttgaagctctgacactgtcagagaaagtggatttattgtgtcataggagtttctgggacccagctcttcctgagaggggtgggaagattggggatgggatcctcactcagcagtctgggtagggccctttgaggcagagggtcttcggccagtgaagagagatttattctgctcagagtggctgggtcccatcctttctccctggctgccctggtaacagatggtgcctggaccttgccccggaaagggcttggaactttttttacgtaaacaaatgcccctccgtattcgggtttcagcagccaatacctggaatttgccaatgaaggggtt

SEQ ID NO: 356463 - DNA, 1746 bp, Homo Sapiens
  misc_feature (287)..(287): n is a, c, g, or t
  misc_feature (328)..(328): n is a, c, g, or t
  misc_feature (331)..(331): n is a, c, g, or t
  misc_feature (334)..(334): n is a, c, g, or t
  misc_feature (337)..(337): n is a, c, g, or t
  misc_feature (340)..(340): n is a, c, g, or t
  misc_feature (343)..(343): n is a, c, g, or t
  misc_feature (1470)..(1470): n is a, c, g, or t
ggactggagactgcagccggctgctgcctagtcctccggggctccgctcctgactagctcctccgtccctctagggacggttcggggtcacctaaccctggtccccggggcgctgggacgctagccccaagccgcagccgctcttcgctgaccgccctctttctgcttggcaggtcggcagcttcactcccgagggtgccgcgagcccaggcggcgaacacccgggtacccctggcgcagcgaggtgggatgctgtacggacagcagcgctaagtgcccccccaccnccggcgcagggtgcactcgctcctggccgcgggcccaacgncgncgncgncgncgncggcggaggggatgagcccgggacgcgcgaggcgcctgcctcaagctaccgcccggagagggacgccgagtagggctcatcgcagtaccgcgcggacccctgccccctgtggcacgcggctgcggagccttgaagccgtgtctgtgatcaggatgcactgggcgcctcgcagctggtgaggatgccctgctgcgcggccctgcgcccccagccccagtcccaggtgtggcaagactgactgggcccggcttcggcccctcgtgccggtggatgaaacgtgccggagtgcttgggtgccatcagctatcaaatctgaattctaagcgccatggacgaaggcactggactgcagcccggggcgggagagcagctggaggcgccggccactgcagaagctgtccaagagaggtgcgagccggagaccctcaggtctaagagtttaccggtcctcagcagcgcctcctgccggccaagcctcagtcccactagtggagacgccaacccggcctttggctgtgtggattcttcgggccaccaaggagttgaagcaaggcccgaacccgttggcccccagtccctctgccccgtccacttcggcggggctcggggactgtaaccacagggtggacctcagcaaaaccttctcggtgtcctccgccttggccatgctccaggagagaaggtgcctctacgtggtcctcacggattcccgttgcttcctggtgtgcatgtgctttctgaccttcatccaggcgttaatggtctctgggtacctgagcagcgtaattaccaccattgaaaggcgctacagtctgaagagttccgagtcggggctgctggtcagctgctttgacatcgggaacctggtggtggtggtgttcgtcagctacttcggcggccggggtcggcggcccctgtggctggccgtgggtggactcctcatcgccttcggagcagccctcttcgccttacctcacttcatctcgcccccctaccagatccaagagttgaacgcctcggcccccaacgacggcctgtgtcagggtggcaactccaccgccactttggagcctcccgcctgtcccaaggactcgggaggaaataatcactgggtctacgtggctttnattcatttgcgcgcagatcctcattggaatgggctccacacctatttataccctgggaccaacctacttagatgacaatgtcaagaaagaaaactcctcatggtacctagccatcatgtatgtcatgggagcacttggccatgcagtgggatatatattaggtggacttcttattggtttttatgttgatcccagaaatcctgttcaccttgaccagaatgaccctcgtttcattggaaactggtggagtggattcctcctttgtgccattgcaat

SEQ ID NO: 356464 - DNA, 1884 bp, Homo Sapiens
  misc_feature (1489)..(1518): n is a, c, g, or t
  misc_feature (1750)..(1750): n is a, c, g, or t
tctcgcggtaagaggctgaggagccggcctgcaacctgccggggcggctccgctacgcgcagccgcctcagtggcttcctccacagccacctccggagggatctggctgaggaggaagtggaggtgtcactggccccggcctttgccccaatcttgtgtgggcactgaagggggactacaggttcgagagttatgggtgctacatgtgtgctttcagagcagtagtgtgaggaagcttggagtgggatggcaggacggcctcatccctatgatggtaactccagtgatccagagaattgggatcggaaattgcatagtagacctcgtaaactttataaacattcaagtacttcctcgcgtattgctaaaggaggagttgaccacaccaaaatgagtctacatggtgctagtgggggacatgagagatcaagagatagacgaaggtcaagtgacagatcacgagattcatctcatgaaagaacggagtctcagctcactccttgtattagaaatgtgacttctccaacacgacagcaccatgttgaacgagaaaaagatcacagttcctctcgtccaagcagtccgcgtcctcaaaaagcatccccaaatggttccattagcagtgctgggaacagcagcagaaacagtagtcagtcaagttcagatggtagctgtaagacagctggggagatggtgtttgtatatgaaaatgcaaaagaaggagctcggaatataagaacgtcagaacgagtgacactaatagtggataacactagatttgttgtagacccatccatttttactgcacagccaaatacaatgttgggcaggatgtttggatctggccgagaacataactttacacgacccaatgagaaaggagagtatgaggtggcagagggaattggttccactgtgtttcgagcgattctggattactataaaacaggaataatccgttgtcctgatggcatatctattcctgaactgagagaagcatgtgactatctttgtatctcttttgaatatagcactattaaatgtagagatctcagtgccctaatgcatgagttatcaaatgatggtgctcgtagacaatttgaattttatctggaagaaatgatcctccctctcatggtagctagtgcccagagtggggaacgggaatgtcatatagtggtgcttacagatgatgatgtggttgattgggatgaagaatatccaccacagatgggagaagaatattcacaaattatttatagcacaaaattatatagatttttcaagtatattgaaaacagagatgtggccaagtcagttttgaaggagaggggtcttaagaagattagattgggaatagaaggttatcctacctacaaagaaaaagtaaagattcgaatgtcctgggagaaggaagaaggaaagagtcggcatgtagactttcagtgtgtaaagagtaaatctatcaccaatcttgcagcagctgcannnnnnnnnnnnnnnnnnnnnnnnnnnnnnatgcatccaactccacaagtggatgagctggatattctccctatccatcccccttctggcaacagtgacctcgatcctgatgcacagaatccaatgctgtgatgctgatcttccttgaaaccatagcatgctactcttcacagtgacgttgtactctcctcattctgcactgcaaggccactcttcttcattgtgagatgcacataacaatggttaggatattgcagtgtangcttttttaaagaccaaggtagctgaatggctttttttaaatggtacaactctagcattttgaagttcacttgtaaatggatttgttaccattaggttgtgaaattggtctttggataggggaggaccttttta

SEQ ID NO: 356465 - DNA, 1276 bp, Homo Sapiens
  misc_feature (107)..(107): n is a, c, g, or t
  misc_feature (918)..(947): n is a, c, g, or t
ttaacattaaaacaatggaattttattttgatgaaaaactcaagtttacaatcatttagtaaatgaagagcaaacacttcattttcctatcccataactcttaaganaaaaaaagcattagtaaataaatatctgtgaacagattaagggtaaggcagactggataataaaccacctctgacattcacactccctgcatgtgactcactctaaagggtgaaatggctctggagataactgaactggtaagatatgggcattaaatctcatcctgatcattcagataagcccaagataaatactttttgctcatcaagggcagcaaactatacaaattgtactggaggaatactttgacagaagcacttaaattatattgtgcatcacaactataaaatggcttgaacatttccatttaaccaccatttataaagtgcaactatatattactctgcattttatctgaggtgtgatgaatatcagtccaaactgaaagtaccccagctgccaatttccaccacttctgaaaagacctagctgtgtgaaaaaggaccatcccccatacaaagaaccaatttcacaaacctactggtaaacaaatacatttacaactggaacttcaaaatgctagagttgtactcatttaaaaaaaaaccattcagctacctttggtctttaaaaaagcctacactgcaatatcctaaacattgttatgtgcatctcacaatgaagaagagtggccttgcagtgcagaatgaggagagtacaacgtcactgtgaagagtagcatgctatggtttcaaggaagatcagcatcacagcattggattctgtgcatcaggatcgaggtcactgttgccagaagggggatggatagggagaatatccagctcatccacttgtggagttggatgcatnnnnnnnnnnnnnnnnnnnnnnnnnnnnnntgcagctgctgcaagattggtgatagatttactctttacacactgaaagtctacatgccgactctttccttcttccttctcccaggacattcgaataaagggtctttggacatagttgtagatcacttctgggcggcctccaggccttttctttactttttctttgtaggtaggataaccttctattcccaatctaatcttcttaagacccctctccttcaaaactgacttggccacatctctgttttcaatatacttgaaaaatctatataattttgtgctataaataatttgtgaatattcttctcccatctgtggtggatattctt

SEQ ID NO: 356466 - DNA, 826 bp, Homo Sapiens
  misc_feature (556)..(564): n is a, c, g, or t
gggttccacattgtatgaaaaaagtgcatactctctatctggagatatttcatatctgatggctcttaatgaatcaatttttttgccttctattaagacagtagaagtatttgtttcaacattccacagtctcactgttcctttctgttctctgtagatgaattctgtatcacttatccacttagcctcggggtcatgaattttgaagtcttcactgaagagatcttctacagtgaccttcgttcttttgagacagactattatcttccgctggtgtcagaagtatgaccgaggtgacgatcaaggagcagatgaccagaatgacaagcagtgcaattgctattcctttccaattcctctgcggagggttactccccaccagctccatcacgttcccctgcatcttagcggtcttgatcatggccttttccttcattttgccccaagtccgaacccgacttctggtccagggaagagaaacttaatccattgtcctggtgaggattaaagtagactggactggctgaagactggatggaaacgggtttttgaaggnnnnnnnnntcttccaggtcttcagttttctcacctccgcgcacccctgcccgtgtctttactcagcggatcccaatagcaatcaactctttttggccgctaccaataaagaaagaaagaaaaaaagcctggatggagggtgggtgttgctttaaacaaaaagccaggagccagggagggaggaagaggctgcgagcccagctagcgagggcgagaggcagctctgactgcgcgcgtgtccaccgagctcggcgccagcacactgcccgct

SEQ ID NO: 356467 - DNA, 1577 bp, Homo Sapiens
  misc_feature (370)..(370): n is a, c, g, or t
  misc_feature (411)..(456): n is a, c, g, or t
accacccccgaaggtagatccctgaatgttggtacccacggggctcaaccgggtggctcagcctggccttccatctacctcctggcagggcctgcatgtgtaagccccccaaggcgtggctttcaggcatgacccgccacactcagcccaatgcccaatgtatccaatagtctttcattccacaattacttatgatacaacgctgcatcatccacagaaatcttgatcatcaacctagataacctagtttctaggttattgatcaagatttctgtagatgatgtagtatgtacatttctgtgtatgttattaatcaagatttctgtataagatctaaaaacaaaaatgcacattaagaaattaaaacttnacatctcataaccaattatctttctaaacaatttacaaacnnnnnnnnnnnnnnnnnnnnnnnnnnnnnnnnnnnnnnnnnnnnnngtttctacattctcatacaggcttaaaaatgaggtaataaaaactgattaaaccttttaccattctggaaatggcttagggaaatgatcatgaaatatttttttcttaggtcttcattttttccttcaatacttctaagtacctctttttctatgctgaaaagttatgtaaaaaatccctaagctttgttggatagtctgtcatcaccccagttgctcccaaatcaaaagctcttttgtattcttgttcttcatttaatacccaaatatacacttgaatgcctcgagcagttaggtgggtcaaacaaagctttcctcattagtaagagatcagaaagccagatgagaaacttttgacttctggacatggtgtgtggttcttttagcttcagtataatagaaggcattgggatttcaaaaaactgttctcgaatgggcacaaagggcaagaggccagtgaagaaaaggccaagaatgagcaggacacgttgtagactgaagagtataggaatatctgaattctctttgtagcacttttctacaatttcataattggcattaccccacactgttaagtgttctcgattataccgcttcaccaactctgaaacctctttgaaatgagacatccagtttgccaaggtaaggtgggagctcacagtatttgagatcagagatgtttacattgaccccagttgctctctttagattctcatcatgtgacactacaacttgttcatcttttgtgatatggcagtccaattctagcatatcagttccgattttaaccgcatgctgaaaggctgccattgtattctccaaattttctccagcacctccgcggtgagagatgtgtttactgaggaatcgctgcttctttctctggtgcagcaaggtcgggtatttaagcaacaagaatgaggtcaccaagtatcctcctagcgtagagagaaggtaaaaagccgcagtggacgacatctcagtcaccgtgtgggaagtctcccacctccgggccctctgaactccgctgcggcagtagcaacgacggcggcggcggcggctgctcgaggtcggctcgcccccagccggtgccactggtgcagcgcacttgtcggatcccgg

SEQ ID NO: 356468 - DNA, 1072 bp, Homo Sapiens
  misc_feature (990)..(990): n is a, c, g, or t
ggaccggtccggaattcccgggatccgacctcgagcagccgccgccgccgccgtcgttgctactgccgcagcggagttcagagggcccggaggtgggagacttcccacacggtgactgagatgtcgtccactgcggctttttaccttctctctacgctaggaggatacttggtgacctcattcttgttgcttaaatacccgaccttgctgcaccagagaaagaagcagcgattcctcagtaaacacatctctcaccgcggaggtgctggagaaaatttggagaatacaatggcagcctttcagcatgcggttaaaatcggaactgatatgctagaattggactgccatatcacaaaagatgaacaagttgtagtgtcacatgatgagaatctaaagagagcaactggggtcaatgtaaacatctctgatctcaaatactgtgagctcccaccttaccttggcaaactggatgtctcatttcaaagagcatgccagtgtgaaggaaaagataaccgaattccattactgaaggaagtttttgaggcctttcctaacactcccattaacatcgatatcaaagtcaacaacaatgtgctgattaagaaggtttcagagttggtgaagcggtataatcgagaacacttaacagtgtggggtaatgccaattatgaaattgtagaaaagtgctacaaagagaattcagatattcctatactcttcagtctacaacgtggtcctgctcattcttggccttttcttcactgggcctcttgccctttgtgcccattcgagaacagttttttgaaatcccaatgccttctattatactgaagcttaaaagaaccacacaccatgtcccagaagtcaaaagtttctcatctgggctttctgatctcttactaatgaggaaaagctttgttttgaccacctaactgctccaggcattcaagtgggatatttggggtatttaatgaaggaacaggaatcccnaaggaacttttggatttggggagcaaactgggggggatgacggacctttcccaacaagccttaagggaattttttaacttaa

SEQ ID NO: 356469 - DNA, 920 bp, Homo Sapiens
  misc_feature (241)..(241): n is a, c, g, or t
  misc_feature (303)..(303): n is a, c, g, or t
  misc_feature (433)..(433): n is a, c, g, or t
  misc_feature (439)..(441): n is a, c, g, or t
  misc_feature (462)..(462): n is a, c, g, or t
  misc_feature (481)..(481): n is a, c, g, or t
  misc_feature (489)..(489): n is a, c, g, or t
  misc_feature (511)..(511): n is a, c, g, or t
  misc_feature (515)..(515): n is a, c, g, or t
  misc_feature (540)..(540): n is a, c, g, or t
  misc_feature (573)..(573): n is a, c, g, or t
  misc_feature (661)..(780): n is a, c, g, or t
  misc_feature (808)..(808): n is a, c, g, or t
  misc_feature (877)..(877): n is a, c, g, or t
  misc_feature (892)..(892): n is a, c, g, or t
  misc_feature (913)..(913): n is a, c, g, or t
agcgggttcgcgccagcccgggacgcgcttggccttgcccgcgcccgctcgcctcgtctcgcccggcctccccggcgtcgcctcgtcgcctgttccgcgccaggcatggcccccagcactgtggccgtggagctgctcagccccaaagagaaaaaccgagtaagtaccagactcgcccggcgcgctgtccccgcggcctccggtcctcgggggtccctgcgccgtgccgggccagcctganaccccctcctcccgcagctgcggaagccggtggtggagaagatgcgccgcgaccgcatcaanagcagcatcgagcagctgaagctgctgctggagcaggagttcgcgcggcaccagcccaactccaagctggagaaggccgacatcctggagatggctgtcagctacctgaagcacagcaaaggtgagcgtncccgtnnntcccgttccccgagtttccancgttctccggttttcccgntctccgcngcccgctcaccgccgccgcgtnttcncgcagcctttgttgccgccgcgggnccaagagcctgcaccaggactacagcgaaggcnactcgtggtgcctgcaggaggccgtgcagttcctgacgctccacgccgccagcgaaaagcagatgaagctgctgtaccacttccagcnnnnnnnnnnnnnnnnnnnnnnnnnnnnnnnnnnnnnnnnnnnnnnnnnnnnnnnnnnnnnnnnnnnnnnnnnnnnnnnnnnnnnnnnnnnnnnnnnnnnnnnnnnnnnnnnnnnnnnnntctggcggccctggtgacccggcggganctgcgggcgcgcggcccgacgaccagagggcgagcctgctcctctcgcctgtagggaagcgccttcccngccgtcgtccgcccngggcttggacgcgcccttctncggaagg

SEQ ID NO: 356470 - DNA, 1040 bp, Homo Sapiens
  misc_feature (9)..(9): n is a, c, g, or t
  misc_feature (11)..(11): n is a, c, g, or t
  misc_feature (19)..(19): n is a, c, g, or t
  misc_feature (26)..(26): n is a, c, g, or t
  misc_feature (42)..(42): n is a, c, g, or t
  misc_feature (50)..(50): n is a, c, g, or t
  misc_feature (55)..(55): n is a, c, g, or t
  misc_feature (72)..(72): n is a, c, g, or t
  misc_feature (88)..(88): n is a, c, g, or t
  misc_feature (93)..(93): n is a, c, g, or t
  misc_feature (97)..(97): n is a, c, g, or t
  misc_feature (99)..(99): n is a, c, g, or t
aagccttangncctgggtngggtaanccttagggcttgggtngggttaanccttnagaccttgggtcgggtnaaacccttgaggcctngggtnagtntnaacccttaaggccttggggtcgggtgaaagcccttaaggccttggggtcggggtggaagcccttgagggcctcggggtcaatgtggaaacccttgagggcctcggggtcagtgtggaaacccttgagggccctcagggtcggggtggaagcccttgagggcctcggggtcggggtggaagcccttgagggcctcggggtcggggtggaagcccttgagggcctcggggtcggggtggaagcccttgagggcctcggggtcggggtggaagcccttgagggcctcggggtcggggtggaagcccttgagggcctcggggtcggggtggaagcccttgagggccaagcaccggtaccgttttctccgattcagtttatagatgcgaatcctttccttctctgcctccgggtcagcaagaattccatcccaacgcagactttcgttgatccgattcgcaaggttctctatttcggcaaagtcggggaggctgacggtggaggagtcagaagggaggtgcttcttttccactttgctctgtctgtgctctggtttcgggccacgctctttgcaaggacttaagatgtcatgaaaggaggaagaaagcggctggctcttcaggctctgactctgatgtttatcgtcccccttgccagaccccttggtcttcttcttcctttttttcttcttcaccttccgtttggccagctcggaggcgccgcctgtgatggggggcagtctagacccccgcgggcccgcggcgccgccctcccgctcctcctcctcgccgtcgttgtccttgtaccccattgtccccgccccaccgcggcggtccagccgcccgctgggctgcaacccaacccgccccgggggcgcccgaggcccgatgccgactagtcggcgactctcagcgcggaccgccagagcagggcaacgcgtctcatg

SEQ ID NO: 356471 - DNA, 965 bp, Homo Sapiens
  misc_feature (763)..(763): n is a, c, g, or t
  misc_feature (774)..(774): n is a, c, g, or t
  misc_feature (778)..(778): n is a, c, g, or t
  misc_feature (781)..(781): n is a, c, g, or t
  misc_feature (787)..(787): n is a, c, g, or t
  misc_feature (791)..(791): n is a, c, g, or t
  misc_feature (803)..(803): n is a, c, g, or t
  misc_feature (825)..(825): n is a, c, g, or t
  misc_feature (843)..(843): n is a, c, g, or t
  misc_feature (855)..(855): n is a, c, g, or t
  misc_feature (858)..(858): n is a, c, g, or t
  misc_feature (864)..(864): n is a, c, g, or t
  misc_feature (876)..(876): n is a, c, g, or t
  misc_feature (880)..(880): n is a, c, g, or t
  misc_feature (893)..(893): n is a, c, g, or t
  misc_feature (901)..(902): n is a, c, g, or t
  misc_feature (910)..(910): n is a, c, g, or t
  misc_feature (922)..(923): n is a, c, g, or t
  misc_feature (925)..(925): n is a, c, g, or t
  misc_feature (930)..(930): n is a, c, g, or t
  misc_feature (933)..(933): n is a, c, g, or t
  misc_feature (938)..(938): n is a, c, g, or t
  misc_feature (952)..(952): n is a, c, g, or t
  misc_feature (958)..(958): n is a, c, g, or t
gatacaaactatagttggccttgggggtgatgaataatcagaaataataaaaagagttacgggttaagcccaaaatcatttgtgacaggaaaccacggggggactctgggaccatagagctccctaggattggtttgggttatgactagtggtgaggtagatgaccaggtagcatatgtaattagtgatacatgtacttctctctttgcctttttattttctttaattgtgttaactaaatactcaagttagtatcactgagtctggttagaagtagtgaacaattggggccctgttaccatatttggtgctaaaactatattatgacttcatttatatgcagcaaagacctagtattaaggaagtttcccacaaaacaaatcaaaaatgggagacacttaaattgcttaatgagttttatagcagcagaagaatccataatcaacaatggagctcaaagaataaagtcatttaaatacaagcaaaaagaggaatttaatacaggaggtacctccacagtctcaaagcaatcagcaaactttgtcagtatacatcaaattatgtggagatattgaagaagaaaggcttctgagattagtctgaatgttgatgttctaacgagttatagatctatccatttttattccatctcaatatgcttcatggagaaatgtgttgtgtttctgttgtaggatacatttataataagtaaaaattacacagtgcacagtttttgattgtgtttcttacaatttcaagtttnacaataatctnaaanctnaaaaanaatnagataatctttnaaaatctaacatcttaagaatntaaagagtattacacttnaagactgaaaantantgtagngtgggcaacccntaanccatttaatattnttggtcanncaagaatnttaattgtgagnntntttgnttntaagntgtgggtttgggantttttnaccagtt

SEQ ID NO: 356472 - DNA, 1445 bp, Homo Sapiens
  misc_feature (89)..(102): n is a, c, g, or t
gatgtagtacaagcttgggacagatggggagcctaataatttaatgattttaccaagtgcgttgaaaacttgtcacaatatcagcttgnnnnnnnnnnnnnntctgttaccatgttaatttgatgtagaattaaaatcctcttgagttataccaacaggacaaaagtctcaacattttactatctgtgcaaggcagataatctctagatctcattttagacagtagttcttaattatttttctttatatcagtgctacttgtaacttaaaaatttttaaagttttatttcctttcttgaactctgaaggtattataaaggagaaaaacagtaaaagatgccagcccaactggggaggttggaacagagattatgaatatattataaccaagttactacatttcctgaattgtgggcaatcagttgtgcctttctttcagtttatatcctgaattttttgtagacttcagtatagaaaaaacaaagatttgttttaaggaagagttcaggtgtggccttccaattttactcttcctattataaacaaacacccaacctctgatcaggtggctcttcttgttatgtttggggcctcttactcattcccgggcagtgttcctgcggcaatatgcctgtgacaagcgtttgctgtatttgttgttcgacttagggtagttgaaagagtctctctcagccactctctctggatattttgttgtggctgtgggcactgtttgccaagactctcactttgtagcggaggggtgggactctgcgtgaaaggaccagcgttatagtccctggcttctccggctaattcatcccgaggctcctgccccttcccattctggaaggggcgagcttatcctagacctgtgactgcctctgaagttctccacctgcctcaggcgtgctctccagtgcctgtttctgactgagtgaggttgaaatcctactgactccttttcaggaaaaaaagcatactgaaaaatggctttaggaatagcagttaagatttatatagagggggcagttttgttaagtttatggtttctgttgtttgtagagggctatcacggttttattttcatggtccctgaaggtaagcagatatagctgtatttagtgatagaaaatactatattgcttagagaacccaaacttcccatgaaaattgttatatttattattacttttttctttagactttcttataagagagaaattgaagacaaaattgtgccaacaaagtatattagacactgtgattttgtggtaattttggcatcaattagatatttattttaatatctctttttataaaattttcctaaacctaactgtaactcgaatagagttttccataagacatgtataggtatgatttgcttggctggtaggatttcttggtgtgttttatttatcacactccatattttaaaaatt

SEQ ID NO: 356473 - DNA, 1555 bp, Homo Sapiens
  misc_feature (322)..(322): n is a, c, g, or t
aaatataaattatgttcttgctactttccaggcactctgcaaagtgctgggaatacaatgtaaaagcaacagacacagatatgtacctttaaggagcttacagcctgtccaccaccaggtgatggacattaaataaccacacacagaatagacagagtgagatgacgaaggaggtgggatcccttccccaaggccatgccgcctctaagagtacgaatgttaaaaaagggttatgctggagcaccgccactctgccctgctgcttggtggctgcagaaggcatggatcctttagtagccaggcaggacagctgtagacaggnccttctggcagctccacattcaactggcaccatggggacaaggctaaaagttaaacattggtgttctgcaatgctcacgtgtataggagctgagcttaaagaggaaagggaacgagctgtggatttaatggaaagggggatccacctcctactctttcccccttttccctcctttctcacccctgccaagattgcccagttacttccaacaagcagagacagttgagatcatgcctggcaacaagagcactgaggatatccatgaaaagacgagcctctcccagccccaaacccagagctactttcgccaggtgactccccgagctggaaagtttgcctactccacagacaacacctttgaacaggagatttactttggtaatagagctgggcccctgtggtaggggcacacggggacatgggccaggaaggtggaagattgctgggggctggaaacagttgtgggtatggacaagaggccctggatgacccaggttttcatgttcatgacccagcacccacactagcacaggagttgggtcggggagtgataactaatagggagggaactgctctctctccccgctttctctatccctctatcttactaaagaggcaatgaagggtggaactgtaaagttggcaagactttgggaacaatccatctcttctctatctacccttctcccttctctcacttcgagatattctcccacttcgagatattctcccaccaaggtgctatgttggaaaaaatcagggctttggagtcaggcacatttgggtttaaatcctggctcagtatttttttagtaaccttcagtaaattatataattcctctgagccacaagtaccttatttgtgaagtgatgttaacaaaaatgcactttgagtagagtagatgagaaagcatctgtaatgcttcttgctcaatgtctgtttaaggtgttcagtaaatgtttgccaccttccctgtccctactgctgtcccttagatgcctgggcttccaggatactcgatctaggtcttcgtgttccaagctgtttcttcttcccaagccccatcttgttcctaaactgctgcagctgaaagtcttctcaaagtgtttaacaaaattactctaagtattcatgactgatgagattaattaggtgcctcttttttagtatctagctttttataagggataaggcctctaagtggttacataggttcttttcttttgttttct

SEQ ID NO: 356474 - DNA, 1287 bp, Homo Sapiens
  misc_feature (9)..(9): n is a, c, g, or t
  misc_feature (11)..(11): n is a, c, g, or t
  misc_feature (22)..(23): n is a, c, g, or t
  misc_feature (39)..(39): n is a, c, g, or t
  misc_feature (41)..(41): n is a, c, g, or t
  misc_feature (49)..(50): n is a, c, g, or t
  misc_feature (54)..(54): n is a, c, g, or t
  misc_feature (56)..(58): n is a, c, g, or t
  misc_feature (73)..(73): n is a, c, g, or t
  misc_feature (79)..(79): n is a, c, g, or t
  misc_feature (89)..(89): n is a, c, g, or t
  misc_feature (120)..(120): n is a, c, g, or t
  misc_feature (141)..(141): n is a, c, g, or t
cccttatcncncagaacatttnncaatggactgggtaananagtctggnngaancnnnattggctcatcacanatagtntgggagcaanaagctgagaagaaagcagaaacatataaaangagagcagggaaagagccatnagacagaaaaacctagtaacgtgtgtgatgaagctagggaagaaagaaggaaggaagggcggcgtggaacgctgctgatgggtggtggcgggaaaatgaacgagtatccaccagcaacgaagaggggcctaccatggtctgggtgggagcatttctttggagaggtggaatcaaaagccccaaatgtcagaggggtaaggaataatttggaggaaaagcgtaaaggcagtggaggtgaggagagaattttcaaaatgtttggcagtgattgcaatgaaagaaaaaaatggagggagcagagtatatgcagttgaggaacttttttagtttggagtgtgttaacacgatgttaggaagaaggatcaagtgaaggagaaaggtgaaaatgctggaaggtggggcttagtgatgaaacaaaccttggggacaggtgggcgtggtactgagagtcccagtgaggggagtgccctcaggcaggcgccggtggcttctgtcacaggagggaacagcgctgacattcagctggttcgcactgatacggctcaaccagtttgttaaaacatgtctgttccagtgtcagtaatatacgagtaactgcaatatgcagtaaaaattataaattctaatacaaactcagttcaagctaattaagagatcgcaacagccgttggtaaatggacttcccgctgcatttgagaagctttgcagcgccatctgccggtgtcgtagcatcactgcaggctgagaggctgctttgcgccttcatcttgaagcactctgaaattgcctgtttaaattaccttggaatcatggagttgctactgcttctgaatagtttagcttctactttgattttattgttagtgcattgtcgttcttgtgtcagtagcaagtttcagtgttttaatatttacaaatacaaaaatttttaataaaatattaaagccaaacttgaatgaagagacaacaaagtttggatatgtttctttatgtgccttttgacatatcataaatgagaatcttttgattcctcaggagaacaaagaagaaatattaatgagctgcagccaggaatgttttctgttactgtgcaaaaatcagaataatatggaaatcatttgccactttttattttgaaaaatttct

SEQ ID NO: 356475 - DNA, 1658 bp, Homo Sapiens
  misc_feature (85)..(85): n is a, c, g, or t
ttctaaaggttatgtttagtgatactcgatactgtttattccagcacagatcattctcaggtacagtgagtgggtggaaattcancagtgatacaggccaaagtgctaactcccaaaaagtttgcattttgtggcagaagtcagacagcaaatacacaaatatatgtgagatggcagtcaatgtcataaaaacaaataaaaggggaataacaaatgattaagtattatttttataaagggtagtcaatgatggacactctgatatgatgatatctgaacaaagatctaaataaaggagatgaggaagggagttatacagttatatgcagagaaaaagtgttctagtcaggtggaacagactatgaaaaggccctgcagctggaggatgcttgggaaggcaagtgtagctggggcaggctgcatgagggcagtgagtagaaatgaagcttcacacagacccttaccaagtcatgatagtcgggttctttctcaatgagaaagcaagtcaatggcatgctgtgcacagagaaatgacatcacagggttttcatttttcatgattagggtatacaccatgcagaagagacaatggggaccaaaggaagaaggagggagactaggaggagacagcaagattctgggtgagaaataatagccaggttaatattcaccttatgttcacagattggcaagagaattttagggaattacataatcttccctagatcccacagctatttagaggtaggcatgggatacctctccagcaagaacatgcatgaatatttaaaggcacaatgatacgaagaaaaggcacctatgtcttaaaaacagaaaagaacttaactcaagcctgcttatgtgaagttagacaaggcctttagatcatgttaagaattttggtgggagctaaacaatgagaacacatccacataaagcaggaattaagacactggggactaacaagagtggtggatgggaggagggagaggatcagaaaaatacctggttgatgaaataatctgtaaaccaaacccctgtgacacgtagtttacctatgtaacaaatctgcccatgtacccttgaacctaaaacgaaagttaaaaagaaactttgttccctgcttcaacacactacagtctagcatatttcacacaaaactctactgaaactttcctcagtccttaaactgcaatgcctgacaccatgttctcgtgccccactagagctgacatccccactctgctcttacacgaaactcgtcagtttctttacatgtctgtttgccattttaagagtctagttgcatcctgatacatatttccacttccctgctatacgcctctccatggattcccaacagcagctaaatactatgccccaaataaaatcattctttcgttcctactcttaggcaatatattcctattcatgccattgtcatccagcttcctcagtcttaccaccaaatatgagcactaagacacccaaaagtaaccaactgaggataaggagggagagggtatgtttttgaaaagctgagctagattaagaatatgatagtcctgatactgagaagggttagctagctagtccgtgtttagtgaagtaaacaaagcattaacttcacacaacacagatgccctcataaaaaaaat

SEQ ID NO: 356476 - DNA, 1702 bp, Homo Sapiens
  misc_feature (1423)..(1552): n is a, c, g, or t
aacggagtttgtggtgtatgagagatccttcttggtgtagttttagaaaagctcagagatttctggtgactcttcttgggagtctgaaaagagaaatgcttatttcagtccttgaatattataactcatgatctctgaagtgttttagtaatctctaagaccaaatgggagatttatagtcagccaaaggaatgatctaaagatggaaatctcaaatagtgacccgtttccctctccaaaacatgactcagattttacttgtctactttttctaggaccaaacactatccaagtttagtttgtcctagaacaaataattttaataatctacatattgctaaaccatgctttttgcctctaatggaatcattctaccactgcagctactctctagctcttccttcttttcagataaggcagctatttctgatctttgcctaaagcagcctccaggagccacctcatctgctgctcaccctcattcaacatgtgcttactgatcacctgctatgtgccaggcactgtgtgttgggggcatggaatacacagatatataaggtgcagcagcaaagataatgtctcagaaaagacactccccaataaaaaatttccctgccttcttgcaaaaatacgtagtgaaaaagctccaacaggtaaggaaatcaatgcttatctttcctacagccttccttcatcccgtcaggggactctcagtctagctggcatttcctgttcagtggggcatacgcaggtgaaaatacaatgtgattggtgcagtgacagggacatgcgaggggcatcacagaacacaaagaagggctgcctaacccagcctgggatcaggtcttcaagcttgggtgtcggcaggggaaggcaaacacaggaaaagtgggtggggtggtggcggcctgtaggcatagaaaacaatactagcaaaggcctggaagtgaaaagcagtggctgtgcaggatggcaccagcctgatgttgctggggaggtggagcggggaggggtgaggccagagggaacagaccacggaagaccctgcctgcctgggggaggagactgatcttggttgtgtagatctatggttttcagacccttctccagagctctatgtctttcccaacctccaagcaatttactgagtttccaaacaaaggtgattatttttgaacccaagagttccacttaggaaaacttaaagccttgctttagcggacggggagtctatagagctttaagcaaagtgaacattttaagcaaactgagaggaatgtttcagaaagatcactctgacctctgggtggaggatttccctttgagagggaaaagcctgttgaagtgttccaggtagacctgaactagggtaggaattgcagtaggggagaagaggggcgtgggtacaagagtcagtttgtannnnnnnnnnnnnnnnnnnnnnnnnnnnnnnnnnnnnnnnnnnnnnnnnnnnnnnnnnnnnnnnnnnnnnnnnnnnnnnnnnnnnnnnnnnnnnnnnnnnnnnnnnnnnnnnnnnnnnnnnnnnnnnnnnccattttttttgtcttaggggggggttgcctgaatgcctagttacttaggaggcgtgaggccgcggaatacatggaccttggagaaaaaggttgaatgggttgttttgggcaactgcacttcacttgtggggggtattttgactttctcc

SEQ ID NO: 356477 - DNA, 1750 bp, Homo Sapiens
  misc_feature (53)..(62): n is a, c, g, or t
  misc_feature (1014)..(1014): n is a, c, g, or t
  misc_feature (1030)..(1030): n is a, c, g, or t
  misc_feature (1076)..(1076): n is a, c, g, or t
gcagctctccagctggctatggcctcagtaaaaccaggtagaaaagcaaccgnnnnnnnnnnagaggccctgcggctaggtaaacactagaaaagaactgctttccagagagataacgtgggctccaggagcatgaaggaggtggcacttgaacttttaggaaaccccttagataaataaagtggggttggaggtggcgaaaagagggtaaccctgggaaagtcagtcagaacccatggcagaagactgcaggagaggcaggggaggggcttcggggaccactgtggacagagctctgaaagcaccctggccaaagcccctcctgaggtgacagagcgtgggaggaggctgcactgggcctgcgtgccatcctcacccctgttccccgctggcgccaggccctgccttcttggtacctgtgccaacaggagagccctcaccagccgatcttgtcactctccgtggtgacagtgtcttggccagctgtggcccctagtttctagcagcgtttctcagtgtccttggcccttctgagaaggcaggcgggaggcacacggtgccctgttcttccccgtttgtccagttgcttgcaaagcagagaatgagtaggagtgaacccgagtgacttcacccgccctgtcccccacgtcaggacaggcttgaggcctctctgggcgtgagcgaggaaaccaggctgctctaacttctgaagagtgggctctggctcaagactccaatcggccagaagcccacagagatcaaagcactagcaagttcagctgtcctggccctcgggtagaacccacgggcgtgcctgggtgcggctccacccacatgccccactgtcagcccaggcaggagccttcctggccgggctcaggatctgcctgcagcccagccaggccatcacccagccccgatgcatcctggcactgcacgcttactcttcacaagcacttagacgcggatggcctccgagaccctgcctccctggtctgctgaggtcaggccagntctcccacggagccgngcagctccacagcgcccaccacctggcaccgttaggtttcagatcncccgtgtggtgtttgatgtcggcttttgttcctaccttgggagtttggattgtttcctctggtgtctttgtttaccttcctcactgttctacctcctggccaggtctcagcttagcttccctggtgtggggtgtttttcaagccttccagccacagctgtctcccctcaggctggacggctccggggtgacagggcttcaccctctgcctgcagacccctggtgggcacatctcacaggcttccgtcttgctgagttgggtacggaggcagaagtggggtgtggaggaaagtcagagggaaatctgcttcagaaaggaagggtctttagacacaaagactggaggcccttccccgcccgcacgggagctgccatcgtgggtctcatgcacgtcaagaccttcccacatccaaactcagcttccagcagggattttgactttggatgacaaggctttatttgtaaatatgctcttaatatgcaactttgagaataaaatagaaacatcatgtattttaaaatataagatgaagtgtgacgcactgtatacaatttaatatatatttttagggttttgttatttaagaaaatggaatgtaatggtacttttacaaaagagaaaaaatgttatttttactttctggaaaaaataaatattctcattgttgtagaaag
